United States Patent Application Publication US 2014/0141044 A1 - sequence listing, part 4

SEQ ID NO: 126 - DNA, 5984 bp, Bradyrhizobium colbertium
ctaggtgggtgcctcatgccgcttacgaactaccagcgcatttcgttcagcttcctcttaaatccggcgacggctgtgccgaaccgaggatgccttcggagcaggcgcatcacgtgctttcgatgaaagtccgtcacaaccacaaagccgtcgagcattcgcaccttctccgcgcggctcgcctctctgtagcgctgccccacagcgaccgtcagttctcttcgagtcgccatgctcagttgcctcgttatcgcccccgctgtcccattccactggggagtgaggcaacggcctagcattcaggaacatttcaggcggcgcaatgcgctcgtgccttcccgaggcggtgagcgttggagtcatatgggatttgaggccgatcggccgcgcgcctcaccggcagcttcgatgtcggcgaaggccttggccatgccgtggaggccgaggacgttgaggcgatcgagggtcggatgggtgagcaagggatggtctcctagttgtagtagcgcggtccgcggatgttggcatgcaggatcagcgcatcgtccacggagcgctggtgagcaggacgccgatcgcgagcggctcggtcgggacgggatagacgatcatgtgagccatctgggccggttctaacgcgaccggctcggcctgcatcaaacggtgacatccgcactggacatgaagcaggattcctgcatccgctaggtcgcccgagtttgcatgatccggggccggatgcgacgagcagcagaccatcactctggatggaactcagtgccgtcgcagtttcggagctgatgaccgagaaggcgaacgcgaaaaccatgaggcttgccaaggcagcacgcagcaggcgcgctgggtcgctagtccaaaggtgccgcaggctcgtcatcgcacccctgatctttgttctgccgcaagcaggcacaaggtaggccttcctcttgccgggataaggcgcttcatcgtctgggacggcctcaagcgaacctgcgcgagataccgaatctgctgtccttccccggtttggcacgtcggccgatgaatgcagagccgtattggtgcccggttcctctggatcggcttcggatcctagcatcggcgtcgcccgcgccgcggcgcgcggcccgcttcacccgcaaaatagcgcagcgtcagttaggtaacgaggctcaagatggcagtacaggccgtagcccatcgccgcccgactcgcgcctgtggcccagaggctggccgcggttgacgtgccggaggggcgaccggcatatttgggtatcgcaccgtcgccgatgaagctcacacccgtgatcaagccttccaggatgcgagcctgtcgtgtcgagcccgcacgagcatgcagatggcgacgagcacggaaccgcaggaggcgacggcgacgagggggaaggtccggatgccgcccgcgcgctactcccgctcggtcccagccgatcggcaccgcgagtgcttaggcagccgcgaggtcgatcacgtgaaacgccacctcccaaaaaccaaggattgtaaacgtaaataaaaggtctctttaaacagaactgcaagctactctcgtgcgatacggcttactctcactgtcacgtccaagccatgtccgtaagggccaacttccacggcgcccgaagggccgccgtttatttgcgctggtcagaagacatggccggcacgagcgcggactccttcaggcgacgatctcctcgatgaccagcatgcccaggaagccgacgaagaacatcgcggtggtccagggtttctcgggtacggcatgcgcctctacgagcagctcttccgtgacgagatagagcagcgcgacgagcgcgaaggcaaagaagccggcgaggtagggaccgggcagcgcgccgaccggcgtgcccaggagggcgcccaccggcagcaagaccgcgagaccggccacaataccgattacgcgcgccgccgagccgcttgtctgcttgagctcggacgcaagcgcgagcccgaggaacagtacctcgagcgtgagtgcgcccgtgagcagcagaccttgctttgctccggcggcgaagccgataccgaggacgagcccatcgaccaggatgtcgatcccgacggtcacgatgagcccggtcgagcctttcgctgtctctcccagacgcttgaccaggagcatcagggcaacaccgagggctccacccacaatcaccgcgatgggagattgctggtgcttgaggtcgggcaggatctcgcccgctaccgcagcaaacagaacgcccgccgcgaggtgctggatggcgctggcaagcgacgggccgggttggcgcacggcggtgacggccgcccccaacaccgacgcgacggcagggatgagcgtgtaggcccaagccgacatcagggctccatagccgggattgtcatcggtgacatgatcggctccggccgctgaccggctcaggtccgtcagacatgcagcgccttctcctcggcccggtacacatcatcatagccgcatcatagccgcgtgtgctcatgttcatggttctactcatgccgatactacaatcggcactcttggagcttgcagcgcaccgcagcaccctctgctccgaggctgcaaacggcagttttcttcaaacgttccaacagcggacatcggtggtctggattgatccaatcctgctaagcgatcgtctcgccagctgcgatcgccgtctccgcaaccccgaccagctccgacggagtaatcgctaccgtctgtgccactggagagaaggaatgtcagcttgacaacaacacgcagtttaacggcaggttgacaggtcgcagacgaatttctatggttccatcgcgaaaaacgttctcaaggtgaagcgacgaaaccgatcaagcatccaccgcgatcacgctcatgatcaagacggactcgggcaagtcggggctggcgaagtacaaggactaacggccgccatccggcggcgatttcgacggctcagagccgcgcgttccttgccgagaccgggcgcgcggcgacacggcgcgcccggtggatactttcgctgcaactctccaagtagggcaagcgcaacgtgtcgctgaaacgggcggcgagcggcttcattcggcagtttgaaaggtaatctctccagtgcccgacaagaccgtcatcggacttcgcggctaatcacgctgcagcagcagttggacaagatcgcccggctactgggggccttggagggacccaatgtaaatgcagtccatgagatgagcagtctcgtcgctgccacaagagcctacgatcaggtcgccaacacgatcttgcgcgaagacgacaagaacgaactcagaaaactggccggtgaggatctgtaggcccataagctctctgccgcttccgacaaaatgcgggtcgacggaaggtgaccctcatgttaggtagccgcgtcatcttcaccaagagcgtgatcattgtccggttgtcaggtcataacgggaacccagcgcgtctctgcgtttcgcggatcatgtccgttctcctgaccgtggcgtacctcctgtccgtaattctgcacggactcgttgatgtggacgtcgtcaatcgctacggatcatcctcggcgatcgtattgatggacgggaaagactctcaatcgcccgaatggggcttggtggccgatcaccactgtcacggttgcttctcggtgtcggtccccgcaccagcgcagcaggctgaactcgccttggatttgaagatcgcggagttgccaaaatcggcggctcccttgtacggcaatgttagcggtcttgatccgcccccgccgaaatctctgacctgaagacgaaccacgcgggacgcatcgcgcgccctgtctcggctttccgtcgaattccctcgcgcgctcgtcacgcagcgcgatgatggcatccgtgtctttagactgtcgacggcgtcgatcgcaaagctttcgcgatctcagccgagttgctgggggagcgagcgcgcagtcgatcttgatcgacaacggacttttcaggagccgctctggaggccagtccgttttgccggggccgtcgcggcacatcgattgaaattgaaggatcgcgctatggaaaccaagcaagctgaaggcccgcagtcctcgacgacggacaacctcttgcagcgattatcttgggaagtgaagcaaatacacggttgtctaagcgaagtgcagaagttctgggcgacccgcgtgggcgtcacggtgtctcaatggaacattctcatggccatatcgcatcttgcgggcgacgagggtgtgcgggtccacgtggtgtcggagaagctcgccgtagacgcctcattcgtcaccgcccagtcgcagttgcttgagtccaagggactgatctaccgcaagccgagcgcaatcgaccgccgagtcgtcctcctcgcgctctcgagcaaggctcaatggcagatagaagagctgtctggctccatgaacgctgtgaatgcgtatgttgccaataacgcaagcggcaaggcgcaccggcttctcacagaactcggggagctgaagagcgtcctcaagcgcgcggagctcctgacggcttcggacgcgctccgccattggcctcgcggccgcgacaccgcatgaaatttctatcgaaattggtcgtggcgttgcttaagcctctctactaccgcttcgccgctgccatgctgcgcgacacgacatggcaagagccgttgttcgaactggtttcgccgaagagcggagaacgcctgttggccttcgggcctggaagcgcatcgtccgcgacgtccctcgcggaacggttcaccgagctcgacattgtcgttgccgagccgagcgcgagagcggtccggaacgcgaaacgggccgtcgccagcggtgggatccgcaacatcaccttcgtcgatgccgtctccatgatcaatctcccgttccacgcaagctgtttcgactgcgcgatttgcatcatgtcctttcacttgcggccacccgaagaaaaggtcgcgcttgccaaggaggctctgcggatcttgcggcgcgggggcgtgctttacgttgcggactatgatcggccggccaaccgcgaggaacggatcgttctcaaccttgcagcgcaagtgtccagcaggagtgccgttcagtcacatgttgacgggacttggacccaatgtttgaaaaaagccggctttgcgggcgcgagatcgcagtcgtcgcagtcagttaaaatcgggcgggttgcgatcatgttgtttcggaagccatgaccaatgtcccgagcgcggtcgtgcagaaggggcggttgccccggacctgtgtcagcgactccgattctccggaagtgtgtcgagggggtggggatgaccgcgcttcaatgcgattacccaccttgccgcgaatgcttcgcaactgaatgcttgggattgttacaacattgcgggtcgacgtgagccgcgtgcccatgctacctaccaactcgcgaacgtagagcgtggtcactggtgatcgatcggatcagatttggaatgaggcgtatccctgcattgcgcggggttgtgtccgtatttctgatcctgacctatctgctgtcgggtgtcctgcatcgctgtctcgaccttgacgtgagcaatccgaccggttccccggtgttttggatggtcgacaccaaagtcgatagcggccctgagagcggtgccatcgtcgaccatcactgccatggctgtttcgcggtttctgtcgcagcgcccccgcagcaggtcatgtccgtgatggaacccaagctggcggacctcatccggtcgacggacccgttaacggatactgtccgccgtctcgatccaccaccgccgaagtccctaacctgaaaaatgatcgccgggcgcatcgcgctctgattccgtctttcgtcaggttttcatcatgttttcaaagtgcgtcacgcgtttcgcgtgcgcgacggcgttgctggtc

SEQ ID NO: 127 - DNA, 5768 bp, Bradyrhizobium colbertium
gctctggggcggccgttgtggtggtggcgggcgcctgctcccaaacaggggcgagcggcggcggctgcaccggccgctgcgcgtgaaggacctcttcgaacgagctcagccgtcgccgcagatcggccgcctggctcgaggccttgatcgcgatgaagaaggcggcgatcgcaatgatcaacgcgaagacgtcaaacggaccgtcgaacatgaagcctccaggccaccggcggggcagaggccggtaccacagtaacaggatctagcgccgggaccgcacgcgcaagcccggcgcgggccgctcctggagcacctcgcggcggaagcgatagagtgccgccggccgtccgcccgtctgtgtcgacatgaccccggtcggttcgaccaaggcctccatttcgaccaggcggcggaagttctgcttgtgcagatgccggccggagatcgcctcgaccgtatactgcagttccgtaagtgtgaattcagccggcaatagttcaaagacgacagggcgatacttcagttttgcacgtaaacgcgcgatcgccgtggcgaggatccggcgatggtcgaaccgcatcgaggtcccgagcgggggaatcgccttgcgcgccaatgccgcagggcgtccatcacgccgcgcctcctcgatcagcccggcctcgtacagcagttcgtagcggtcgagcacgcgctcctcgtcccagggcgcgccgtcgagaccgaaatagaaccgcacgcgatccttccgcggcagcgcgcgtgtcgtctccggcgtttcttcctcggcccacttcgtcagcgccgggatgatgtcgcgggagatgatccccggcggctcgtcccgccagtcttcccaggggaagaagcggtaccatggcgcgaagcccgccgcgtttgcagcaagctcgccgtccacaggtcgcgtcagcgcgagatagccgatcgacaccatatgtgccccggtgtcgccggcctcggcatggcggccgcgatcgccgaagttgtagagctgctcgacgtagccgagccgcaggcccgtctgttcctcgacccaggcgcgcaggccaatctcgaaggtgcggtggctaaccgcatcgaaagggccgaacggcaggccggcaagcccgtcggcgcctcgtgcggtcaggatcagcggctcgtggttctcgatcgcgacgatcgcggcggtgaggccaatctcgatcggcgtcaggagctggtcgctcatgcgatgacgatcgcgcctgagagagagatgcgtcggtgcaggttgtctgagcggctctctccgcgggctcgctgcacctttcccgcgagcgggagaggtcgcgccgaaggtgcgggtgagggctctcgcgtcttggggactcgcaatgaggtgacaccccctcccgtaagcgggaaagcgggcgcagtcccgctgcggctgctattcgatgcaattctcattcgagctcgatcacgaaggggcggccttccaccatcatcgcgccggggcccatctcgtcgagcgcgcgcagcatgcggccgttgcgccccagtgcacgatcggcaaggctgacgatgcgccggttcggcgaggcgatcggcgacgccgcgcgaatcttcctcgcgatctcgacctcgtcacgatccggattcagcgcgcagacggctgcgaacgcgcttgcggtggagcggctgatgccggcatagcaatgcaccaccagaggcgcgcagcgatcccagccgcgcacgaaattcagcacctgctcgatatgcgtctccgatggcgcgacgaaaccgtccatctcctcggtgatgtcatccatcgacaccttgaggtggttggccggcagcaccgacaccggacgtgccacctgctcgacattggccatcacggtgagcacatggctcgcgcccgtaattcggacagtctcgggaagcgcggcgagggaacagacgtggatcatggcggacctttttgccggcaattatagcgagggacagtagggtgagcaaagcgacttgtcgccgtagctcaaaaagcgaaggcggacgcatgtccgccgcttagccgcaaacgcggaaggatggtggggtacggcgcagtgcgccggcagggcctacgcaaacacggcgccgaaccgctccagaaactgcttctctgcgcgagccgccgtccagggtgtcaagtagtcgcgccggacgctgtcggacaggcctggatccttgccgaacaggcgcttggcctcgctctcgccgaagccggcgagctcggttgcctcgaggtaagcggcgccgcggtcggcggctttgatcgccagcgtgatttcctcaggcagctccgctgggaggccgaagcggatatggatggcgccgagcaaccgcttctcgaccgccttgtaatgaccatcgagcacggccttgaacggcgagatcatgtcaccgatcacatattccggcgcatcgtgcagcagggcggcgagccgcatgcgctgatcggcccgcggcatctcatgccgcagcacggtttctaccagcaacgtgtgctgcgcgactgagaagatatgcgcgcctatggtctgcccattccagcgcgcgacgcgggcaaggccgtgcgcgatgtcggcgatctcgatgtcgagcggggagggatcgagcagatcgagccgtctgcccgacagcatgcgctgccaggcgcgggacggcgcatcgcgcgcggtcttcttcgccgtcatttggccttgaggcgcggcttgcgccgggtcttgccgcagatcgcgtgacaatggcagtcgacgagatgatcgttgaccatgccggtggcctgcatgaaggcatagacgatggtcgggccgacgaatttgaaaccgcgcgaggacagctccttggagatctgtaccgatagcggcgtcgaggccggcacgctcgcggtggtcttgaaatgattgaccagcggcttcccgtccatgaagtcccacagcagcttcgagaagcccgggcccttctccatgatgtcgagatacgacttcgcgctcaggatcgcgccgtcgatcttcgccttgttgcgcacgatgccgacatcgttcatcagcgcatgaaccttcttggcgttgtagcgcgcgatcttctccggctggaaatcgtcgaaggcttcgcggaaattatcgcgtttgcgcaggatcgtgatccacgacagcccggcctggaagccgtcgagcatcagcttttcgtacaatgcgcggtcgtcgtactcgggcacgccccattcggtgtcgtgataggcgacataaagcggatcttcgccgggccagggacagcgtgtctttccatcgggatgcaggcgggcggcgcggctcatgtgatgggctgcttggctgggattcgaacgacgtcaggttcagcgagcgtcagaggcagcccaccagcggtgagcggctggcctgcatcgagcgcttcggcgacgcggtcgatgcgcaccagggcaatgcccttgccgccggcgctcgagccgatggtgccgaccggcttgtcgccggcgagaatggtcgcgcccggctcgggcgacgcgccgtcgagcagcaccttcacgctgcgcgtgcgcgcggtgccgcgatgctgcatgcgcgagacgacctcctggccgacatagcagcccttgtcgaaatcgacaccggcaagacgatccatgttggtctcgtgcgggaacgcatcgctgtacatgaaatcgagcccgccgcggggcacgccgagcgcaatacggtgtgcctcgtattcggcgggatcgaccagctcggcgccgatgagatcagacagcttcgtcttgaggtcttccggaatcaggatgcgatagccgagcccgtcgttgcgcggatcggcgaaggcgaggtccggttgggccgtgggctggccgtcccaggctgcgagcacgccgagatcgccggagaggttgtccaccgtggccttggcgcgcagcttgtagaatttcagcttggtgacgagggtgtccgccagcgctttggggcaatcgatcaggaacccgccgccatggccggccggcacctccgtgatcaggaaatccacaatgatcttgccctgcggcgtcagcagcgcgccgaatcgccccaggcccggtttcagcctgtcgaggtcggtggtgatgaggccgttgaggaagttgcgcgcatcctcgcccgcgaccttgaccacgccccggtccggaagaaacgccgatttcatgcgaaaatctcttgcgacatgttgctccggaacgtaagcccgcaacgcataaacgacaagacctcgagccctgcgcttggggatgagagaggccttcagccatgagccagcgtttcgatgtgattctcaggggcggcaccgtggtcaaccaggacggcgagggtgttcgcgatatcggcatcaaggaaggtcgcatcgccgagctgggcccgctgtcgcaaggcagcgccgcggaggtgatcgattgcaagggcctgcacatcctacccggcgtgatggacacgcaggtgcatttccgcgagcccgggctgacgcacaaggaagacctcgagaccggctcgcgcagcgccgtgatgggcggcgtcaccgccgtgttcgaaatgcccaacacggcgccgctgacggtgacggacgccgaattcaccgataaggtgaatcgcgcccatcatcgcatgcattgcgatttcgcctttttcatcggcggcacccgcgagaacgtgcaggacctgccggtgctcgagcgcgcgccgggctgcgccggcgtcaaggtgttcatcggctcctcgaccggcgcgctcctggtggaggacgacgaaagcctgcgtcgcatattccaggtgatccagcgccgcgccgctttccacgccgaagacgaatatcgcctcaacgatcgcaaatcgcagcgcatcgaaggcgatgcgcgttcgcatccggtctggcgcgacgagaccgcggcgttgattgcgacacagcgcctggtcaagctcgcgcacgagaccggcaagcgcatccacgtgctgcacatctcgaccaaggaagagatcgagttcctgcgcgaccacaaggacgtcgcgtcttgcgaggcgacgccgcatcacctcacactggtcgcccccgaatgctacgagcagctcggcacgctggcgcagatgaacccgccggtgcgcggcgccgatcaccgcgccggcatttggcgcggcatagagcagggcatcatcgacgtgctgggctccgaccatgcgccgcatacgctggaagagaagcagaagacctatccggcctcgccctcgggcatgacgggcgtgcagacgctggtgccgctcatgctcgatcacgtcaatgccggccgcctgtcgctggcgagattcgtcgacctcaccagcgccggtcctgcgcgaatctacaacatggcctgcaagggccgcatcgccgccggctacgatgccgacttcaccatcgtcgatctgaagcgcagcgagaccatcaccaacaaatgggttgcatccaaggccggctggacgccttacgacggcgtccgcgtcaccggctggcccgtcggcaccttcatccgcggccggcgcgtgatgtggcagggcgagctcgtgaccccctcgcagggcgaggcggtgcggtttctggagacgctgaagccgtaggctcttctgtcgggggacgaacgcaccatcccccgccacagcgagcgcagcgacgctatccagaaaattttcggtagaggcagtctggattgcttcgtcgcaagagct

SEQ ID NO: 128 - DNA, 1047 bp, Bradyrhizobium colbertium
ttgatcttgcggccgttgatgccgccctcggcattgactttgttgaaataggccgcctcggtcctgccgatcgaggcgtagccggaagccgggccgctatagggcatgatgttaccgatcttgatctcggtatcggaagcgccgctgtcgtatttcttctgcgccagcacctcgctgctcattgcagtgcacagggcgagagcgacccagaggaacgcaacctgggaacgaacgccgaccattgctctcctgccctggaatggatcggtcgcattgaacaagattgacgccggtcgtcaacaaaaagcccccgcggtcgcccgcgggggctcttggcattggaccattccgtcagcgtgtcactgggaggcgatgtcgccgctgatgatctccccgaacagttcccacctctcgcccttgaagcgcatcatctgaagctgcgcaatcggggcgaagtcggtcgggttggtgttgatcttgacgccgggcagcagggtgtccggcgcgaagtccttcaggctcgcggcctgcttcatgaggttggcgcgggtgagatcgtcaccgcacatttccagcaccttggcgagggtcgacgcggcgccgtagccatagaccatgctggtgtcggacttgtcggcacccggcatgtacttgtcgacgaactcgtgccacctcttcatgccgggatcgttggcccactgcgggtcggtggagtccttggcataggcagccgacaacacgccctgcgcgttctcgaaaccggccggcttcatcacgctgccgaccgagatcgacacgttggtgaggatctggagcggcttccagttgagctcggcggtcttcttgatggtctgggccgcgaacttcggcgtggtgtagatcaggagcacgtcgggattggcggccttgatcttgacgatgtggccgtcgatcgacggctcggaaatctcgtagctctcctccatgatgatcatggaggcggccttggcgccgagaccgtccttggtgcccttgaggtagtctttgccgaaatcgtcgttctggtag

SEQ ID NO: 129 - DNA, 10955 bp, Bradyrhizobium colbertium
acaggacgggcaatttgagaatgatcgcttctagggttggcaaaattgcgacgttgacgtcggacaacgtgaatagctgcgctccgcttctgcatttcgcacatgcgaccggcttcaatgcggaaacgtatcgacgctttctggagcagctatcagcaagcttccgtgtcgtcgcgtccgacgcgcgtggacatggacgcaccacattgccagcaattccggaaaggctaacaagttgggagacctatgaattggatcttgaggagcttcttggcgtttacaaggagcctgccttcctcgtgggtcattcgatcggtgcaaccgtcagtgtgatgctggcggcccgacggccagacttggtgctcggggtgggcttgctcgagccgtcatttgtcccgttcgagagggcgtatcgagttgcgagcgagcggcgggaggggcgcatcgtggacttcgatattgcaatccaggcgcgcaagcgccgatcgacatgggcgtccctgccggagatccgcgagtcttatgcaaagaaagcaatgttcgccacttggcaagacggatttcttgaagattatcttgagggtgggttggtattcctagctaacgatcaaatccggctggcgtgtaatccatcctgggaagctgcaaccttccaggccgcgacgaccgatttttgggacattcttccacgttacaaaggcaagttactgttggcctacggctcgcgatttagcactgtaagtgatgtcgatgcgaagaagattgtcgaacttgcacctcaaactcgcgtattcaattttccggagaatagccattttcttccaatggaacggccagaagcactatctcggctgattatgagtgagtttgataattcctagcgtggctatcgccgcggatcgattgagcgattttactgttgcgccggcgcgacgattgccatgaggccgcccaacgtgattgcgcgcgactggatcgtggcgccaagcatcggttgttcagcggaaaacatgcggcgccattccattggaaatcacggagacgacccgggaatcaatcgcggaaaagtggacattgacgataactgcttccaacccacataacagccatgtgttgatcactcttcagactactgggacacgtttggcggcgacggcggccggtgaaatgacgtcgatgtcgatcggcacccgccagcgctcggtgtagcgcacctggggcgccgcgttgctggccggtgcgccttccagcacaaagccatcgaagccggcactcatcacctcgttgcatttctgcacatagaccgggaagccgccgatatacggcatgaagacgcgcggccggccggggatgttggtgccgacataccaggagctgcaggtcgatcgcagcgaaacagtcgatacgtcagtgacgtgctcgacccaggcgtcctcgtcctcgcgcttcggctcgatggtcgcggccccgacgtcgcgcatgtgggccatgcagtcggccagccagtcgacatgctgctcaatcgcctggatcatgctggcgagcactgagggactaccgggaccggtgatcgtgaacaaattggggaagccggcggaggcgatcccgaggtaggcgcgcgggccggcgcgccacttctcggccagcgtcaaacctttgcggccggtgatcgcaatcttgtcgaacgaacccgtcatcgcggcaaagccggtggcgcagacggcggtgtccagtggatacgcgaccccgtcgacctcgatgccgtcaggcgtgaagcgttcgatcggcgtcttggacacgtcgaccagtttgacgtgctccagattgtaggtctcgaagtaggaagtatcgacgcagagccgcttgcagccgaacacgttgtccggacacagcaggtcggccgtcgccgggtccttcacgatgccgcgaatcttgcggcgggcgaagtcggcgatggtgtcgttggcggccttctcgaacagcagatcgccgaaggcgccgaggaagggcaggccgccgcgggtccaggcttcctcgtattgccgttcgcgctcttcgggtgcagcctccagcgccggcttcatgttgaaaggaaaatagaagccggtcgggcgtccgcgtgccttggcccgcaacgccggataatccgccttggccgcctgcaaatattcagacgtcaggctctcgttgcgcgccggcacggaccacgtcgccgtgcgctggaataccgtgaggtgcgccgcctgctgcgcgatgattgggatcgactgaatcgccgaggagccggtgccgatcacgccgacccgcaatcctgtaaagtcgacgccttcatgcggccattcgccggtgtggtagatcggaccgcgaaagttcttcatgcccctgaagtttggccggttcggtgccgacaggcagccgaccgccatgatgcagaatctggccaaaaccctgtcgccgcggttggtctcgatcagccagcacccggcgtcttcgtcgaacgtcgccgcggtgacacgcgtgtcgaacacgatatcccggcgcaggtcgaaacgatcggcaacgtggttggcgtaggaaaggatctcggcctgcggcgcgtatttctccgaccagttccactcctggtccagctcctcggagaaggagaatgagtactgcatactctcgacgtcgcagcgtgcacctggatagcggttccaataccaggtgccacccacgccactgccggcctcgaagacccgtgccgagaagctaagcccgcgcaggcgatgcagcatgtacatcccggcaaagcccgcacccacgataacagcgtcgaaaaccgctcccatttcgcctgggcgctcttgtcgcgttgtgttgtcggcaatcatgactcgtgtcgtctcctttgcaggtcgactaagctaatcgagataagttcgttctccgcaggcgccagagggttcgcaaataaagcccgagaaatgcatctcgtaccccggctcgcctattaagtcctgagtcttatattttggtaggcgggcagggcaatccaccagtggccgaagctggtacatggcggatcgaaacgcagagctggctagctatatgccgcaggcggacggcatcggagatatttgcaatggaatggaatcagcgccaacttggccggcaacgtcggtaaatcgacttcgccggccagagacagttcatttttgcgtctcagatttggcgaagtccgccgactgttccttcactacgctccaaacctcgtcttgaaagccagcgatccaatcggtttgtgcaacccatttctctccatcccacatttcaatgcgtgtcttgccgccgccgccatgatcctgtgccgtgactgtaataggtgcaatcagcccgttagcatcgtaatttttcagactctcaagaccagtcttaattttatcgggtgttagcggccagccgccattcttgatcgcaagccgtgcgccttcgaatgcgatcgagtagatcgcaagaccagtgttgtaatagacgtcctcggtaaatttgcgatcaccgttgcctttgcccctgtcgtaaagctccttgataatctgctgaaccaacggctgatatgagccgccggcgacgttggtgccgcgtttcaatcccttagcgacatcgggtccaatattcttgatatcgacctcgttgagccaattaacagcgatatacttttcaatcgagatcccattgcgcttcatctcgcgcgatgcgatcacatgcatattcgacaggctccagctcacaatccagtcggggttaagacgacggatctgcgtccatgccgaggcctgatcgttgcccggcagcggatacggcacgagctgcaactcgaaaccctccttctgcgccagcgtcttcagaataccgatcggttcctgtccgaacggataatcgatataaaagaacgcgaccttgacgcccttcagatttccgccggacttttgtttgatgtattcaatgtcattggcggcctgaccccagtaggtcggcccgatcggaaatacccatttgaacacgttgccatcgaccgcatcccctcgaccgaccagtgactggatcaggatgttgccatccttcataatgcgcggaaggaccgcgcgcgataccggcgtcgacaacatgtcgaacaccatcacgccttcgcgcttcaagcgttcgtagcattcgatgccgcgctgcggctcgttgccgtggtcctgcacgataatttcgatcggatggccttcgagacctcccttcgcattgagaaggtcggcatagtcgcgcacagcttgggcaatctgcggcgtgacgaacgtataggccttgctcaggtcatagcacagcgcgaagcgcacaggatcggccgcggctgccggcacgacgttgagcagcgccaacgctagtccgcctagtatagatagtaatctcattttagcgatccttccttggttgactgagcgaactcaggaaattcttaatcatcccagctttatcgaacgacgcacatctggtgatcgtcaggtcagccaacgtttccgccggctataatgtttgatgtcacgaaaattcttgttttgcgcgcctcccaggtaaaattcctgaatgtcgggatttttcttcaatgcagccgcactgtcgtgcatcacgatgcgaccgctttcgatcagatagccgtgggagacaatttcgagcgcggcaatggcgttctgctcaaccagcaatatcgaaagtccttcatcgcggttgatgcggccgaggatctggaagatctcagccacgagaaaaggagccagtcccaggctgggttcgtcgagcatcaatagttttggctgggtcatcagagcacggccgattgcgagcatttgctgttcgccgccggagagataacccgacgcgacggtccggcgctcgtgcagacgtgggaaataactgtaaacccggtccttgttgcggttcatgtcctggcggctatgcaacgccgaagccgcgatcaagttttcgtcgggcgtgagatgttcgaacacccgacgcccttcgagcacgtgggcgatccccagcttgacgcggtcctgcggcatcaggccgccaaggctttggccgcggaactgcaattcgccccgccgcacctcgccccgctcggccgtgagcaaaccgctgatcgatttcagcgtcgtactctttcccgcgccattggcgccgagcagggccaccattccgccctcgggcacatcgatcgaaacacctttgatcgcaagcgaaacgtggtcgtagacgacctcaatattgttgagggacagtatcttagcggcaatgggtgcattcatggcgttcgtgcttcccgctatttcttcgtgtagccgaaaggccataccagaagatagtcccgaatgttgttgtagatcttcccaagccccagcggttcaatcaggagaaacccgataataagcgcgccatagaaagcttggggtagatgagccagagtttcgatacccagcgagaacccgaacttggttgccgcccaggagatgaaactgttcataacgcccggcatcagcagaatgaacgcggcgccgaaataactgccgatgatgctgcccagcccgcccacgatgaccatcgccaacgcctgaattgagacgtcgacggaaaactgctcgggggttacggcatggtaaaatgtaccgatcaggatggctccgctcacgccaccgatgaacgaggatgtcgcgaacgccaccagtttgaagtagaagctgttcacgccgatgaccgcggctgcgtaatctttctcccgaacagcgaccagagcgcggccgagcgcggtgcgccgcagattgagcatgaaggacgtaaccagcacgcaccagacgagggcgacgtaatagagtcctgcatcggaggtgacagcccagcccagcaggcggatgtcaggtgcctgcaacgtggcctgtgtgccgccgctgatcgcgggtacgtgcgaaatcgtccagtccatcacgaactgcaaggcgagcgtgctgagcgccagatacaggcctttcacgcgcagtgcggcaaaagcgaacacacttccgataaccgctgctgttattcccgcgaggacgatggcaatctcccacggtatgcccgcccttgtggcatgaaccgcggcgtaggcgccgattcccatcaccgctgcgtagcccaaatgaaattgccccgcccatccgaggatcaaattgagaccgagcgcgcccgcagtccagacaagccaaggcagcaagtaactgctgagataaagcgtgttcatgtagatcggcgcggccagcgccagcaatagcagaataccaatcatccatcgatcggcgggggtcggaaacagtgcgcggtcggcgctgtaatccgtatgaaaaatcccggcttgacggaatagcatgatcctagaccctctcgatgtcgtggcgaccgaaaagtccgtgcggtcggatcaagatggtcaggatcagcattgccgcatcgacaagatcgcgactcgcgccacccaacaggggatcgagaacgctggatgcaattccctcgacgacgccgagcaggacgccggcgagcaacgcgcctcctatactgtccagtccgcccaaaacggctacggtcacgcccttgagcagcagttgcgcgagcgattgatcgacgccctgtaccgaactccagagcacaccggcaatcgtcgcgaccaccgccgacatggcccaagacagcgcgacgccgcgctcgaccgaaatgccgaccgaccaggccgccgtataatcatcggaaatcgcacgcaaaaccacacccatccggctccggaagaacagcacgaaaaaaccgaacatcgcaattgtgaccaccgctccaaaagcgtaagcacgattgatcaataatggaccgagaaaaagcggggcatcgctgatgcccagattcatgggtcgcgtggtaccgccccaaatggtcatcgagccggctcgcaggaaaatctccaggccaagcgtcatcatcaggatcatgatgatggggcggccggcgaggcgccgcagcgccacccgttcgatggccattccgatgatgaacattgttatgatcgccagcgaaatcgcggcccagatcggtgcgcccgcgctgttggcgaacgcgagcaggacataagcggccagcatcgtcatcgagccctgtgcaagattaggcaccgatgacgatttgtagatcaggacgattcccatcgcgacaagtgaatacatcaagccaataagcgcgccgttggcagcagattccatcaacgatatcgcgtccattcttcaggcctcctgtaccgacagtgtgcgttcgatgacgccgacttcgcctgactcgtagctgacctttgccttcatcagcactgtgttttgatgcccgtagatggcgtcgatgatcggtttgtagcgctcctccacgacgttacgtcgaatctttcgggttctggtgatttcgccgtcgtcggcatcgaattccttgtgcaggcagacgaatttccgcaactgcaagccgtgcggcagtgcactgttaacgtgcttcaccgcggcggcgatcagggcgatgacctgcggcttctgcgacaggtcggcataggagatgtaggaaatgccgcgcagttcggcccaaaggccgacagcttccttgtcgatgcaaataatggctgacagcgtatcgcggccgcttccgagtaccgcagcatccttaatgtacggactgaacttgagccggttctcaatatagttgggaatatagcgctcgcccttcgcggtgtgcacgatgtccgacaggcgccccagcaccacgaggtgcccgtcaggttcgaggtaacctgcatctccggtgtgtaaccagccgtcttcgaggctttcgcgcgtggcctcgtcctgcttgaagtatccgctgaacacgctgcccgagcggaccaggatttcgccggcgtcgcttatccggatatcgacgcccggcaggggacgtccgacggtgtggagccttacctcgttgagatcctggatggcattgtaggcactggtttcagtctggccatagagttggcgcaatttgatgccgagcgcgcggtaaaagacgaacgtatcctcgcccatcgcttcaccgccggtgaaggcgccacgcagccgggtcaggccgaattggtccttgatcggtccatagaccagccactcgcctattgggctcaacaaccactgcttgagtgtcggctgaccgccttcgagcttgcgtttttcggctgaaatggccaacgccataaaaaacttgtagaccagcctcttcagccacgaggaatcttccatgcgcacctggatggtggtcaatagattgtcccagctgcgcggtgcggccagatagaaagtcggcgcaatctcgcgcaggttttgcagcacggtctcctgccgctctggaatattgatcgtgaagtgcagggcgattccggcgcccatcgtcaccgcgaagtcgccaacccaggccatcggcagataggccagaatgctctcgccgaactggaacgctccgcctcgataggcatttcgaacgccggccaacaggttacgatgcgacagcaccacccccttgggcttgccggtgctcccggaggaatgcacgaacacggccgggccctcgggctgcgcgcgggcgatcagctcgtttcggagattggggttgcggatgactagctccgcgccctttgcctgaagcgtgtcccatgagatcaggcctggattggcgtaagcggccagtccacgcggatcgtcgtagataatatgctcgatcgtcgcgccttgctcgcgcagatcgagtattttgtccacttgttcctggtcttcggccagcgcgaaacgcgcgcccgcctcatgaacgaagtggcgaatttcatcgagggttgcatcggggaaggccggcatcgcgtacccaccgagggcgccagcggccagcatccccgcgtagagccgagggcggttgtcgcccagcaccagcatgacgtcgcccgccttgaaatccagttcttcgagaccagcggcgcagcaaagcacgatctcgagcagctgctgccacgtcgtctgattccagatgcccttgtctttctcgcgcatcgcgacacgatcgggaaagacttcggcattctgcgccagaacgcggatcagcgtggtatcggtttcgaaattccaggccaaggccggttcagcgcgcgacatgcgcacccccgatgtatgcctcgatcacccttgggtcggcgacgacgtcggccggcacgccgctgccgatcatttcgccatagttcaacgccagcatgcgatcgcaaatgcccgtgatgacgtccatgtggtgctcgatcagcagcacggtgacattgcgttcatcgcgtgcatccaggatgaagcgcgccatgtattccttttcttcctggttcatccccgccatcggctcgtcgaggataaggaagctgggctcggcggccaaagcgcgcgccaattcgacccgcttcttcaggccgatcggaatcccgtcgaccagttcgtcgcgtacgccttcaagctgcagaaaatcgatcacgtcttcgaccgcggcgcggttcaacgtctcgtcgctgcgggcaagccaccaatagagcgccgtacgtcctacactgggtttcatgtgaatgtgacggcccagaaggatgttatcgagtacgctcataccattgaagagcgccaggttctggaaggtgcgggcaactcccaacgtcgcgacatagtgtggcgccaggcccgtgatgtcccggccgttcagcagaatatgtccacgctgtggcggataaaatccggtgattgcgttggtgagggtggtcttgccgcatccgttggggccgacaaggccgaatatctcgccgcgctcgatccgcatatcgattccgttcagcgcgacaatgccgctaaagcgtcgctcgacagaccggcattcgagtactggggcgtcgccgccgcgatccttgagggtcaacttgaatcccgtttgaaggtcaatctgttaagaacactttcagtttccaaatctaacgtctgttaggcatttgggcaactgaagaatggtgcgttgcaattggccaaacgaccgtacacgcctcattgtgcgagatatgcgccccgcccactggctaagagaactcggctggtatcggtcacgcgtacgtcggcagtgcttatccggcgccccagtttgaccaccatgccgcgagcgagaactgtcccgcgggtggccggccgatgataatcgacccgaagatctgccgtagcacttacaatacccccggctgcgcgaacggcgtaaaggcccgttaaatcgatcagggctgccaggattccaccgtgagttgcttcgattgcagtattggcaacaaattcctcgcgccaaggtagagaaatttcgatttgttcacgagcgaccatgatggctttcaatcccagccaccggtggaacggcgaaatcatcaacgccttttgaaattcagcaatagtctcttcgttgggggggccagtctcattcactcgttcgctcctatgtattttctttcagcaatcaagcactgacatgccaccaccggctatcactggttcattccttcgacaaagctctcacaaaatgggtcgacttcgattgcggggctaatcgtcgcgtgtatcgccattacgttgtgatatctgcggtcctcgaaagaaactgacgacggcctcagtaaatgcatcatttcgatcgccaacgaccatatgacccgcgccggcaatatcggtgtacgcagagtggggagcaagtcgaagaaactcttgcgcagcatccacgcttaccaaattgcttgatcctccacgtatcaggtgaatcggcagcttaaggtttttggcagcgtcggtcagtcggttttcggactg

SEQ ID NO: 130 - DNA, 7279 bp, Bradyrhizobium colbertium
gtggtcgaagccatgaagatgcagaacgtgctccgcgctgagcaggacggcactgtgaagaagatccacgccgctgtgggcgccacgctggcggtcgatgcgtttatcctggagttcgcgtagatccatcattgcccgccagcacgacggtgtgacatgcggtcgatcagagtgattgtatcgattgcattgcgctgtcgtatcccgaatagcaaagcgacgggccgttcgggatttgcgagactagcaccgacggatgccggcaagccccagttcgtgccaattcagcggcaaccgacgcgaacgcatccgtcagaatggagagggagaccggatgctgcgccaagatcatggaagcgacggcgcatgactcgtgcgccgagacacggccgtgatatcccatccggtagacagcatagagcattatgttgctgggcaagcagttgccattttccaggtggagcaaaaattgtcggactgcaggcagacagctcgcgcaatttcccgacggttcgacatgacaggggcaccagtgctacagctaccggtcatgcgttcggctggaatgcgccacacaaggaaactgatggcgacgatcgaatccggtttactaatccacgggaggcgcaggagatcattgccgaattccacatgatgatcttgccgaaagctaaagcaggctcagcccacgacttgagcacgcccgcgatagtctcttgcctggttcgccagcggcatcgcgagggatgtggctgcggttcgggcggcaattatccaacgagcagaccgaagtgagtttccgcgtctcaagctcatcagacaacaaacgattgctttgggcataacgattctacagggacgaattcaagcgatcgtgcgagcccgaggcgctggctcgcgtggatccataagcatgccttatgggatcgacaagcatttgtcttgttctcttcctgccgaagttgaaatgctgcggtcgacagcttgcgaacgaacagacccgccgccaggagcaggaagagagaaaaatgcttaaactcaaggcaatctgcgcaacactcgcttttatccttgttgcgaacgcggctcccgctcagacagtttacagggtcggctcaacgccaaccagcgtaccgtttgcgttcattgacgtgaagagcaacaaggccgaaggaatgatgattgacgttattgaggccgtcagcaaggagcttggcttcaagatcgagatccagccgatgcaattctcggcactgatccccgctcttacgtcggacaagatcgacatcatcgcggccgctataacggctacgccagaacgggcgaagatcgtggacttcagcgaggaagcttactcttacggcgatggacttgtcgttccggcctccgacaagcgagattatgctggcgtggcagatctcaagggtaagaaggtgggagctcagataggaacgcggtacatcgaatacttgaaggcgcagagtggcgccgaggacgtgaaggcctacgatgccttgccggacgtacttcgagaagttgcaaatggtcggctcgatgcaggtgtgggcgattttccaatcttcgcctacaacttgtcgcaggatcgcttccctcaggtgcgcctggtccgaacgtacaaatccgggctgacgggaggtatcaatctcgcggtcaaaaagggtaacgttgaacttctgaacaagatcaacgcaagcctctcggccatgaagcaggatgggcgtcttaaggctatcctgaacaagtggcagctctaatcctcggtcttattatgccgaggtttttgcataatgcatcggagtacctgccgtttttgatgcagggcgtatcctacacgatactggtgacgctctgcgccttcgtcattgcaacaggactcggtctggttcttgcgttcatgcgagtcagcggcgttccgccgctagcctggacggcacgtacagtgatcgtcatcgtgcgtggcattcccggcctcgtgacattgtactacatctacttcgtggctccagagtttgggctgtcgctgacgtccgtccaggcgtccataatcggacttggaatcgcctatgccccctatatggccgaggtgttccgctcaggcatcgaagcaatcgatcgtggtcaaacggaagcggcgctctcaatcgggatgggctgggggacgctaatgcgccgggtcttgctgccgcaggcagtgcgggtggctctaccaccttatggcagcacgatggtgatgcttcttaaggactcgtcgctcgcttcgacgatcacggtcgccgagctctcacttcagggcaagctacttgccgcctcgacttttgaaaacacgaccatcttcactctcgtggctttaatctatcttgcgatgagccttccgcttacggccttcaatgcgtggctcgaacgaaaattgaggtaaccgcgatgagcatcatcgaactgcgcaatgttcgtaagtcgtatgggtctcacgaggttatccacgacgtttcgtttgcagttcagcagggcgaagttgtctgcatcatcggcccgtcgggttccggtaagtctacgctcttgcgctgcattaacggcctggaaaattaccaaggaggcgagattaccgttctgggggagcgcgtcgacgccagtaagcgcggtatccgcgacattcggacccgcgttgccatggtctttcaacgcttcaatctcttccctcatcggactgcacttgagaacgtcgccgaagggccaatccacgttaaaaatgagagcagcgcagaagtcatcgcccgctctcgcgaacttctcgcgcgggtagggttggccgcaaagatcgatgcctatccgggacagctttcgggtgggcagcagcagagggttgcgatcgctcgggcgctaggaatgaagccaaacgccatcctgttcgatgagccgacctcggctctcgatccagagcttgtgggcgaggtgctttcggtgatgcgctcgctcgccgacgaaggaatgaccatggtcgtggtcacacacgagatgggcttcgcgcgccaagtggcagatcgcgttctattccttgacggcggcgttcttgtcgaacagggaaagccggatgaagtgctcgttcgtccgaaaaacttgcgaacgcaggacttcctgagacgcgtgctaacgccgagtgatcctcttagcccgatagagtgtagccttcgtctctagatgcggatcttcagcctaggatatcagatgatggggcggtccgcctattggatcactctcttcgctatggcggtatccaaaccctctcataaggtggcattccacccgcgcaacccgatcaggcgcagcaatggatgcggtcgtgggaactcatctccagcatcaagccagaaggccgctgattggctttggagatcggcaggcccttgttgatccgacgcgttcgaattcaacactatttcaccaagaccagatgcttcaagccaatggagtcagagacgatgccagttcaattggatcaagttgagaacagcggtgattttccgcgtaaagtagacgtggtggtcatcggcgggggcatcattggaacgtgtgccgcttacgaactcgctcgaaagggagtttccgtcgcacttgtcgaaaagggggtcgtcggcggagagcaatcgagccgcaattggggctatgtgaggcaacagaaccgagacctgttcgaattgcctctcgctatgttttcaaacaggcgatgggaagaactaggttccgaaatcggagcggacctcgggttcagacgcacgggcatgatttattccacgcttgacgtgcaggacgttgcccgttggcaaaagtgggggcaattggcgagcgaacagggctttcgtagcgaaattctcaacgctgatcaaaccaaggcgcgcctgcctggcagctcgtcgaagtgggtcggtggcgtgtactcgcccacagaagggcgagccgagccgagcttggccgcgccggcaattgctgaaggagcaaaaaggaatggtctttctttgcatcaaaactgtgcggcgcgaggcctcgatatttccgggggacaagtcagcggtgtttggacggaacgcgggctgatcaaagcaacgacagttgttgcagcgggcggcgcctggaattcccgcttctgtcgacaccacggaatagaactgcctatcctaaatattcacggcacggcgatgcgaaccgagcccgtcccggatgtcctgaccgtcggaaattttaacgcaggacatttggcgctgcggcgcagaatggacggaggctacacacttaccgttccgggtcatggcactctaaacctcgcgccgaacggaatgcgctacatcacgaaattctatcagatgtatcgggcgaaggtggcaaagaaattgaaataccgtatcaatagcagcttttggaacggacctgaggcgttcggaagttggcagaacgatcaggtttctcccttcgaaaagatacgtgttctggatccgccggccgacgatggcttggtgaagatcgcactggaaaatcttgcacgcgaatttcccgttttgaaaaacgcaaagcttgcggcgacgtggggagggatgattgatactgcgccggacctcatacctgtcatttcgcgtgtggaccaattgccgggcctaattatcgcttcaggctttagcggacatggtttcggggtagccccgggcgcgggtcggctagtcagtgacctatgctgcaatgatactccgattgttgacctggctccttacagactttgccggtttagcgacggctctgagatacggcggcccgaaatgatgtgacgcgactgcttcagttcggtgccatccgacttagcacagccgggctgaagatcaccgggcctcatatgtcggcgcttcggttggtcgtcgacaaaacttccaagggcggcgatctgcccaccgcgcgcttcgctggcgcggacgaggaagtgaatggacgttgttgtgctcgggtgcagtttactgggaacagccgcaaccgattttctcgctcatggggattacgcgtgatcttggtcgcgcccatcacccaattgggctcactctatggggattttcgaagccgatgcggcgagcggcataagtgacacttatgcctttgccgggtctagctcttggacactctcgccgggccatgcaagaccacgtcatcagcacgaatgccccggaagcgacatgaccgatgcaacgacaaactcggcagcaaatgaaggcgccgactggaaaataggcgtcgatatcggaggtaccttcatcgacttctgcgcgctcgaaactcgctcagggcggatagtttccctcaaggttttgacgacccccgatgaccctggcgccgagttaatgacgggcttgtcgttgcttcaggaacgcgagggattgaatccccgtgcgatctcccgtttcgtccacggtacgacggtcggcatcaacacgatcatacagcgcaagggtgcatcgctcgcgctcttcaccaatgccggcttcgaagacgtaatcgaactggcgcggctgcgtatgccagaagcctattccctcttttgcgcgcgcgccgatcaactcgtctcgcgtgacatggtcttcggcatctcagcgaggctaaaatcggatggcaccgaggccattgagccagatttggaagcggtcgcccaagccgtgactgcggccaagaaggacggcgctgctggcataatcgtttcgttcttacatgcatggcgcaacgatatgcatgagatcgcgatcaaggctgaaattagccggttggcgcctgaattgttcgtctttacctctgctgaagtctggccggtgattcgtgagtatgagcgaacgatgacggcgatcctcaatggctacgttcacccgcgcgtcgccggctatctttcggtgctggaggagcggcttgcctcgtgtcaggttccagcgcgaccgctgcttacgaagtcgaacggcggcgtcatgaatgccgtcgaaggcaagcgatcctgtgtcagcatgcttttatctggctctgcctcgggcgtgatcggtgcggcgtggttggctcgccaagctggcgaaaaacggatactcacgctcgatatcggcggtacttccgcggattttgcgttgatcatcgacggtgaagcccagttcggagtgggcgaaatgatcggcgagtttcctctgcacattccgtccgtgtccgtaagttcgattggaatcggcggaggctcggtcgcaagcgtcgatgcgcaaggcgcgttgcgcgtcggtcccgagtcggccggctcgatgccggggcctgcttgttatggtcgtggcggcgaaaaggcaacgattaccgacgcgatggccgtctgcggttggcttggtcacagccaaatggcctatggccaattgcagattgatatatcgcttgcccgcaccgcggtaggtcgcgtggctcggcagttgggccgatccgtcgaaacaacggcccaggctattgtcgacgtcgcggtctctgagatgttcgtcgaagttgaaaagatggcgtctcgcgcaggtgtcgatttgcaggagttcaccctgatgccgttcggtggaggcggtccgatgctaggcgcattccttgcacgagaactgcgggtgaagcgcgtgctggcgccccgccggcccggcgttgtctctgcgcttggcggcctagtcgctgatctgcgcggagatttcatccgcacgatctttacggaactaaaagccgataccttggccgtattgcgcgatgcgttctcagcaatggtttccgaagggcgggaatggcttgtcgcgcagggatatcaggggccgatcgacctacgcttcttcgccgatatgcgctctgtcggacaaagttatgagatcgaagtgtcgctccaacctgattggttgagttcgggtagactcgacgcgatatcgcgggagtttcacgatacgcatgcccgtctgtacgatttctacgacaatgatggacgtatcgaaatcgtcaatctgcgtctttcggcaatcggggcggaggctgctctggccagtttcccggagtatgaagtcgacaagatccctcgtcctgaacgcgagatcgaggtttatctcggcgtgaccaggacgccggtcggcctctatcgacggggcgacttaaatgcgggagggcattttcatggtccggccatcgtagctcaggaagacacgacgttcgtcattccggccggcgcgagcgtgcgcgtcgatcgtcacct

SEQ ID NO: 131 - DNA, 2104 bp, Bradyrhizobium colbertium
ttgcgaatgggacgtagacgtcgcttacgaatgtcctgaaccataatcatggagcgcaaggcggtcattgacgaatagtctgtctggccagaggcgggccatctgagatacccacggcgcgcaatatatgatgcctgatcgaacccgcccgcggtgttccaagtctcgttcgaatattcgacgtagagtttgcagcgactgtccagccctgcatatccgttcgcgccgttgagagcgacatcgaccattccaatcgcgaagtttgacgccgcactatagtccgggtccatcgacaacagcgccatatgcggcaccgtcacccacatatcgatcggcccgacctccccgccatcagaacgtgtcatagccatgagttcgttcacaagagccgtgcacacctcgatgggcgttccgccggagtgccccttgtcgggagctgggccgctaccatcaaaaatccagacgccatagctccaattcccggaggtgtcggctttggcggccagcgtcttatcaaaatagaacgtcttgtagtcgcctgctgcgatgtaggtgtttccaaaattcgacgcaggagtgaggccagttccgaacacaacggggtaatctacgcggtcattcccacttccgacctggagcgtaatgtactggtttgcagtgcctgacgtgaacgtgccgaaagacgttgtatcaatcccgatcgagtaggtgtctgcgtccgtgacagtgatcgtacacggaacaaaatgcaattgagtcataccagacgagatattgtgaacaatcttgtcgccggtctggaacccgtgagccgttgccgtcaccacgccgggattggctttcgtgatcgccgacaccgtcttgactccgccgcgcaccatcgcatttccgatgcggcaggtcgcgatctcgccatgctgcattgatgccggcgttccggttacagccgcaagagaatattgattagttccagttgtctcttcatacgcaagcgacgcgacccaattgtagttcgaggccgtccactgcgcgtaattcggcttcgtccggttctcgaacctcatgttcttggcagcattggcgccagtccaattcatgaaccgtatggccgatggatttagatccgcaagggattgcttgtaagcagtcctaaacaccttgccggcagctaggtcggccccatcttcagtcctgtaaaaccgaacgtttctgatataggctccggttccggacgggtcgttacggtcgatgtttacgccaagcgtttgccgagaacctgaataggtaagctgcatcgtccagcccgacccgctatcaacgacatcgtatttcccattggaaacctgagtaacgccgctcgacgactcaagcgtccatgtcccattggcaagcgcaattcgtccagagccctgtccatcaagcgtgtacggacccgaaaagttggcgctgctagggacggtgataccgccagcactgcgcgtctttgtcgttgttgaatccgttgaccacccatcggcgtcgatcaccgtcatccatgttgcgccggatttccatgtcgcggatgtatttggccccccgaattgcgtgcctcccttgatatgatcgataaaagcatactctttcgtactcgtcccgagatctgtattgatgagggagcgcttgaccattctctatctcgccgaggtaaacaactgctcgacttccatatagtcgaggtatccgcctgatgttgctgtggtgccagcggatttgagagccattgccccgtaacccgtctctcgcccagcccctgtcggaatgttagtcgtgatagtggcaacgacgctgctatcgatggagaacgacacgctcgttccatcagcattcacgtcgatctcgaagagatgccaagtgtcggcaacaggcgtaattccggtgtccgccgtcgtctcggttccattgctgcggcagacagcctgccattttccagcattgacgccatccgtatagcggaagaagacgccgtctgtgctttctcccgcattgttgtcgatgaacccgaggcgcgtcgtataggtatccgtgccgttcgacagtaaccggtatgagctcccacgtccggggt

SEQ ID NO: 132 - DNA, 7367 bp, Bradyrhizobium colbertium
acccgggggattttgaccgacccacggggactgcgaagtcgaacggctccgtccggtccccttcgacgtaggctcgcaactagaaggctcgaggactcctggcggctcggcagactttcgcgaccagcattgcctgttcgacgctcacggattggctcacgcaggccgatacagaatgattggaacgccaggagcaagttggttcaggaagtcgaagtcgccaacattccctgtcaatatgctggcaccgataccccgcgcctggagatagatgagcgcatcgttgaggtattttccgctcatgccccgcatccttcggtgccccgctgagacgaaatagctcgcccgcaagtattcccgcttcgccccacatcgccgtatctggagcctgcaagcgatgctgcggaatgtcatcaatcacatcccgtaccgtttgcagaaccccacttgttgaggggtgggccggatcgagccgcccgaacacatgcgttagttcggctaggcagacggccgagtggtggcagacgcgaaatgtcagcaattcatcgacggcgaccggcgtgcgtgcctgcaagacgtcgaggtaaccgctggtatcgagaattcgcgcgccgccgatgagtggctcgtcaactgcccaagcaagctcggaatctgctcgtcgcgtcaacagcggcttcagactccgcaacgttcccgggagatcaaatggcaagatcgatatctgccgggaggcttcccttgctcctgactaaacgcgcgccgaaatcgtcctcgagcgccagacgcgacaacgcgagctctagaagttcggtatcggaagatacgtgagcccgcttctttgcagcttctatcaggcctgccggtacgcggccggacaagcgcgtgttctttttctcgccgagcagcccgagcgcacgggcctgttcgagcacgagccggttgcgcttaagcgcaatgtgctcctcggtttctgtcgacgggcggttccgcataaccatagcaatctccagccttgaacaaatatgcaattgttcaacgcctgtgcaagaccggaaatgagggcttcgccccctcaaagtgatggcatcagcatagaatacctgtcggcagtaggagctaaagttctcctgagccattgaccggaatgcgctgcttattgctatagctccggccagtccgccaactatttgaagttgagccccaagcacgcttttatcagcgtgctccattggccggtgaaaaaacctattgcaaggagagcaataccgccaagtgcgactgttaggcttgttactagtccttcagcctggacccctgacttgctcaccgagatcttttcccgttgcgccatgtcgcagctcctgtgaagccccgagcatgactgggagagattcgcaaggaaggggcaagtcgctacgactgcctagagaagcgcctgcctgcccggttaggtcagctttttagaacgcttgaactcgtctctcaacaggccgagaattcgcgcaagcgcattctgtttggtatgaacaatcttggtcagcgtaaagtcgcttactggggcatcgacactccgatcgccgattatgatgtgtccggtgtgccagcgatctctacggagcaaacgaaacgcgcagcatcgatgcgtacgcgcttaaatgcgttcgcgccggaagagatcgatctgctcttgacggtagggtacgccggcgccacggcttcgttgtctgcgcgaggactgatcgcaaatcagcggcaagcgacattcgatgctcttcccctgcgcagtagcggctaggtagctcgatccaactatgagtttgcgacccttgcgactaagtcgccatctcaaactgcgtcggggtttcccatgctgtgatgtgacttccgaatttgacgcggatgcgcggtgctgggcccatcatgatgggataatcctcgatctcacagacggtgccgatgtcgcctgcactaatctccggcctctgttgtccgcggatcagtcggacttggtctccaactgagaaggggcagtcgttgcgctcgctgacaatgaaaaagcccgcagcgatctcggcgctaacatctaatgcgtcatgatccccatcgccggcgcggagcttaaggtatgtcctagtgctaccgtcgtcgagccgaacgcgaaagccattatagtcgataggttccaccaccgcgccggtaatcgccgtgaacctccgacgtccaataagatgaagcctcgttctgccgattgtctttccaacgacattcgggtcgaactctatcggcggcagatcgttgcgagttaacagcacacgaccctcgggatcgaagtcagatttatccactttgtcggctgccgttatcaggattcgcgccacgtcccggtcaaaggctgcgatcggcgcgatgttggacagcgcaatgcctgccaacgcctgatagcttacaaatccggtaaagcgttgctgtttgtagtcgaatgcaaaagcgacccattcgcgatgctcaacgtcatcgcgtcgaaaaagacgaggtattgctcctctctttcgtacaccttcgccgccgccattctgcggtatgaaaatgatgccagccgagttcaaggctgcttcgatcgcatcgattgttcgcacctgctgattgcgttgatcgcgctcaaagtcggcaatcgtctttttcgacactttcgcggctgtctctagttcttcttgagaccaaccgaggagggctcgcgccgcccggcattgcgaaggagtaatcattattgctccaaaaaggtaacttatgactatataatattactctaaaagagtgattgcaagaggcgggcactaacgtttttgcggtcctttggacccttgcgtgaactgatcggctttgaacaagactttggttctagtcggtacaaccaatgattgccgggcgcctcttgggcttctagtttcgtcgcgaagggggcaccgggcggcggaccaatgtatcgggtccgatcaagaacatcgtccccatcgaggggactatgtgggccgacgcagacgccaaagttgactacttgaacttttctgaggttgctgaactcgccgccgagatggtgggaacagagcgcttgcttcctctctccctcggaatttttggcacttgggggacgggaaaatccactgtgctcaacctcatgaggggagagctatcccagcacaagcacaaattcctcttcgtagagtttgatgcctggttacaccaagactacgacgacgctcgagccgcgctcatgtcagtgatcgcaaaagcgttgctcgatgaagctcctgagggcttacgtgaaaaggcattgagcctactcaagcggaccaacaaactccgagttctcgggtacgctgctgaaggtgcagccgctttttggggtgtcccgaccttcggtttgatccggaagggagtcgagggactcggagacattctgtccggtgatgccaacgaagatgacgtcaaagctatcgaagaaggcgctaaagacgcaaagaccaagtcagaaggcttgatcgctccggagcccaagaaaagtccacccgaagagatcgtagcctttaggcaggaattcagcgaggtcctgtcgggtctcggcaagaccctagtcgtcttgatcgacaatatcgatcgctgcacgcctccgaataccattcacacgctagaggccatacgtctcttccttttcttgccgcgcaccgccttcgttatcgcggcagatgaggacatggtccgtcatgccgttgccacgcatttcaggaacccctcgcttcgtctggttgaggactacctcgataagttgatccaggtgccgatcagggtcccgaagctcggcgtccaagacgtgagagcctacatgctgctgctgttcgctgaggcttccggagcgaatggggacagtctggagcagctccgagcttttctcgttgatcagctgcgacaagcctggaagccagatgccaagtttggtgtcgatgaagtgctctccatcctcaagccggacgatccaaggacgctccgctcgacgctcgatctcgccgaccgaatggctcctcttctcgcgtattccgctaacgtcaacggcaatcctcgtattattaaacggatgctgaacgttgttcgcatgcgggcgtccgttgctcggaagcgaaagatggagctcgatgaatccgtcatcgctaagttggcactctttgagcgatgcaccgatgcaaaggctgttgacgctttgcacaccgcaatcaacgcctccgcaggaaaacctcactttcttgccactcttgaatccgggggcaccgatggcgatcaggcgatcgaaggatgccctccggaaatcttgaagcacgttgactttgtccgtgattgggccgcgcttgagccgaagctgagcgaagtagatttgaggcctgctgtttatctggcacgcgaaactgtcccgctccgggctacagcaacgaaattgtcagaggccgcgataaaagcggtcgatgtgttgcgacaagttcgaactgaagcatctccgaccgcgaaagctgccatcgagtcgatcacgacggaacagccggccgttatggaagagctaatcaggcgaatgaggttgaatccggagtggtcgcgctcccgggacgacttccgcggcgctgtgctgctggcgagagcgaacgaggatgcgggcaagatgctcgcgtcgtttgtgaattcgcttggcgagaaggcaccacgatggatgacgatgatgatgagcggcaaagcgaaagaggtgtgacgtggggacctcttcgtctagtgcgggagctggcgggaagtcaccactcattccagccggtacggatgccacgcctggcgcgccaataccaacgccagcgactaatcggtttcagccctttcggatcgcgtttggccaccatgccagaggaatcggaaaaggctcgtttctaaaatctgcactaggccgctacgctaggacagcaactggcggcgctcgggttggtccgagacgcttcggtccagcttactcgtccggcggtagtctgtttgcgctcctcggtgagatgcagggcgggggaactggctccgtctcagttggagtggacctctccggccttgtcggacgttctttaacgatcgcagttcaggaaattgcacgggctctggcgccggcggggatcgatgcagaccgggttgcggttgcgatcaatgaggcgatgaccgaagttctagtggacgaagagatcttcgacccgagtaccttatccgcggatcaaatcgtagaagtcattgtcgattacctcgcacgaattctctttcaccaagtgacggaagatgccgggtcggcttggaataggtctccatccgaagctcggaccattgaagcagagaatgaactcttcgatctgatcaaaatcgcaatggatcggcaattgggtccaaaactggcaaacggcgtcggaaggatctcgaagctagacgtcgagcccgcgcagctcaatgctatgcaggaagtctggcgagaatgggagactttcgaatgacgaaggtgatctgccatgccgacgcagcgggtctaccggttactcgcaaagcttcagacgttcacgtcatcctgtacgggaaaggagctatgccgcccaaggtcgctcgtatcggctccatgttgctcgatccggttagtcgactgaaactcggtatcaggagcgacgcgtttgacttcctgaccatcgggctcgcggtaaccgccgctgacacgttcgtactccgaagcgatgccgatgatagatggtgccgacgcctagagctgacggttcccctgatcgatcccaggccatggaacgccgtacgctcaatgctcgagagtgctctcaatttcttgagcggagaccactggacgctacggttcaaacgcggtggccctcgtccgcccagcaaggctgttcgagatcgtcgaaggatctttatcgacctttcgaaagcagaatgcgcctgcctcttttctggcggcctcgacagctacgttggagttctcgacctgctctccgaaggccgtcgcccaattcttgttagccatgcctataggggtgaccggaaataccaagccaacgtcgcaaccttcctcccgactttgtgtcctcggttcgcggcgaacgcgcatccgacttggaccggtgcaaccgagatcagcatgcgtagcagaagcctcaattttctgacctttggagtgttgacagctacggccattgcagaatttagaggactctcgcgtgtagacctcattgttcctgaaaatggacacatcgcactaaatccccctctgacaccacgtcgcattgggtcgcatagtacgagaactacccacccgttcttcctgaatgcgatccagcacattttggaaggggtcggtcttcccgtcgtcatcagcaatccgctgcggcatcagacgaagggagaaataatggcacggcatgcaacaacgacggctgacttcgagctggccgccgccggcacggtctcgtgcggaaaatggaagcggaagaacaagcagtgtggtcactgcgtaccgtgcctaatccgtcgggctgcctttcacgccgccgctatcgctgatgacacggaatatcgcgagccaaatctcttaaagatcgcaaacgatccgcagattcgtgacgaccttatctctgtcttgacggcagtctctcgttcgcgcaccttccggatagaaccttgggtaatgcaagcaggaccactgcctgaagacgagcaagaacgttccgcgtgcgtcgacgtattcaagcgtggtatcagcgagcttggcaactttctgcgggcgagtggcttcccttgatcgattttcattgtcacctcgacctctatcctgacccagtcgcggtcactcgggaggcctcgctgtgccgcgcatacgtcttatccgtcacgacaactccaaaagcctggcgaaacacgttgcgtctggctaagggagcttcccgaattcgtacagcgctcggactccatccgcaggtcgctcacgaacggcatcgcgagttggcgcttttcgaggcccttttgccggaaacggattacgtcggcgaagtaggtctagacggaagtgctgaattcaaaatgcattctgccgtgcagaagcgtgtttttgaaagcgtgctctctatgtcagcccgggctggcggaagagtgctatcgctccacagccgagcagcagtcgagcctcttcttgagagccttgcacggaagcccgatgctgggatccctgtccttcattggtttaccggttccgcctctcagatgcggcgcgcggcagatcaggggtgctgtttttctggcggatt

SEQ ID NO: 133 - DNA, 19694 bp, Bradyrhizobium colbertium
atggcgaccccgagcccaacggcgacgccaacccctgggcagcagggtggcacgccgcctgccggcgcgcccgcagccgcaaccccgaccaggccgccggcacctcccgccggcgctgcagcgccgaccgtggtgcccggcacgccagccgcagcgccgccgcccgacagagcgcaatacgcgccgcccacggtgaagccagccttccgcgccgcgccgacgatctcggccccgttgccgccgccgccgcgcccgccgcagcgtgacctgaccccgctcgcggtcggtgcaggcgtggtagccggcgccgtcatcggcgcgaccattgccgacctccacaaccagcgacgcgagaccgtcgaaggcggccgcaccatctacacagagccggaccgcatcatcatccgcgacccgggcgggcaggcctatgtccgcggcaacgatctctatcgcttccgctatggtgcccgcgacatccgcaccgacaccgtcggcggcgagacccgcacggtcgtgattcgtcctgacggcagcgagatcatcaccgtagtcggcgccgatggccggctgctgcggcgtatccgcagggacccccgcgggcgcgagatcgtcatcatcgacaacagctaccgcgatccgcgtgccgtcggcggcttctatgtggacctgccgccgccggtcgtgaacatgccctatgatcgctacatcgtcagcgctgaggacgcatcgccagacgtgatctacgcgaccatgcaggcaccgccggtgcagcggatcgatcggcgctactcgctcgacgagatccgctacagccccaatgttcgcatgcagatgcccagcatcgacgtcaacacgatcaacttcgagacgggatcgtccacgatcccgccggaccaggcggcccggctgcaggtgatcgcggacggcctcaaccaggcgatccagcgcaatccgcgcgaggtgttcctgatcgagggtcacaccgatgcggtcggcaacgaggtcgacaacctgtcattgtcggaccgccgcgcgcagtccgcagccgaattgctgacgcagcagttcggcgtgcctgccgagaacctgacgtcgcagggctatggcgagcagtatctgaaggaacagacgcaagggccgagcctgatcaaccggcgcgtcacggtccgccgcatcacgccgctgctcaacggcggcacggcctcgctgccgccgcccccgcccggcacggcgccgccgcgctgagggagaccacaaacgcaaatggccgggagcgatcccggccatttctcttgcatcacaccgtcaacgcgtctgacggcaggcaggcctcgcaaacggcggcgacatgccggtgatcagtgccgcaacagccgccgagaatccgcatgcccgggaatgcgcgcctgagcgaaaggtaacggcggccgagatctgcgggatcgccactgtcgagggtctccgattcgtcgagttcggcatggctcttgaccgatgcattggctctgatgccgtggatgcgctggacccacgtctcgccggtcgcgattgcactctcgaagtgagttggatgcgcacaattgatcaggaagtattcgcaggcacgctccgttgcgtcgtcgaccgcttcgatcgcctcgcgcagtgtctctcccctgacgaggcgaccatcggtctcgaccgtgaaagaaatcgcgaccggaatatcctgcctcttggctgcgcggaccacaccgacggcttcgttgatgctgttcagcgtgaacgcagtcaccatatcggcgcccgcctcgctgaaggccgcgatctggcccgagtggtaggcttccgcctccgccgcgtccatgttgccggccttgtagccgtcgcctcgcggaccgatcgcgccgttgatgacacaaggcatgcggggggactcccaggcgccgcgcaactcgtcgaggaagcggatggcgcgcatgttgatggcctcgagcccggccgcatcatagccgagcctggcgccccaatcagggttggcgcgccaggtcggactgtcgaggacgaagccgagcccgtgctgccgggcgatccgcagatatgcttcgtagtactgcctcaaatgggcgcggccatccgcgctgtcgagcagcacgaatgccgcgaagtggggcagttccagcccgtggtggaagatgagggttgtctccatgccgccgtcggtcaggaaaatgccgccgccgtgctgcggcagaccatgtctgtatctggccattgatcgctccatcatttggacggactcgctctcttcattcggtcgcgccatgtccgtctttggtctcggcatgtggtgccgcataatgtcgcgtcgctctagaagcctcgcggtgcggctgaacttcccctcgcaagcggagacaaatcaaatacttgcatgagacgctcggagcagtgcttggccccgagcgccagattccgcaccgtcggtacagttttggagacatcgatgggaaagggcgaagcgacgcgcgagcgcattcttgagatcgcggaagcggcggtgctcgcaaagggcttcggcgcgacctcgatcgacgaggtcattgcagaggccggcctgaccaagagcggcttcttctatcacttcagggacaagaacgcgctcgcacgggagatgctgcgtcgctacgtggagacgaatgatcgcctgttcgacgagatcttcaggcggggacgcgagctctccgacgacccgctgcaatcgttcctgatctcgctgaaactgctcgccgaaatcatggccgatctgccgaacggccaccccggctgcctaatcgccagcatctgctatcaggagcgcttgttcgaccgcgaggttcgcgatctgaccgcgcaatccgtccggagctggaatgcgcatttccgcgagattctcgacggcatcgctgccgtccatcggccccgcgagccgatcgacctcgacgatctcgccgagatgatctcgtgcgtggtcgacggcgcgatcatcatgtcgaagacgctcaacgacccgaagcggctggagcggcagatcctgctcttccgcagctgtgtgaagctgatcttcgcgccgcctctctcatcgtgaaacgcatgtgacgtgagcgagccggggctgccctgctgagcccgtttgcggaggcgtgcgactttgcgattcgcagtcgatcctccgcttcattgccccgctgccaatcccaacgcgtcggccatgacccggaacacttccgtattgtccatcgacccgtgcacgcgctcgctgcccggtccagtcgcggtcaggatgacatcctcgcccgaatgcacgctggcgccgatcagcgcggaaagattgccggggcgcagcaccgcgcccggaacgtccttgtatttgtcgttggccttgaaggttccgtcgtcgcccgccttgatggtcggctggttggggccgtccagcttcggacggaacgtctcgtagtgatcaggcaggctggccgagaagatcgcgagccgccgactcacgtcgatgcgcgccggataaccttccgcatccggcgccggatagttgggaaatccggccttgtcgtagaccgcaacgcgctcgcgcaagggaacattgggcacggtgcccatgtcgtcattcaccgtcccgacaaggctgttgggatgattgtggtcggcgaccaccatgatgagagtgtcgtcgccgcgtgcgcgcgcccattcgcgcgtctggcgcaccgcgttgtcgagcatgatcgtgtcgtagacggcgcgctccatgtcgagcagatgcgcatatttgtcgatcattccggattccaccatcaggaagaaaccgttctcgttcttcgaaaggatgttgagtgccgcctggacctgctcggtgagatcaggctgctcggggaatttcctgacgccgccgcccttcaggaatttgcggtcgagcacaccgtccatattgccggtcgcgaacaggccgagcagcttggtggtctcctgtcttgcggcggacgcgccgagttcgctcgcggtggtcgccacctgatagccggcatcgcgaaacttcgcgatgtagtcggtctcgtccttgcgtttcgagccggcgaccgacttcggcagaaagttcgcgctgccgccgcccatcagcacatccggcttcgcgtcgaagaactgctcgacaatgtcgtcataggcggcgcgccggcgggtgtgcgctaccatagccgccggcgttgcgtcttcgatttcggtattggtaacgatgccgatcgccatgccgagccgcctcttggcgaggctggcgatggtttcgacacggggatcgtcgagcgggcttgcagtgcggtccgcatagacgccgagggcgttgacggcgctcttgtgcccggtcgcataggcgctggccgagttcgcggaatcggtgatgatcgaatccgagcctgcggttgccaccagggccatatggggcatgtcgtcgatggcgagcttgccccggctcttgccctccgagattcccttggagaggattcgcgctgcgacccggtgcgcgggcgacatgccgtcaccgatgaacaggatgacattcttcgccttgcgcgggccggtgtcgtagaccgtccatgtgacgctgcgctggcgcgtgccgtcgctgatgtcgacgacaacgttgccgggcctggccagcgtgacgtcgcgcaggatcagggccgactggtccttgccatcctcgcgctcgatgaaagtcccggcacggccgaaggccgtcgcataatccgcgccgttcatcgtcaccttcaacttggtcgcatcgaccgggccgggaagctcgaccttgaagtcgaatttggctccggccaggatctcggcacgatcgatcgggtagacggtctgcgccgacagcgacgaggtccagccgaggacgatgagggaggcgagtgccgatgtcttgatcatgcgcgatgctccgaaacccattccgacagaaacaggagcgtagcgatcgagaatgacaccgtcattaagctatcatcgcgtggcccggacgtctcagcctctatcgctctccagccggaagatctgcgagccttcgctgcccgagagcaggccggtctcgctgtagagcttcagcttggtgcgggtgtcggcgatgtcgaggttgcgcatggtgagctggccgatgcggtcggccggcgtgaaggcggcgtcctccaccttctccatgctgagccgctccggcgcgtaggtcaggttcgggctctcggtgttgaggatcgaataatcgttgccgcggcgcagctccagcgtgacctcgccggtgacggcgcgcgcgacccagcgctgcgcagtctcgcgcagcatgagagcctgcgagtcgaaccagcggccctgatagagcaggcggcccaagcgcatgccgctgatgcggtactgctcgatggtatcctcgttgtggatgccggtgaggaggcgctcataggcgacgtggagcagcgccatgccgggcgcctcgtagatgccgcggctcttggcttcgatgatgcggttctcgatctggtcgctcatgccgaggccgtggcggccgccgatggcgttggcttcgagaaacagcgccacgggatcggtgaaggtctggccgttcagcgcggtcggctggccttcctcgaagcgcaccacgaccttctccgccttgacgttgcagtcgtcgcgccagaacggcacgcccatgatcggattgacgatcttgatgccgctgtcgaggctttcgagatccttggcctcgtgcgtggcgccgagcaggttgctgtcggtcgaatacgccttctcggcgctcatcttgtaggcgaaaccttgcgccgtcatgaacgccgacatctcggcgcggccgccgagctcgtcgatgaactgctggtcgagccagggcttgtagatcttcaggccgggattggtgagcaggccatagcggtagaagcgctcgatgtcgttgcccttgaacgtcgagccatccccccagatgttgacgccgtcttccttcatcgccgcgaccagcatcgtgccggtgacggcgcggccgagtggcgtggtattgaaataggtgatgccgccggtcgagatgtgaaaggcgccggactggatcgcggcgatgccttcatggacgagctgagtgcggcaatcgaccagccgcgccttctcggcgccgaattccatcgccttgcgcgggatctcgttgtagtcggcctcatcaggctggccgagattggcggtgtaggcgtagcagcgcgcgcccttctgcttcatccagagcagcgccgcagaagtgtcgaggccgcccgaaaacgcgatgccgactttctcgcccttgggcaggcttttcaggatcgtggtcatggggcttccaatcgggtctcaagggctgatgaaggtgcgaaacttggccgcgcgaatatcaaatttcgcacgcctcggcatccctttaatggctcaaaccgagggctcgggaccggtcttgcggccgaacaggcgctggcggagccggtagccgggccagctcagccgggtcaaggcggcgtcgaccgcctcgtccgagaacctcgtccgcggccagcggtaaatcagcgcgtaggcgaaccagatcacgacgaaggtgacgaggccggcgatggaaacgtcggtgaagaagtggccaccgaaggccatgcgaagcccgctcgtcaaggccccgaacaccactgcggcggcataggcgatcgggcgccacggcggcggcgccagcgcagccggcgcgagcgtccaaaatgccgtcgccccctcgccggagaagaacgagcagttgcgtccgcagccgccgcggggatcccaccacggcacgaattgctgatcgccggcaaactcggtcaccaccaccggacgcggacggccccagtaagtcttgaacgtcaggttggtcaggatgccggccgacatggtcatcgtcaccagcaggaagacgaccgtacggccccgcaccatcatcggccggtcgggccggatcatcttgaccacgagcgcgacgatcgagggcaaggcgaatgcccaggcgatccacatcgccgcatcgcgcgcgaagccggcccagccgttcagcttgagcgggaacgtcctggttgcggggtcgaagaaaagcgccgcgagcttgagatcgagttcgggatagaggccgaaaacgacgccgatcacgagccacagcgctagggcgatgaagagtccggtccggttcatggcgcgcggtttagcggagtggggaggcgatgaaaaccccggacgcggcgcaacttatcgcgcatccggcctcgagttcgacggcaagggcggcggcggcttccgcgggggtggcgggttgcgccaggcgccggcgttgcggccggcgatcaaccagtagaccacgccggcgacgatgccggctccggtcatgatctccagatgccgccgcacgatgccctcgaactggaacgtgtcggcatggaaggggacgagaccgagatagcaggcgagcccgacgaggccgccaccgagggcataggcgagcgcgctgcggatgtagagcgcttcggtgatcgcgacgatcaccgccgccggcaccagcgcaaagccggagacgaagatgaaaccgaaaccgagcaggacatcgatcgtgccctggtcgacgggacctgcgcccagatcggcgaattccggaaacagcagcgcgacgacgatgatcatgccgccgacgaagcaggcggcgaggaagccgatgaagatgacgacgagacggccgatcagggacatggcgcaagcgaattggtgaccggcagtgtcaccaggcccccggtcgtcatgcccgggcttgacccgggcatccacgacttttccaatcgcggcccgacgtggatggccgggtcaagcccggccatgacgaacgttgatggcattgccatcatcaatccgtcatcgccatggcgcgcagcgcctggcgctcgcgcgcgctgagcttctcggtctccgacttgagctggccgcaggcggcgaggatgtcgcggccgcgcggggtgcgcaccggcgaggaatagccggcgttgaagatgtattcggagaacttctcgatctggtcccagtcggagcattcataggcggtgccgggccaggggttgaacgggatcaggtttatcttggccggaatgcccttgagcatcctcaccagcagcttggcatcgtcgagcgaatcgttgacgcccttgagcatcacatattcgaaggtgatgcggcgggcgttcgaggcgccgggatagtcgcggcaggcctgcagcaattccttgatcggatatttgcggttgagcggcaccagctcgttgcgcagctcgtcgcgcacggcatgcagcgagatcgccagcatcacgccgatctcctcgccggcacgcacgatgttcggcaccacgcccgaggtcgagagcgtgattcggcggcgggagatgccgatgccctcgttgtccccgacgatgagcagcgcatcgcgcaccgcgtcgaaattgtagagcggctcgcccatgcccatcatcacgatgttggtgacgcggcgcgtgccgtcctcgcgatcggcccagtcgttgaggcgatcgcgcgccaccatcacctgtccgacgatctcgccggcggtgagattgcgcaccaggcgctgcgtgccggtgtggcagaaggaacagttcagcgtgcagccgacctgcgaggagacgcagagcgtgccgcggtcggtctcggggatgtagacgcactcgacctcatgcgccttctgaacggaatcgccgctcggcaagcgcagcagccatttgcgggtgccgtcgttggagatctgctcggccacgacctcgggccgatcgacggtgaaatgctgggcgagatcggcgcggatccccttcgaaatcgaggtcatctcctcaaaactctgggcgccgcggaaatagatccagtgccagagctgctgcacgcgcatcttgcgctgcgccggtgcgacgccgatctcgccgagacgatcggcaagctcggtgcgcgacaggccgatcagcgacggcttggccggcggcacataggtttcgagcggagtcttctccaccaggatagcgttgcgcggctcggtcgaggtttgcatcaaagcgcctaggatcactgctgtctgaactcgtcatgcccggggttgacccgggcatccacgtctttcctttattgcggtaacgcgtggacggcccggtcaagccaagccatgacggcgaaaatctggaaccggccttatatagcaaccgaacccgccgattgcgaccgtgctatcgcccgcagccttaacgccgacagtcctgcgcgatcttgtcgagcgcctgggaaaggcccttcagcgagaaagtgtcggtcgtctccgtgcccttggccgagacgcctttgaccacgagatcggcggatttgcgcatggcttcgaccatccgctcctcctcggccgcgttcttgatccagagaccgtcgccctgcgtgtacatggcataggatgcgccgccgacctcgaccgtcgattcggagcccggcttcagcgcgtagccgatcatgaccgagacttcgttgttcaccttctccgccggccgggtcgagacgaaggcgtaggccggatcgcgcggccgattcggcggattggtcttcgacgacgagggcttggccagcgcgaagcagaccttcttgccgttgggcgtcgccgaataggcgccccaggtgccgaactgcccgatcaaggtcggctcagcaccacccgcaacgcccgcgggtggcccgcccggtttgctctcgggctttgcggccgccttggcggtcgtattggacggcgcagccgacttcggtgccgtctctcttggagcagacttgggcgccgtctgcgcccgcgcggaatcggcgattcccccggccatgacgacagtcatcaaagctaaaatcagcacccgccacatgctggagtggttccctcaatattgtgactggaagatggcccggcagcgctttgtccccgggcagggataaccgggaaagctcaatttgggaaggcagttagcggtaccagcagcagctaggccttggatcgcgcggcgcgttgctcggtccactgcacctcggtccagccgagcaaatcctcggcgccggaactgcgcaaatgcgcgccaccgtcgatcacgaccatctcgccgttgatgtaggcggcgcggtcggagaccaggaagctggcgagatcgccaagctcgctgtgctccccagtgcggcccagcgggttgcgcgccgtccagctgtcgtcgcggccttcgggacggagctgcccggtagcccccgcggtcggaaacggacccggcgcgatcgcaacggtgcggatgcccttcggcccccactccaccgcaaggctcttggtcatcgccagcactgccgacttcgccatggccgacggcacggtgaacgcacggccggtgatggtcgacgtcgagaggatcgacagcacgacaccgccacgcctggcctcgatccagcgcctccccgcagcgagggtgcaatacatcgcgccatgcagcgtcggcgccaggacggcgtccgcggcacggaaggagaggtgctcggtctgcgcaatgaaggtcgcggcagcattgttgacgaggatgtcgagcggcgcctcgcgccagatctgatccatcatgtcgtcgaccgcggcaccatcgcggatatcgcaggcgatcgtcttcaccttgccgccgatctgcgcgcgcatctcgctcgcagtcgcctcgagccggtcgagcttgcggccgcagatcacgagttcggcgcccagcgcgaggaagcgacgacccatcgcggcaccaaggcccgaaccgccgccggtgacgaggatgcgcttgttcttcagcaggcccgtttcaaacatcgtttgaatcccttctccgcggatttcgtcattgctgttgcagccaagcagtccggagtccgcgccgcggaaatagcctggatgcttcgctgcgctcgcaacgacgcgaggataggccggcgcatcgctttggcaaagaaaccggattgtcggggcgcgccaaatccggcagaaacggaccaactataattcactcgaaacgcccaggacttacttctcaagaaggtgccgccatgaaagccatcctctgctcgcaatactgccagcctgacgatctcgtgctgacggaggtgccggatccggtggcaggtccgggcgaagccgtgatcgcgatcaaggccgcggcattgaacttcttcgacctcctgatgatccagggcaaataccagatcaagccgccgttcccgttctcgccggctgcggaagtcgcgggcgtgatcgagagcatcggcgcgggcgtgaccgatctgaaagtcggtgatcgcgtggtcgcatcttgcggccacaacggcgcgcgcgagaagatcgcattgccggcggcatcgatcgtgaagattccggacaatctcgattacgaccgcgcggccggcatcatcatcatctacggcaccgcgctgcatgcgctggaagatcgcgccagccccaagcccggcgagacgctcgcggtgctgggcgccgccggcggcacgggccttgccgcctgcgagctcggcaagctgatgggcctgaaggtgatcgcttgcgcctcctcggacgagaagctcgaattcgcgaaggcgcacggcgccgagctgacgctgaactacgccaaggaagatctgaaggagggcctgcgcaagctcaccggcggcaagggcgtcgacatcatcttcgatccggttggtggtgcctatgccgagcaggcgctgcgctcgatcgcctgggagggccgctttctcgtgatcggcttcgccgcgggcgacattccgaagatgccgctgaacctcgcgctgctgaaaggctgcgacatccgcggcgtgttctggggcgcctggacccggcagaatccggagaagaaccgcgtcaacctggaaaagctcgtgaagtggaccgcggaaggaaagatctcatcgcatgttgaccgcaccttcccgctggtgcagacggccgacgcgctgaaggtgctggcggggcgccaggcgatgggcaaagtgatcctgcatccgtgaactgatgcaggcggttgaagtcgcgcaggctacgcgacttctgctgtgccggccgcctcctccaccccacgcttcagcgcagcgcgcgcagcgtcgcggtgctcgttcgtgatgtggccggcaaccatgcggatggcggccgcgagcacggcagcgtcatccgcgaagccgagcatcggcatcacgtcagcgacgaagtcgaacggcaggacgaagtaggcaatggcgccgagcagggaggcctggacgtgccgcggcgtctgccggtcgaacgcgcagtaataggcggcaagcagatcttccgcgaacggcagttgggcggcgacgcgcttcagcttgcgccagaagcggcggcgcacgctttcgcgatcttccgcgagccgatcggccggctcgaagccgacgctgtgctcggcagccatctcgaaactccccgttcagcccgcggcggcggaccgccgcatcacatccatgatcacaagatggggatgaggccggacgccgcaagacgtcagcccatgtcaggtcgcgatggcgttcatcgccttggccagctcgatgtcgagcgtcgtgacgccgccggcatcatgggtcgacagcaccacctcgacggtcttgtagacgttgcgccattcgggatggtgatccatcttctcggcgaccagcgccgcgcgggtcatgaagccgaaagcctggttgaaatccttgaagacaaaggtcttcccaatggcgtcgcggccttggacgtcggtccagcccgggattccgcccagcgcctgcttgcgcgcgtcagccgtcaaccgctctgccatgattgcctccatcgttcaggggaactttaccctaacaccgtcccgacgcccgggttcatacggaattggccccatccgctaaccatgacggagatgtaaccccgccggacaagaaatttgctacaattgcggtcgtagaccgccggccaagatgaaactgagcctgaagcgcctgtttgggagatcgatgaccgggggactgaacctggccgaagcgccccctccgccttcgccgcgatccgcggtgcggaagactgcgctcgtgtctctggcgctcgtgcttgcgatcatcggcgcccttgccggcgcctattacttcgcaatgcgcccggtgacgctgaagatcgcggtggggcccgccaacagcgacgacgtcaaggtggttcagacgctgacgcaggcctttacgcagagcaagggccaggtgcggctgcgacctttccagaccgacggcgcgaccgccagcgcggacgcgctcaaggaaggcaaggtcgatctcgctatcgtgcgcggcgacgtcgacgttcccaagaacgcgcaagcggtcgcgaccctgcgcaagaacgtcgtggtgctgtggtccgtgcccggcaaaggcaagaagcggggtccgaagatcaccaagatcgcccagctcgccggtcatcgcgtcggcgtggtgggtcgcacccaggccaacgtcaatttgctcagggtgatcctccagcaatacggcgtcgatcccgccaaggtcgagatcgttcaattcccggcgaacgaagcggccgaggcgatcaaggcacaaaaggccgacgtctatctcgccgccggccccgtcaacagcaagattacggcggatgcgatcgccgcctccaccagggatttcggcgcccctaccttcctcgccatcgattcggcagacgcgatcgcgcaaaaccatccggtctacgaagcgtccgagattcccgcaggcgcctatggcggctctcccgctcgcccggacgacgaggtcaagaccatcagcttttcacatcacatcgtggcgcgcagaggcgtgcccgaaagcaccattgcggcattcacgcgccagctcttcgccgtgcgccagcaacttgtgaccgagttcccgctggcggcaaagatcgagacgcccgacaccgacaaggatgcggtgatccccgtgcatcccggcgctgcggccttcgtcgatggcgaggagaagaccttcctcgacaagtacagcgattacatctggtggagcctgatggcgctgtccgccatgggctcgatcggcgcctggttcgccggctatctcaagaaggacgagcgcgacaacagcaaccaccagcgcgaacgtctgctcgacatgatcgctgcggcacgcaaatgcgacacgaccgaagagctcgaccagatgcagaccgaagcggacgacatcctgcgcgatacgctgcgctgcttcgaccacggcgcgatcgaggaagcagcgctcaccgccttcaacatcgcgctcgaccagtttcacgccgccgtcgcggaccgcaagacggtgctgatgagcctgcctcagaacctgcaacgcgcaggcgcgcaattccgggccgccggcaacgcgtgagcgcttgcgcgcgcaattgccgcgtcacattgtctcaatatagcgttcgttaccatccggggcgatgcatcagcatcgaacccggaatctcgatactccccggtgcgcaattgcgcacccaaggtccagcccttcggatcatcccggactgacggcgcaagatgcgcgccggcagcaagcagcgaacccgtccatgaacatcaaattctcgcgccgccgctttctcgccaccagcgccggtgcgctcggcacgattgcaatgccatatctttcgcgcgcagccgatcggccagcggtcactcacggcgtacagtctggtgacgtcacggccgacggcggcatggtgtgggcgcgcaccgatcgacccgcgtagatgctggtcgaggtggcgacgacggatacgttcagggatgcccgtgcgctgccgccgatcgcggcgctgcccgagagcgacttcaccgcaaagatgctggttgaaaatctccccgccggccaggacatcttctaccgcgtccgcttccgggatctctcgcacagcgctgtcgagggcgcgccggtaaccggccgcttccgcaccgcgccggccgaccgccgcgacgtcagcttcgtctggggcggcgacgtcgccggccagggttggggcatcaacccggatgacggcggcatggtcaccttctcgacgatgcgccagcaccggcctgacttcttcctgcattccggcgataccatctatgccgacggtccgatccaatccgaggtgaagcttgccgacggcaagatctggaagaacctgacgatccccgagaaggccaaggtcgccgagacgctcgacgagtttcgcgccgcgcacaaatacaatctcgccgacgacaacctccgcgccttcaatgccgaggtgccgatcttcgtccagtgggacgaccacgaggtcaccaataactggtcgctctcgaaggagctgccggccgcctacaagctgcgcgacatctcgctgctcgccgcgcgcggcgcgcgcgccttccacgagatgtacccgatgcgcgagagcatcactgagcccggccgggtctatcgccagatctcctacggtccgcatctcgacgtgttcatgctggacgagcgcagctatcgcggccctaacggcgccaatctcgaaaccgcttacggtcccgccagcaatttcctcggaccggaccagatcgcctggctcaagcgcgccctcctcaattcgcgcgcgacatggaaggtgatcgcctccgacatgccgatcggcctgatcgttagggacacgccgaagggcggctcggaggccatcgcgcagggcgacggcccggtgcggggccgcgagttcgagatcgccgagatcctgcgtttcatcaaacttgcaccgatcagcaacacggtgtggctgaccgcggacgtgcattatgcggccgcgcatttttacgaccccaaccgggcgcagttccaggatttcgacccgttctgggaattcgtctcaggcccgctacatgccggcacgttcggtccgaacacactcgacaacacctttggcccggaggtgcgcttcgtcaaggcgccgggcaaagacagccagaacctgccgccgtcggccggcatgcagttcttcggacacgtcaagatcgacggcgcctcgggccagatgacggtgaccctgcgcgaccgcgctgacgttgcgctttggtcaaccacgctcgatccgaagcagagctgatcgttagtcggcggcgcctgcctgaatcgccgcttccagcgcctcgctcgaacacggcttctgcaaccgcggccggcccgccagatcgggcggaattcgcgcctcggcaccgtagccggtgacgaaaatgaacggaaccttcaacgtcatcagccgctgggcgaccgcaaagctcgtctcgcggatcagctccacgtcaaggagcgcgaaatccggcgtacgcttcgcgatggcgtccagcgcctgcgtcaccgaaccgacggtccgcacgccgctgaccccgaagccgagaagacggtcctcgaaatcgatggcgatgatcggatcgtcctccacgatcagaacatcggccggcctgcctgagccattggaaggtgcggttgccatgatcgcttcttgtgttgggttctaggatcaggactgccgcgacgcgatgcctgcttacagcgcggagggttcccggaacgaaactcaccacatgattgttctaccgtctgtccacttgtgcacacagtgggcggatggaactcggtatgttgggagggaagcaggggagttcacgatggatgcgcgtaccggcaaggtcaccgaggtcgagagccggccggccaacaatctgctgcggcgcttgagcccggcggactacgccctgctggcgccgcacgtgatagtggaggacgccgcagcgggccagttgatctacaatccgggcgatgacgtccaggtcgtccactttccctgcgggccgtcgctcgcgacgttcctcgtgcccaacgaggacggccgcgacgtcgaaaccattctggtcggccgcgaaggcgcggtaggcgggatcgtcagcgagggattcctgccggcctatacccggatctgcgtaaagttcggcgggccgtttgcccgcattcacgttggcaagctggaagcggccaaggttcgctcgtcctcgctgcgcaacatcttcgcccgctatgccgattgcatgctggcccagatcttccagtcgaccgcctgcaacgcgatccattcgatagagcagcggaccgccaaatggattctggccgcgatggagcggaccggcgacgaaaccagcgtgccgctgacccacgaacagctcgctacgctgctcggcgtcggccgcagctacgccagccgcgtgcttcagtcgttcaaggctgaacgaatcctcgacaccaggcgcggttcgatcctggttcgcaaccgcgacggcctgaagcttcgcgcctgcctctgcaacgaggccgtaaaaatgcacttcgaagaggtgctgcgcggcgtctacccgaccgaggagcgggaggccgggtagcggccggtctgcgcggcgcgctctctcggcgcaactgtgctatgaagcacccgcatgggcggggctttgcttcacattctcttcgacattgccgcgtggctggcggccgcggcggctgtctactggctgacgcgacaaggcttacggtttccggcgcaatccttcgagctgccctacatcgccgcgctggtgttcggcgccggcctcggcgcctatctgttcggctccgccaatctctggttgtccggtcagagcggcattgcgcgctcggtcgagggcgcgctggccggcggcatcgtggccatcgagctctacaaatggttcgcagggatcgcggtccgaaccggagcccggtttgcgctacccctggcactcggtatcgcgatcggtcgtctaggctgctacttcgcaggcctcgaggatttcacctacggcacgccgacgacgttgccattcggccatgatttcggcgacggcgttctccgccatcccgtgcagctctacgagagcgcggccatggccgcatttgcgctggcctatgtgctggcgatcttgaaccgggagacgttcacggtcacaaatggtttctacctggtgctcgcctattacggagcgcaacgcttcctgtgggaattcctcaagccctacggcacgctgatcggccccctcaccctgtttcatctgctgtcgctgttcatcctgctctacgccgccttcatgctggcgacggcgcccaaagcgagacccgtgcatgaacgcgccgctgcgtaaatcgcgtccctacatcttctggggccagacccaatccctctgcgagacctgcctgaagctggtgccgaccaagatccagatcctcggcaacgaggtctggtacgaaaagcgctgcagggcgcatggcgtgcagtcgactctggtgtcgacggatgcggcttattggcgcctgtgcaaggatttcatcaagccgggcgaccggccgctgcaattccagcagcgcacggagttcggctgcccccatgattgcggcctctgccctgatcacgagcagcattcctgcctggcgctgatcgagatcaccgagcactgcaatctcacctgcccggtctgcttcgccgattctgctccagcgcgaacgaaattcaccccgcttgcgacggtcgagaagatgctggacgcgctggtcgcgagcgaaggcgagcctgatctggtgcagatttccggcggcgagccgacgctgcaccccgatttcttcgagatcctggacgccgtgcgcgcccgcccgatccgccacgtcatgatcaacaccaacggcctgcgcatcgctcgcgaaaaggatttcgtggcgcggctcgccgagaacaggcgcgggctggagatctatctccagttcgattcgcttcggcgcgatgccctgatccatctgcgcggcgcggatttgcgaaggatccgacagcaggcgctggagaacctcgagcattttggtgtgtcgaccacgctcgtcgccaccatcaagcgcggcgtcaatgatgacgaggtcggcgacatcattcgccatgccctcacctggagatgcgtgcgcggcgtcaccctgcagccggtgcaggacgccggccgcaacgagagtttcgatcagcattcggaccgcatcatgctgtcggatatccgcaagggcgtgatccagaccggcgtgttcggcgacaaggacatgatcccgctgccctgcaaccccgaaagcatctcgatcggctacgggctgcgcaacggcgagaaggtcatgccgctgacctcgctgattccgcaggagcaactggtcgccgtgatgcccaacaccatcagcccggagaaatatccggcgctgcgcgagaagttcgtcgacctgttctcgctgtcgtcgggcccgctcaacacgagcgagcgggtctgcgaactcttgtgctgcctgccaagcttcgaggtgccggaagggctctcttacgaaaacgtcttccgagtcaccatcgtgcagtttctcgatcgcttcaatttctgcgtcggcaacgtcaagcggagctgcatccatttcgtgac

SEQ ID NO: 134 - DNA, 6435 bp, Bradyrhizobium colbertium
acccgtccactttatcgggggaagatcacactgcgccccaagcatatcggcatggttttccaggcaccgagtctcatcccaaccctgagtgcggttgagaatgtcgaggtccccttgcgtctggtcggaggcgtatcaagaccaagggaggtagccatgcagatgctggagctgcttggccttacagcggtcgccgacaagctgcccgacgaattgtcgggtggccaagcgcagcgcgtggcccttgcgagggcggtcgtcctcaaacctcggctcgtcctggccgacgagccgaccggccaattggatcagccgaccgcacgccaaaccatcgagaccttgctcaattcaatcgatgggagcgatgccgcattagtcatcgcaacccacgatcccatggttgcggaacggatgaaagtcacctggctcatggaccacgggacccttcgggcaccgcaaatagggtgtgcaaatgatcaagctgtggcttaaggggcttgtcgccgcgcgatcgggccgtcttgtggcagcggttgcgggagtggcgctgaccgtggggctgctgggcgcgctgggggcgttcatcgtcgcctcctcggagagcatggcgcggcgtgcggtggccggcgtgcccgtcgattggcaggtcctgatcgctccgggagccgacgtcgcagccgtcaccaaggcggtcggcgaggctgcgaccacaacggcgctcgcacctgtcggctatgccgacagcgccggcttcgcggccacgaccggcgatacctcgcaaatgacgggaccgggcaaggtgctcggtcttgaggcgggctatcgcaatcattttccagatcaaattcgttccattctcggctcagcggacggcgtgctgatcgcctcacaaaccgccgccaatcttcacgtcgctcctggcgataccgtcacgatcgaccggatcggtgcggcgccggtcgacgtcaagatcgccggcgtcgtcgcactaccgaacgccgactcgatgttccaggcgatcggccttcccaagggcattgctcctcaggcgccgccggataacgtcctgctcatgcccatggccgagtggcaggccatctttgatccacaaaaggcggctcggccggacacggtgaagaccgaaattcatgttcagctcgcacgcaatgctttgccacccgacccgagcgcggcgttcatccaggcacagcggctggccaataatcttgaagccagagtcgccggcagcgcggtcatcgccaacaatcttgccgcacggctcgacggcgtgcgtgctgacgcgctctatgcccgggtgctgtttctctttctcggagttcccggcatcgtccttgctctcctggttacgcttgcggtcgcggcgtccggctcggatcgccgccgccgcgagcaggcattgctccggatacgtggggcatccttgttgcaggtcttgggcttagccgggaccgaagccgcagcgatcggactgctggcgatcgtgctaggtcttgctcttgccggcacaacggcaattgcctggtggcatctcgcagaccttcgtctcgcaatcccgtggttcgcgttggccgctggcgttggctttgttctcgccatggcagcctttctggtgcccgcttggcgcgacgcgaagctcttgacggtatcggcggcgcgcgtcgacgctaatcaacagttcccgctctggcagcgactttatctggaccttgccttcatcatgctgggtgccatcgccttctggagcacggcgaagagcggctatgagatcgtcttggcgcctgaaggtgttgcgcagacctcggtgcactacgaggcgtttctcgcgccactgtgcttgtggctcggcctcggtctcttgtcggtacgattatacaggctgatgcttggacccggccggcgtgctgtggcagttgcgatagcgtcaatgtcgtacgacctctctccgctggtcgctgcctcgttatcccgccagcgcctgcgcattgcgcgcggaagcgcactggtcgcgcttgcattcgcgttcgccacggccaccgcgattttcaacaccacctataacgcccaatcgcgcgtcgatgcggaactgaccaatggcgccgacgtcacggttaccggaacgtcgacacatccggccggcaccttgctgaaggaactgcaagccattccccgagtcgtcacggccgagccgatgatgcaccgctttgcctatgtcggctccgacctgcaggacctattcggaatcaaccccgcccatatcgggaaggcgaccacgatttcgaacgcatattttgcgggcggaaacgccgccgagactctcgcccttttggccgggacgcccgatggcgtcctcgtctcgcaggagaccgtcaacgatttccaactgcagcccggagatcgattgaacctgaggctgcaaagtgccgccgatcatcaatatcacgtcatgccattccggtttatcggcgtagcccgggagtttccgacggccccgaaggactcgtttctcgtggccaacgcgaactacatcgcagagaagaccggatcagatgttgccgaagtggtcctaatccggacctcagcgaatgccgagagtgttgcggcggcagcgcgccagaccgctgcgtcactgccgggcatgaaggtcacaaccctccgagagacccaggccctcatcagttcgagcctgacggcaatcaatcttcagggcctcaccaccctcgagctcggattttctgtcttgatgatcgtgggcgtcacggggctgatcatggcgctgggtctcgctgagcggcgacgtaattttacgattctctcggcgctgggtgcgcggccgggtcagcttggcgtctttctatggagcgaagggctcttggtcgtcatcggaggcgcgatattaggcatcgtggccggttttggccttgccgaggcgctggtcacgatcctgaccggcgtattcgatccggctccggaagctctttccattccctggctttacttggcgctcgctgttgcgatggcactcgcctgcggtgccgccgccataggcggcgcgcaggcactctccaggaagcccgaccttgaagccctgcgtggcggctgaggctgaggtcaggcttgaaggagcatcagcgcccatcgacctcaccttctcagagctgaccgttcggacgcttttccggcacgttggcgcagccatttctcttctggctagatggaattgcgtcggtatccgcgattccgctggatccttcgtcggccgccttgcatagcttgataggcggcctgaggatttgactttaagtctagctttaaggttacgtagcgaacgcaggtcatgtgtcgggcaccgagcgctggcggcgtggagttacgactggtaagagggtttgctgcgtcgcgtcggcacggagcggctcacagcctgcggttcactgagcccgccggggtcgattgggcggagattcgcgtgccagctctcgttcgcgtcgagatcacactggcggctccgatctcgggcgacgcgccacatcggcgtttcccgcccgcgcagcatgcaagggctggaatcatcgaactcgagttgggcggcgactgtcctgcgcgttgacaggggcgtcgacaaaagaatgcgctgtactgaccgcgcgcccagacatcaaagccatatgcaatggaggaatgggattttcaccaaggcggcccagctgcaggaccaccgctccggccgaagagagatccagacacaccaaatctgccatgtctttgctcgctggaccataacgagcatggcacgtgctacaaggtagcggctgaagccgtccttcctctcctgtagcggtcctgtagtaattgttcgcattccgcaaaccgcgttggctaggaatccagaaaagttctgcaggtgcaacagctcgaaatcaacgggaggtgcctccgatgagcgtgagcgaagtgttgcggcgccgcgtcgagtggtgcgctactcttgccgcttccctcccgccacgcacagtgcgaacagcgctggacaatctcgtgctgaagctccgaaatcttggctcgatgtgggaacgcttccatacttcagaatggcttatggctcagcccgagcctctcctttcggcaacttgccgcccgaaggcagacccttgtcgacctccttcgaccaagcccgatagtacgcgaccatggtcatgatccaaagacctgcggcaccgaccaggagctgggccgctactcccactgacgcgaactccagcacgaagtgcgcgatgaaggacaggaacaggccaacgcaaaatacaggcagcgactgctgaccgcatctaatcatcggcctgaagatcggccatttcagccctggccaatcgaccggaatgagcgagacgacgatgaacatcaggctcaccaaatggatcacccggtaaggcgccagattcgtcttgtcgttcggaatgaatgtctctgcgatcgcgtcgagaacggtctgccgcaattcgggaatccgctcagccagcgtgatggcgacagcaaacaggacgaagcagatactcaggacgtaaaggctgcgaaattgcagaagccctcgattcgccgcagctcccccgagtgccagccaagctccgaaaacaaagagcaactgccaggtaagcggattgaagtaccaaacgcccgcaggataggaggcaaaattccagccgtaatggcgagctgccagatacaggccgatagatccgatcatcaccgcattgtgccatcgcaacatgaaccaaaggcttgaacttgagcatgagaccttgcaagagagtctcgacggggacgttcatcagggacgtgacgttgaattgatccatcagatgcggatcgtcgaacttatgcgaaagatagtgaaccgaagtgaggtaaaaaatgaagatcagcaaatgggcaacgtagagctgccagacccggcgcaacaccctcgtagcaccgatgaagaagccccgttccatcatcatcttgccgaaaacaagcgtcgccgtgtagccggaaatcagcacgaagagatcggctccatcgctaaagccgtagttccgcgttgtgaaccatgcgagtacgctgtccggaatgtgccctaggaagatcagccaatttgccaggcctcgaaataggtccaggcgggcgtcgcgctgggacttgggcagcacggatcggacggcgattacatctcgaatccggcgccatacaggccttatggcccaaccggccgtaccggcaaaggtctcatcaaccaacgtctctttctccatttcttaatgatgagtagaaatgccgctaagcgcactcgatcgcatcctcaagggtcgccgatctgcgcccggcggcccagaaccgctcgatcgacctgggtttcgcgcggatcgagacgaaccgggtgcgtggcgaacccgtcgcctttgcgatacttctcgaaacctgatcgataacgcacttcggcacaccccgccaggcggtcgggtggacctaagcctgttgcggcaaaacgatgctgtcatcctggaggtcgccgataccggcccgggcatccctgcttcggaaatcgaccgcatctcgaaccgttctttcgtggaagtcgctcgcgaggtgatggaaccggcctcggcctttcgattgtgcgtcgtgtagccgaacggtgtcacggttcgatccgactcgagaacacgaggccgcccggcgagcacggctaattgccagcgccagcttacccgcggtcccggacatcaagtcccaagcgtaattggcgaacttatcgagtgcacaggcgactgtctgcgactcttcatcggttatcaccgcaaaaagtaccgggttgtaaggacccggggcgtctatcggccgacaatgtccaaagggaaatgggcggcgaggtagacccgggcccagcctacgcagagcccgagggcggcggctagggccccggcacgacgtgccggcgttgaggcggacacccagaggaccaaacccatcggaagagtatggcgctgtcatcgcttgggaaagaactatccggagcgtgattgaggaagtttcgggtatgtaagattgcgaagggtcgcgggtgcatccagaacgatgaaacaccgacggccaacggcagcgctagaagtcttcgagatctaccgggataggagcgctacgacgctcatctcggatcggatcatttaaaagtacaagacgaccgtggagaagatggtgaagtcgctaaagctgcccttcgctctcgaagcttttgctatactgtacgtcgtccgttcccgcgatgatcttcttgagctcggcctttcgctcgaggtggggcagcttccgaatgtcgcggccgttcagataggggaggccgaaggctattagggtctgtactcaatagggattccatcc

SEQ ID NO: 135 - DNA, 2785 bp, Bradyrhizobium colbertium
tccgcataacgccacgcttcgcataatcggtgttggacgaagccgctccgcggcagaacactcgggaagggtggcccatcgtcggatgaaggaatgcggctgaagcaactgtaaccgctttggcgtgccatggtgagacgtaatttgcagcgttcataggcttggcttcgagcaagatggcgttgctgccctctggcagttttcgttttttttgccaaggagccttcaatgagcccgcttcggttacgcatgataaacgacatgcagatccgcaacttgtcaccgcacacgcaggaatcctatctgctgcaggtttcgcagttcgcccgccattttgcgaagtcgccggctttgcttgggccggaagatgtccgcgcctaccaagtctatctgacgaacgagaagaagctggcgccgaagtcgatccacgtgaccgtctcagcgctccgtttcttgtaccgtgtcacgctcggcttcgaatgggatttcgacctcatcattccatgtccaaaggtgcccaagacgctcgccgtcatcctcagtcccgaagaggtgctgcacttcctcggctgcgtggagagcctcaagcatcaagtgatcctgacgacatgctacgccgccggtctgcgcatttccgaagcggtacgcctaaagccgggggccatcgaccgacagcggatggtgctacgcgttgatcaaggcaaggggaagaaggaccgttacgtcatgctctcggcccggttgctggagacactgaccgactattggcgcgccgtccggccgagcacgtggatgtttcccggcggtatccccaatgagccgatatcgaccaacgcggtgcaggacgcctgcagcaaggcacatcggttaacgggccttgccaagcccgtaacgccgcattcgctgcggcatgccttcgccgtccatctactcgaggccggcaccgatcttcgcaccatccagctcttgcttggccatcgcagcctgtccacaaccgcgcaatatctccggatagccacgaacaaagtctgcgcggcgaccagcccgctggagctgctgccgcgcccaatccctaaggcaccaccaccgccgccgcctgaacatttctgacggcggccccatgggacgctcaggtccggaagtggcggatatcttccgccgctatggtgttgcctggcgcgagcagcactggaggtctctatcgaccgaacgacgtgcagcaatgacggcgatcgagcgctgccgaacggccgcgctcggtggccatgtcgagcagtgcgatcactgcggagagcggcggatctcctacaatagctgccgctcgcgcaactgccccaagtgccaatcgctcgcgcgggcagaatggatcgaggcccgacaagccgagcttctcgatacgcagtattttcacgttgttttcaccatacccgaccaaatcgcagcgatcgcattccagaatgccggcaccgtgtacgatattatgttccgcacagctgcagagactttgcggactatcgctgccgaccccaagcacctcggtgccgagatcgggttcttttctgtccttcatacttggggccagaacctccttcaccatccccacctccattgcgtcgttcctggaggaggactgtccccggatggcagccgctggatcgcgtgccggcccggcttctttcttcccgtggccgtgctttcccgtctgttccggcgcctatttctcagcgccttgcaaaagtcgttcgataccggcgagctacaattcttctcgtcgctggaaccgttgcgtgatccggctgcgtttcagcgttatctgaacgaggtccgcagaatcaattgggttatctacgccaagccgccatttggcagcgccgaacaggttgtgcactatgtcggccgctatacgcatcgagtagcgatcagcaacagccgtgtcatcgatatcgaagacggcaaagtacgctttcgatggaaggattaccgccacggaagccagcagaaagtaatgacgctggacgccggggagttcattcggcgtttcctcatccatgtcctgcccgaaggcttcaaacgtattcgctactatggttttctgggtaaccgctaccgcaagcaaaagctcgctcgctgccgtgaactgctcggaatgatatccgccgatgctcattcggagccggaagagccatccgattgccccgagaaggctgagcactgcaatgccgcttccttgcgtcaatgtccatcctgtcatcaaggccacatggtgtgcgtcgaggtcttgcagccaggttcgttcagcgccgctcgttcaccggacacttcttgatgcgagacctcaatcaaaccgccaccttccttttcgcaattcttccggccgtcgtggcagccgatagatgccctgttgtcgttcttccgacgtcaaacctccggcgcttcgcatttttcggctacttcgcttcccagatgttccttccacccagtactttcgtgataatgtccgctttggacttgtctccagtccagatcacgacgtccacaaataacggcgcagtgattcaacacccatagctgcagcggcgtgcccgcggcttcgtccaacacgtttttagattaccggcgcccctcgcgagtgcccgtgttgggtgctgaaccacgcgccgccaatctaaaaacgctctctattatgtggtgcaccacataacgccgagatcggagcagcctggtcgaagcgctccgaggagggccgcgactatctcttgatcttcccccgataaagtggacgggt

SEQ ID NO: 136 - DNA, 6355 bp, Bradyrhizobium colbertium
atcggccgcgacagcctgctcgggacgctgtcgaccatgggtgatgcctgtgcactgaacaccgccatcgtgctcgttccatgcgtcgcctcggtgatggatctcgaccggctgcgggtcgccgccgaccagagcagcaccctgcgcacgctgctcacgcgccacgggctggcggtctacgcccaggtgcagcagaccgcgggctgcaatgcctcccatccggtggagtcgcggctgtcgcgatgccttttgcagacacatgatctgtcgggcgactcccggctgctgctgacccaggagaccatggcacagatgatcggggcgcggcgcaacagcgtgtcgctagccgccaactcattgcagcaggccaatgtgatccactacagccgtggacacatccagatcaccaacctggacggcctgcgtcagacagcatgcgaatgctacgcctccgtgaagggccagtacgaccggctggtccgggtgtcctgaccgcagcggtcggttggtaaaccgccggctaacgccggcctgcaaacaccggccatcctgctaccggaactgaaatccgaatgccgtagacgcgtgggcacacctcgcgcctgcacgtgccgcgcgacgacgaagagtgatcaaggcgggcaagcccatgttcgaagcaaccgctgcgccggcgcagaaggcgcccgatgccgatcccgcgcgcgagccgggcgcgtatgaagcgctggtgcgcgagatcggcgaggacggtgcctgtgaagtccgcgaagtgttctggagcgagacctgcgcgcgcatgcaattgttccgcacgctctcgctcgcgcagcaccacgccaggatcgcccgcgaagcgcattcgctgaagagcgcggctggaacgttcggctatgtcaggctcgccgcgctggcgctgcagctggagaagaccgcgggagatcttggcgaggccgagttccgtgcgctgctggacctgatggaggccgcctacgccgccgcgcgcgcgcaggagccggaaggtccgatcccctcttgatgcgccctcttcgtcatcaggcagctacttcgccgaaaatgctctggaccacccgcgcgtgtattcccgccgtacttctacggtttgggatattcactgatggctaatcatagatggcgatagtccccggaaaaccaggagggttttccatgttcacttacgagaccgcagaccagaaggaggtgcgccgattccgcatcgcacagttcaacggccgcatggcgaccgtgaaggccggcgagtcgacggtgaccggtttcgtgcgttcggtgctggagcaagaatcgagcgtgccgccgcgctggaccatcacgatcattccgaacgcgccgaaggaacagatcaagccgctgcgtcccgcctcgcgcgcacgtccgttcgccgaagactatttctgagcgacgagactcgcaaaactcctcgggagacctcccgggccgcgcccgaacaaccggtctgccttagtcgatcgaatgcagcaatgccgcacgaaccaggtccgcggtgttgcgcgccccgagcttgcgcatcgcttccgcgcgatggctctcgaaggtgcgcggactgatctgcatgcgaagcgcgccctgcttgttcgaatagccttcgctgatcagcctcagcacctcgcgctcgcgcttggtcaggcgtttctggcccgaggggccgagtggctcggcccccggcaggcgctgcggctgtagcacgcgggtgaccttcgattccgcctcctcggtgctggacgcgaccggcaggccgcccttgtgagggccggcaagctgcttcaccaacccgcaaacgcgttcagtctgcgccagcgcgttctcgaccacccgctgcaagtaggcacgatcgcccgtgacaggcgcgagttgatcgctgtgatgtttgatctcgcccatgtagagcaggagcgcagtcagggggccgttgagctcgcgggcgatggcggccgccatttcgtcggccgccttggcacggacggcgctcaggcggacgagatcgggctcatcggctgaagcagcgctgtcttcgtgccattccgaagaccgcgaatcagtggccgtatcgttccgtgaccccatgtcactcatttagcggaaccggggcaggtctgtggttaactttttgctccgtaggaatacggggatttaggccgtttgatgcaaaaatggcgacttcggcacaatttgtgcttgcgtggcgtcggatttaaccacgctggggttgagttcctgctcaaatcgttgctggtcggccggaagtctgactggcccgctcaccttcagaccaggccaccccccggtttttacggattaattaacggcgacttgcttctctacgcaggttgagagcgcgcaaatgcctccacgcattgggcccgcaagcccgcgggaacacgctgcgaaagattgcgtgcatgaacgagatcgatcggctgtcggaatttctgcagaggctcacgccgctgtcgcgcagctgtctgctcagcgagctcgaacggctcgagctgtgcggcatcgacatgccgggttcggccgagatccagtcccgcttgcgcgccgagttccgcaacgacggatcgacccaggcgcgcgccaccaatccttcgcgcaatttcttcgcgcctctcgagctgctgctgatcgacggtgcacccgagcatgccaatatggggcggatctcgcgcaacaccctcaccccgatctgggagtggatctgccgcgacctgctgccgaccatggcgcgcgactacatcaaggccatcaacgatcaggtcgccgccaacaatccgaaggaagtgcagaagatcgcctcgaccttccagaccaaggtcgtcaaggttctcgagaacaccctcacctcgcccgagagcaccgaatccgcgcgcgccaagctcgcgcaatacacggcctcgcgcaccgccttcgacgatgtcgtgaagatgcttcacgtgttgcgcgccggcgacgcgctgcccaagttcaacgagaagctgcctgagaagatcgcgaagttcgacgacggccaggtcgcccagatcaccgcgcagctcgacgccttcaagaaggcccatcccgaggcgctgcccttcgcgctggcgctggtggcgcggcgcgtgaagccgttctggcaattggcgcggcttgccaccaaggccgcggcgggcaaggccgccgcagacgtcgccgcgacgccctatgcctgcgtcgtccacatggttctcgaccggctcgacgacaagcgcctcgcgcttcgcgtcgcgctccggaacaaccgggtgctggtcgcccgcgatctgctcgccgagatctacgacaccgaatatgcgctcaaggtccgcatcgacggcttcgagcactgcgagtggggcgtccgtctccagcaattgatggacgcgatcgcggcgctggtctcggccgaggtgagccgcttccccgacaatgtcggccacattctcggatcgcgtcgactgcgcagccacgacacactcggcggcaagctgacctatctggcctggaaggggcgcgatgcgatgcaggacggcgctgccgcgttccgcaaactgatcgggcaaacctgagcgcgctcggcacaaaggggcaatcacattgccccttagttcggcgcgcgtggcaggctcaggaagcgatcgagaaaccgccccgacagcacgaacctgaaccaccaatacatcatccgccgcgtcgtcattgctgcaatcctcgacagcccaccaccggctcagcggagcattagcgcgagtgcagcagcgcacgtgtgatgcgcttcacattcatggccgccggcccgcgcgtgtgccgcggagccgcctgcgagcaaaggcaagaacctgcgcgcctcgcgcgaagcgaacgtcctgacgtcggtccttcgccgccaattcagcgccgcgcgcgagagagacctccgcgctcgtcggagttggcagcctgcaaggcttgggtctgctttctcttcgagcgatcctcgacaaattagctcgaattgcagagcttaacgttactcagataattcaagaacgatgtgaagctctccttatttgaacccacgctccgcgtttaagaaaccgtcacggaacgggagtggtgtaggatgagcgatgggatgagtgaactcgtcggacggaggcctgtgaccttcggacggcgaaaggtgacgccgcgcgcctgcgtggccgacagcaagcgccacttgcgcgcctttctcagcgaggtgctcgaggatctcggcttcgtcacctgcgaatgcgccagcgctgacgagctgcaaaccgtgctcgccaccgaactgccggacctgatcctgctcggcgtcgccgccgacggcatcgagccgggacgattcctcgaagtattggtgcgcgagggattcggcggcagggtcctcgccgtcggcgcccgcgattcgatcatcgtcaaggccgtgcggcaggtcggcgaggaatacggccttgcgatgctgccgccgctcaccacgccgtttgccgcggagacactgcgcgagcgcgttgcgatgctgctgccggacgagccggcgccgagcccggccgtgcatgtcggcgaggccctgcacgccggctggctcgaactctggtaccagcccaagatcgacgcgcgcacgctggtgcgcagcggcgccgaggcattggtgcggatgcggcatccgacctggggcgtggtgccgccggcctatttcatcccggagccgcacgatccgcattttcgcgagctgtcggagttcgtggtcgatcgtgccgtgcgagactggcattatcttctcgaacaacaaagccccgtgaatctgtcgatcaatcttcccgcttcctatctcagggagccgcaggcggtgcgcgatctctgtcgccgcgttcccacgcatccggctttcggcggactgacggtggagatcgacagcgaggaggcgatccgcgagctcgacctcctgaccgaggttgcgcgcgaggtcggcctgcacaatatcggcctgtcgatcgacaatctcggcgccaactggccgtcgctgatggagctggacaggattcccttcgtcaagttgaaggccgaccggcagttcgtcaccggcagcggcggcgatcggctgaaacgcacggtgtgccgtcacatcgtcgagctggcgcagggctttggcgcgcgcgcggtggcgcaaggcgtcgaaagccgcgccgacctcgtcgcggcaaacgagctcggcttcgacctggtgcagggcttcctgttcggcaagccgatgccgctgaagaagttcgcaaggagcgcgctgacgcggacggtgatggggcagcagtgaggcacaggcctcacgcataccgccgcgccaggaagacgcagacgacgacgagcgcggtcgcggcgaccatgctggccgcgaccggctcacccagcaggaagcccgcgagcgcgaggccgaagaacggctgcagctgctgcaactggccgacccgggcgatgccgccggcggcgagcccgcggtaccagaagatgaagccgacgaacatgctgaagacggagacataggcgagcccgatccaggcgggcgcgccgacgccgctccagtccgatggccacgtccagatcgccagcgccagcatcggcggcagcgccagcagcagcgcccaggagatcacctgccagccgccaaggcggcgcgacagcgcggcgccttcggcatagccgaggccgcacagcacgatcgcggccaccatcaggagatcgccggtgagcgaggccgagccgtcgctggagaaggcgaagccggccaccgtggcgctgccgagcacggcgaacagccagaacagcggtttcggccgctcgccgccgcgcagcacgccgaagatcgcggtcgccagcggcaagaggccgatgaagacgatcgaatgcgcggaggtgatgtgctggagcgccagcgcggtcagcagcggaaagccgaccacgactccgatggcgacgatgacgagcgaggcgagatcctggcgtgccggccgggcctgatgcaacaagccaagcaccgccgccccgatcagcgccgcgatgacggcgcgcgccgacgtcaggaacagcgccgagaagccgccgaccgcaacccgcgtcgccggcagcgagccgctgaagatgatgacgccgagaagcccgttgccccagccgctggcggaagagtgcatgttggtctcgcttggggtgggggcggcggatcgggtgccgcggcggttgaacgcctcgcgtgatggcatggaataacagaagcgcgaaaacaaccccatgcacagtagacggg

SEQ ID NO: 137 - DNA, 36049 bp, Bradyrhizobium colbertium
gtcactgtctcactcccacggcttatgtatgctttatgtatacaatagccgtgcgggagaatcgttcaaggccaaaattagcctaatataatacctctacttcatccaatgtatacaagaatgcggcgataactcagagggcgagaggggccccgcgccctgcttacgccccgaacaccttcgccaagcccgcctgcgcctcttcctggatccgcttcaggtgctccggactgcgaaaactctcggcatagatcttgtacacatcctccgttcccgagggccttgcggcgaaccagccgaaatcggtttcgaccttgatgccaccgaagggctgaccgttgccgggtgccttgctcagcgtcgagcgaaccggatcgccggcgagttccttcaggccgagctgctccggcgtgactgatttcaggatgttcttctgcggcccggtcgcggcgacatcgatgcgggcgtaatggggcatgccgaactcggcggtgagatcggcaaagaactggctcggatcgcggccggtcttcgccatgatctcggcggcgagcaggccgaggatgacgccgtccttgtcggtggtccacaccgtgccgtcgcggcgcaggaacgaggcccctgcactctcctcgccgccgaagccgaagccgccggtgacgaggccgtcgacgaaccatttgaaaccaaccggcgtctcgaccagcttgcggccgagcttcttggcgacgcgatcgatgatggagctcgacaccaccgtcttgccgatcgcggcgtccttgccccagttcggccgatgcgtaaacaggtaggagatcgcggtcgcgagataatggttcgggttcatcaacccgccggtgcgcgtgacgatgccgtggcgatcggcgtcggtgtcattggcgaaagcgacgtcgaagcggtcgcgcatgccgatcaggcttgccatggcgtagggcgaggagcagtccatgcggatcttgccgtcccaatcgaccgtcatgaagcggaaggtcggatcgatcgcctcgttcacgacagtagcattcaggccgtagcactcgatgatcggatgccagtagtgcacggcggcgccgccgagcggatcgatgccgatcttgacgccggcggacttcacgaggtcgagatcgaccacgttgccgaggtcggcgacataaggcgtgacgaagtcgtaagcgtggacgttcgacgacttgcgcgccctggcataatcgatccgcttcacgtccttgagtccgtcggcgagataggcgttggcccgtttttcgaccacgccggtcacgtccgtatcggccggaccgccatgcggcggattgtacttgtagccgccgtcctcgggcggattgtgcgatggcgtgatgacgacgccgtcggcgagaccgctggtgcggcccttgttgtaggtgaggatggcgtgcgagatgacgggcgtcggcgtgtagccgccgtccttgtcgatcatgatctcgacgccgttggcggcgaacacctcgatggcgctgaccagcgccggctcggccagcgcgtgggtgtcgatgccgatgaacagcggtcctgtcagtcccttctcgcgccggtaatcgcaaatggcctgcgtggtcgccaggatgtggccttcgttgaacgtgttcttgaacgaagtgccgcgatgccccgacgtgccgaacgccacgcgctgcgcaggatcggacgcatccggcttgccggcgaaataagccgtgaccagccgcggaatgttggtgagcgcgtccggcgaggcctgcttgcccgccgcgggatgaacatcagccactgaaatatcctcgtcctgtcgtgagtgcgggacaccatagcatccgcattgcccccgccaagccacaacacgcgcgagggggaaggcgttccttggcttaacctcatccgcgtcgtcccgtcgtccgcggctacaacacctcgccgggcgaacgcgtcgacgccgcaaccagcttcacgccgccccgcgcgacagtgaggtcgggtgaaatggcggtttgttaactccgccgccctatgacagacccatgctgtgggatcggccgcacttcgggctcggcgcgatgtggagacacgtcgcggtcgtcctgcttttgtcgatgccgatcggcgcacatgccagcgacggcgatatcgacgggccgcgcacgacctcgacgatcgccgacgccagcacagagctcggcgctggcgagactccgtcatcccgggccatgatccggaggatcatcgagagagaaaccgcaagcaccgatctaccggctgctgttgccgaggcggtcgtcttcgtcgaaagcggctacaacccgtccgtcatcggcagcgggggcgagatcggcctgatgcaggtacggcccgagacggcggcgatgctgggctttcgcggaagcaacgcggaactcgcagaacccgacgtcaacattcattacggcgtgcttgctctcagcctggcctggcgtgtggccggcggcgatctctgccgcgccctgatcaaataccgggcaggtcaggatgaagaaaagccgacggcccggtcgcaggtctactgcaaccgggcccgtaaccgtctcgttgcgatcagcgcaatgccgttaggcaccgaagctgcggctacgacagatgcggcgcccgcgattgcagctgtggccccggcaaaaccggcgacccgatcgaaaacgccggtgcagcccaaagccgtctatgcccgccaccggcaaggcaccgcggccgccagccgcgcctactgggccgcacacgaggcgaggatcagccagatcaaggcgcgcatcgaaggcagaagaaagcgcgtggcgtcacgttgacggcgagccgctgtgttagagccgctctttggagcgcgagcctccgccgccttgcgaaatacacgatcggtgctcggcgaggatcccgcgtgcattgaggtctgagaagacgatcagccgccttgcggcttcacgacgatccgacttcgatccggtacgacaaggactcttccgcgtccggcgcgatatgcatgagccccggcttgtcggtgaattcgccgtcgaagccggcgggactggcatggccgtgccagggctcgatgcagaggaacggcgcgcctgatggtttcgaccagatgccgagctcgcgaaagccgcgccaggacatcttcagccaaggtccgctcgatgcgcccagcctcgcgccgtagcggacggaattgctctcgatccggtcgaagatgatggcgtcgtcggtgaacagggattcggacaaagggagcgaggcgcctttgaccgggctcggctccgcttccggccgcaacagtccaccattgagacggcggataggagactgctctgcgcgatcgaaggtcagcgcatagctctccttggccgcgccaggctggagcggccagttgaaggcaggatggccgccgatcgacgcgggcaagacttccttgccggtgttcgcgatcgtgagtgtcaggtcgagcccgagctgatcgatcgcataggcggccgtaaggcggaatgcgaacggatagagcgcccgcgtcgcctcatcgtctacgagcaccagggcgcaacgactctcgccgcgttctgcccaaataaagcgtctgtcgcgggcaaagccatgctgagtcatccgataggccttgccccgatgccgcagttcgtcgttggcgaggcgtccgacgatcggaaacagcagcggcgcgtgacgcggccactccggcccggcctgccaaagaaactcgatgctgctgtccttcaacgaacacaactcggcaccgtgcgccttgatcgttgccgtgagggagccgctacggagggagtgggtgtcatcggtcatcatcgacctctacaccccggtctcgcacgcagcaaggcgaggccggccatgcaagcggcgcctccgagccatgccgggctgcgtcatatttctgtacctaaccattgctcacttgccgctccgccccgtcccaagcaccgaaatccggcaggaactccaacaacaatcgtggtagctaattgaagatcttcatcaacggccgctttctgtcgcaaaagctcacgggcgttcagcgctatgccgctgaaatggtcaaggcaatcgacgcgctgcttgcgtcggagcagacttcggcctcgttgcgcaatgccgattggcagttgctgacgcctgcagatgcaactgaacatctcgatcttgatcggatcaagattcgcgctgtcggccggttgcatgggcacgcgtgggatcaaatcgaactggcgcgcgccgctgccggcggccgcttgatcagcctctccaattccggtcccgtcttccatcgcgaccacattgtcgtgatccacgacgcccaggtctttcgccggcccgatttcttcgattggcgctatctggccgtgcatcggacgatggggcggttgctctcccggcacgcagccatcgcaaccgtgtcggccttttcccgcagagaactcgccgacgtgctgaatctatcggcatcgagcattccggtcttccccaacagcgccgaacattttgcggctaccaagccggaccccggaattctcgcgcggcttggagtcaggccgcagaggttcttcctcttcgtgggctcaaggaccaagaacaagaatctttccgttgcgattcgcgccgtccagttgctcgatcgacccgacgttccattggtcgtcgtcggaggcgataacagcaaggtctttcaggataattcgggcgaaggatctgccggcctggtgctcgccggtcgtctcaccgacggcgagatcgcggcgctgtatgctcaggcgtcggcattcgtgtttccctcgctctacgagggcttcggtgtgcctccactcgaagccatgatcttcggctgtccggtgatcgcatcgacggcagatgccgtcgtcgagacgtgtggtgaggcggctgcgtattttcgcgccaacgacgctgaagcgctgaagcaactcatgctcgaaagattggcaatcggcacgatctcggaccaggaacgcaggcggcagcaggatcgcttggcattctattcgtggaagaaatctgcgaaggcgctgctggatcaccttgcgacaccagcaagcgtcgccagcgctgcttgaaattcgacatagctcgcctatcgcgcgcattggtttttgcacaaacgttttgcaactcgcggctccgcgtgtggttccaggaaatttttccgatcgcgcgatgatcgcaagcgagcagagcatggcgcaacataaccacatcgctgccccaatatcgctacgtattcgaggaactgtgtttcgcactagcgaaaacagaacagggatacacgatgtccggctctcctacgcggttctatgcgaggcaaacgatgaaagtgctgcacatcgccgagacgatccgcggcggcatcgccagttacctgaatgaactgcatccacagcaacaggcgagcttcggcgccgacaacgtgcactatgtcgtgccctcggatcatcgacgcgatctcggcgcgatcgatgacaatcagattacgacgttcgagcggtccagccgcagcatctcgggattattccagatgctgcgcgcaagcatgcaagccctcgacgcctttcgcccggatgtggtgcacctgcactcttcctttgcaggactcgtgcttcgccctgcgctggcagcccgctcggacggtccgcgggtcgtctattgcccacacggctgggcgtttgcgcgcgagaccggtcgtctcagccatgtcgtgacgaaggccgcagaaactcttctcgcgcgaacgtcggaccgcatcatctgcatctcgggtgacgagtatagcgaggcgatccgcgcgggaatttctgccgaccgcctcactgtcgtccacaatggcatcgcgaagagccgcaatccgcagcccgttgcggccgactggacgtccaagaaggtcaaggtcctgttcatcgggcgcctggaccgacagaagggcttcgatctcctgatcgaagcagcgcgctcgctcgaggatgtgctggacgttcgcatcatcggcgcctccgtcgtcaataaatacgaagggccgacggtgccttccaatgtctcgctgctgggctggctggatcgccccgccatcgagactcagctcgaggccgccgacctcgtcgtgattccgtcacgatgggaggcgtttggtctcgttgcccttgaagcaatgcgagcggccaagccgatcctggcgttccgcagcggcgcgctgcccgagatcgtcgtcgacggtgtgacgggggtgctttgcgagcccgtcgcggtccagccgctcgtcgatggtttccggcgcgcgctcgatctcgacctcaaggtgctgggacagcgcggctacgaccgcttcaagcagctgtatgacgttcagaagacgcatgcacaattgcagcaggtctatgtcgagcttctccagggcgacggggtcgaggcgaaggcgggactgcagtcggatctttccaagaatttctgatggctcgaccgctcccatgcaccttgcttcgcgacagtcttcgggtcgcgagcctcatcgcatccattctcctgccagcctccgtctgcgcgcagcaggcgcagccgctcgatgcccgattcctgctcggggtcggcacgcatcaggggcttggcggcccagtgagcgcgcgcggatatgttcctgccgagaacatcgcccagatcaagcaactcggcttgaacgctttccgcgacgatttcccctggtccgatttcgagatgccaggacgccggctggggttcaaccccagacttggcaggctcgaggcgcaagtcaggtccggcgtcgcacgccctctcctgattctggccttcggccatcatctcatcccgaattcctcgccaccgacgaccgatgaagcccggcagcgcttcgcggagtatgccgctgcggcggcgcgatcggtcgtagcgcaagatcccctgtttgagctctggaacgaatggaacctggcgtcgaagaaagatgctgcgttctcgccggaaaattatctggcgctcgcgcaggtcgcacgaccggcggtcaagcgcgttgcgccgaatgcgcctttcctggtcggagcactcggcgacgatccgggctggatatggacggagaagatgctgcgcaccggcattctccagtacgcggacggcgcttcgatccatctctataatttctgcatgggcccgagcaaacgcacctcggccgaaatcatcgacaggctgacggcgtttcaccgcctcgtcagccaggcgagcggaaaccccaccttcccgatctatgtcaccgagaccggctggaccaccgccagcaacaagtgcggcgtcaacgaacaggcccaggccgacaatacggcacaactgatcctgtgggcgtcgactgcaacgcgctggctcaagggaatgtggctctacgagctcaaggacagcggaacgaatccgtcggacctggagcacaatttcggcctctatcgtttcgacaattcgccgaagccggtcgcctgcgcggcccagggcgcctgggccttcatccgctccagcctgagtgccgagcgacgagagctcgccagcggcgtcgtgtcgatcaacgcatcgacgacgtccggcggcagagttgcggtctggtccgaggccccgggccgacgctacgaaatccggatcaaggacgatcagcaaggcgcgagctttgcgatgccgtgcaatgcgaccgcaaaaccggcttccggaatctggattccggtttcgagcactccggttctcattgcagccaatgacagtgccattcccgccctggagatacgtccggtgcgatagacgccattttgcagatatggggttacgcgatgaaagttcttttgacatccacgctttatccgacgcctcaggcgccaaagatcgtcggcggcgcagagatcttcgcgcgacgtttcgccgaaggcctggcgcaacgcggagacgaggtcgaggttatacgcgcagcacccgcgccccagcaggctcgcgagacctgcaacggcatcaacatctattctgcgcccgtgcggaatatctatctgcccttcacggagcagaaaaacgtcgcgttgcgcagcatctggcacgccatcgacgattggcagatgcaggcgcccctgatcgcggagcgcatccgggccttcaagccggacgtactgcactccaacaatttgtcgggtctcaccaccgcgatctggcgcgttgccgcccagctcgaggtcccggtgctccatacgcttcacgactattacctgacctgcccgcggtgctcgcgcttcgacaagggacattcctgcgggcacacttgcacgagctgcgggatcctgacctttcatcgcaagcgcgccacgcactggctcagcgccgtggtcggtgtgagcgagcgcgtcctgtccattcataccgacattggcatgttctcggagacgccgatccgtaccgtgatccgcaacgcctcgaccgagccgccgcgtgagccctatccacgtcccatctgcaccgcggaagtgacgttcgggttcatcggccggcttacggaggaaaagggcatcgataacctcatgctggctcttgctctgctgccccgcgaccggatccggatgctgatcgccggtcgggtcagcgaccaagagcaaggacgtctccgggctctctcgggagatgcacgaattgagttcatgggcttcgtggcgcctgacgatttctacaagcaagtcgacgtagtggtcgcaccatcgatctggcacgaccccggcccgctcgtcgtcgcggacgcaaaggcggccggcaggcccctgctcggaacccgctttggcggcatgcccgaagtcattcagcatggcgtgaccggctggctcactgaagccgacccgcaatcgctggcggacagcatgctcgcggtcgcggcggatccgcacaagatcgatgagatcagccggcgcctgatcgcggacaccaataaatgggtatttgccgacgtgctgtcgtcatacaagaacctgtatgaacaattgcgggagcaacggatgtcgcgcctgcacgcggcaacggccgatgcgccgctgggacgggctgtggccaaggagcgcctcattccgagatgacacgcctcttcgcgatggcgggctacgtctatcagagcgccgcggcgatcatcctgatcttcgcagtcagccatctgctgcccgccgccgcctacaccaatttctcgctggcactggcctcgagccaattgctctgcgttctgatgttcgagtggctgcagctctccggactgcgtttcctggcggcagccaacgaagacgaggcggctcggctgaggtggtcgctctttgcagcaggcctgtcgagtgctggcgcgctgatcgtgggcggcagctgcgcatctctggccagtgtcctgccgacggcgatcattgcactgggtctcggcatttccgtgcttcagggcctgacggatctctattttctgacggtgcgtctgtccgaccggttgggagtggcctcctctcttctcgcactccgtgcaaccgcgcttctggccggaggcgcgttgggagcagcgacttcaggaacggcggaggcagcgctgctcggtatcgcgtcgggtcacgtcctgggcctccttgccggcatggccgtctatcgcacgcctgtagagcgtacttcgttgcagacgatgctggccgactggaagagcttcgcccgttacggcatgctcgccgcgggcgcgtccgtcatccatctgtcggtgcccgttctgctccggatcatcatcatcggcaggctgggcgcgaccggcgcaggtgccggattctcgatcgcgctcgatctgctgcaacgcccgttctgggttctcaatgcggcgatccacaccgtaagttatcccgacgtggtcaaagagttcgaacgccggccggtcgtgaagtcggttgaatcggcccgacggatgttcgaattcatggtctgcaccacccttgtgctgctcggtgggctggtaggcttcattcctgatgccgcccgcatggtggtgccacgcgagagccttgacggctttctggcgacggcgccggcagtcgccgtcttctatttcctgcacacccatctgcaggccacagctgccgtcgttccacacctggagaagctcgcgaccaggcttgtggtcgtcgccgcggggcagctcgcaaccgtcgcagctgtcgtgtttgccgcaacatgggcgggcctgtcgccgcggcaggctgtcggctgcgcttcggtcgccacacttgcgacgatcctcgctgcgctcggtccgaccctgcgcttcgacgcattcccgcgctggtcgttggtcgcgcaggcggtggcggctgcggtcctgatcggatcactcggcgcaattccgaccgagcccgcggcatggctcgccggcaagatcgtgatcgcggcgatcgcgactgcgatcgtcggatggcgcggagacttcctgatgctggcccgccgaggcagatagctgcgctgtcccttcacggaagcaagtggctagtcagccgctcctatggaaccgtaagcggccctggtaaatccggcagtgagaccccgtgaaaatacgtacaaccaaagcgctaatcgtccatagtttacgcgccaacgaaaacggcacctgccaacaggctgagcaaccaagcgatgccgcgcgatgtgcgcatagtttcagcagcatgggtcgcgcaattcttgaaagcgccttcctcgtgccatcctgcgcgggcatcgcatcagcattcggctgcaactcgagtcgacctgttcctgcacaaggaacctcattcgctcgcgatttgtagctacgatttttatctgaaattcacactcgacaatgaagcttgaacgcaaatcctgcgagcaattttgctcgcgttgaaaattcgagtgtgcaatgcctgatcaaaccatcctgtccgccagcggcttcatcaactccatcggcgtcaacacgcatgccggcttcgggtggaccggctacaacaatctcgcgctgatggtcgacgacctgaaatatctcggcgtcacgcatctgcgcgactcgatggggacaagccccgccgcgcaaccggtggtcgacggccttgccgctgccggctacaagttcgatttcctggtgtcgtccgccctgccccaatcgggtacggccgggcttcagaagtatatcgcgtcgctcgagaagttcgcaacgagccacccgggcagcatcagcgccatcgagggcctcaatgaggccaatcatcagcccttcagctacaatggcagctcgagcctcaccgccgcggctcaattccagagcgccctctatcaagcagtcaatgccaatgctgcgctcggcagcatccccgtctacaatctgtcactggcctacaacgatcctcagggctacagccagctcggcaacatgtcggcctccgtcgactacgccaacgcccacgcctatgtcagcaccagcctcaatccgagcagctcaattgcggcaactctgagcgccgtcatgactgcggcgccgggaaagcccgtggtcatcacggaaaccggctacaccacgcaagccaacacgcaatatctcggcgtcaacgagacggtgcaggccaagtcgatcctgaacaccctggtcgatgcctacaaggccggcgtgagccagacttacctctacgagctgttcgaccgcgactcctccgcaagcaataccaatccggaagccaatttcggcctgttcaactccgacggcacgcccaagctcgccgcgacggcgatccacaacctgaccaccatcctggccgacgacggcaagggcggccagcagccgaccgacccgttgaactacaccctgggcaacatgccggccacaggcaacagcatggtcctcggcaagagcaatggcgcctacgagctcgtcgtgtgggccgagccgaagctctggaacgacgccaccgacaccgagctgaccaatgcggcccagaccgtcactgtgaatctcggcgccgtgcatcacactgtgaaggtgtacgacacgctgacggggaccacggccattgccagctacaccgacgtcagcacgatcaccattcctgtcagcgatcaccccgtgatcatcgagatcgatgcgcccccgaccacgaccacgccgccggacagccggaccagcattacgggcgctgctgccgaaatcgtgccgcaactgtccgacctgagcgactcgacggcgctgcagaccatcacgctgaccgactcgcacgtcctgccggtcgcttcgaaggcgaccatggactacatcatcgcccattacggcagcgccctctccaagatccagggcggatattcgttctcggtgaccaatacggccgcgacctggaccaacacgaagacctacgattcgagcggaaagctgctctcgacatccgacaccggcctgaatgcgagcgggcagccgacgtcgaccaacgtcgtccacagcgacggctcccaggacctgatcagctacaccggcggcgtgaagacgaaattcgttcacgtcggcaccgacgccgtccgtaccacagatacctacaatacggcgggaactcttctcagcgagatcgtgcagaagccggacggctactactccacgacgctatacaccaacggcgtcaagaccgccgcctatatcaagaacgctgacggttcgcaggacaactattcctacaacgtcgtcggaaagagctttaccacccaggttcagcaccttgacgcatcagggaagattacttcggtcattcgcagccatgccgacggctcgttggattcaacccaggtctacaagaacgatggcagcagcgtgatcacgctgtatagcgcctccggagtaaagctggtcgagaccgactaccatgccgatcgcagcaaggacgtgtggacgtacaacatcaagggccagaactatacgacccagcacgacgtctatgacgcgtccggattcctcacgaccctgacgcgcctgcatgccgacggcagcctggctttcaagctaatgcagaccccggatggcaccaagacgaccaactggtacaatgccgtcggcagccttaccagcgaggtggttgaaaaggccgatggctttacatcgacgaccctctacagcaacggcgtcaagaccaaggcctatatcaagaacgccgacggcagtctggacaactatgcctacggcgtcaccggccagagctacaccacgctgattcagcacatcgatccgaccggaaaggtcacggccgtgactcgcaagcacgccgacggcacgctggattttacgcaggtcgtcaacaatgacggcagcagcgtcgccacctattatgacgcaaagggagtactgacgaagcaaagcgaaagtcacgccgatggcagtaaggacgtcttcctgtttaacatcaccggccagaactacacgaccgagcacgacatctacgatgcaaccggcttcctcaccacgctgatccgcaagcacgcagacggcagcatggcgttcaagctggtgcagagcaaggacgggatcaagacgacggactggtacgatgccaagggcgtccttaccagcgaggtgattacgaaggcggatggttacagctcgaccacgctctataccaacggactaaaaactgcggcctacatcaccaatgccgaccggagccaagacaatttcacctacaacatcaccggccagagctatgccacgcagcaccagcatctcgatccgaccggcaagacgacagaggtgacccgctggcacgctgacggcacgctcgactttacccagatcgtcggcagtgacggcggcagcgttgtgaccaactacgacgcctccggcatcaagaagatgcaaaccgactatcaccccgacggctcgagggatgtttatctttccaacattgtcggtcagaactacacgaccgagcacgacacttacgattcaacgggcttcctcacaaacatcgtgcggacccacgccgacaacagcctggcgttcaccctcgtgcagagcgtcgacggcaccaagacctcggagtggtacgacgccaaaggcgtcatcaccagcgaagtcacgaccaagaccgacggttacagttccacgactgtgtacacgggcggtatcaagactgctgcctacattaagaacgccgagggtacgcaggacaattggaactacaacgtcaaaggccagtcctacacgacccagcaccagcacctcgatgcttcgggcaatatcgtcgagatcacaaggacccacgccgacggcactctggactttacccaggtcatgaacgatgacggcagcaaactgaccgacatctataacagcgccggcatcaagacccaggagatcgccagccacgccgacggctcgagggacgtattcctgtttaacttcaacggacaggccggcatcacgcagcacgagaactacaacaccgccaatgcactgcagttcatcgatcagaccaagaccgacggcacccataacgtcacggccgttgggagcggcgtgacgatccagggcggagccggcaacgacgtgttctcggccgcgccgaattcgaccaccatcgcctatgatcacggccaggaccagatcctcaacttccaggccggcgacgccacgacccacgacgtgatccagatctcgaagctcctggccgcggactacagccacctgcagatgacgcagtcgggcacgaacgcgctcatcacgttctcggagaacgactcgatcctgctgaagaacgtctatgtcaccagcctgacgagccacgacttcgtgttcgtgtgaacgagacggtagccgtccaaccggcagcaagattgctggggcgggaccattccgccccacttcgcttttcgagcacatgcctcatcgatgagcagagagccgaaggccatttgcaatcggaagggctccatgcatttccggaccggcgcgattgcaccgcagcggcgggatctcgtcgctgatgctcgcgatcatggtcgcgctgccttatggagtcgtcgcccatgctcacctgccgatctggcaggaccgctcacagatgtacggggcaaccttcgattctcgggatcttaaggggtcggcgacgtccggtcgaagatcgacggtgcgactcttccgagcttcctgagcgggattctcctgactgtgctgttcaggctctcaagcgattatcgcaagaagccagtcgcattcgccggaatagcactgtttgccgtctcgatcatggtcctcaacttctttgccaagcccgacctcgcaatcacactgttttctcttgcgatccgggtcacagccaccggcgaaagcgccttcgcccggtttcccggctctgactggcttggccgcctcggcaacacgtcatacgcgatctacatggttcacgaagtgctgctgatcctgcttttcaagccggcgtggcactatttcggatttcaaccaagcatgtttccagtgtttgcgttggtctgctgcatcattctgacggtcgtcgccgacgtgacgtatcactacttcgagaatcccgctcgaaaattgatcaaccggcttgcgccgggcgatgcgaggtcggcccacatcccgaaggccgagccgctcgatccttcggggacccgaccagcggccaatgcgagctagagcacgatccggaaaagtgtgtagccgttttccgaaaagaccatgctcaaacacaaagcgcgatgacgattcatccttatcgcatcgcgctttaggtgtcttgcagctagattttcgacgatcgccgcactcggctcaggatttcctggcatatccgcaccacggccggccgggcgatcgcgacaacaacgacaagatataccgaagaaccgagcagcacgagcgcggcgagacgcagccatggcgacgtggccggcatcgcaacggaggcaccagccaccgcgcatgccatcaccgcagagcccgcaagtgcgggcatcagcgccgcggcatagggcctgataccgagcgacaggatccgcatcgaagctccggcggatagcggatacagcaacaaggcgcgagcgacgtagccgacagcgatcgcgataaggccaaacggcgcagcgaggatgaagattgctatgttcgagaccgcgtagatcagcgtcagccaggtttgccagtgcggtttgccgaacgccaggataacggagtgattgtagaggccgatcgtggtcaggaatccggtgaccgacatgatcgcgagcagaggcgcggccccgctccacttggacccgaagaaagcagtgatcagatccggcgccagaaccgctatgccggcgaagatcggagccgtcagcagcgacgtgtacaggacgaaggcaaccagcgtcgaacgcgatgcttcccggtcatgctggaggccagcgatggtcgcaaagaacacccggttcaacgcattcccaatcacggtactcacggcattgaccaggcgcttggccaggctgtacaagcccgcgccggcggcgccggtataccaggtaacgaaaatcagatcggaattggcattggcgaagttcgtgatccccgtcagcgccacgtagcgcgcatagctcaggagttcgacaacagcctgccggctgacccggagccgaggacgccagggcgtcaggacccaaaggctgaccagcgagatcaacgacgtcgaaacgagctgtccgaccagcgcaacgaccccgtacccctggatcgccagcccgatcccaacggccccgccaaccgatattgaagaaagcgagcggatggcgagggatcgaaacagttgattgcgcatcaaccaggcttcgtgcgtccgtgacaggccctgtacggccaccacgatgcagaaccccttgagaacgatggcaatgtccgaaagacccgaaaatcgttcgatcgcgccgctcgaggcgaacagtgcgagcgctgcaaacaaggagagacctgcgatgagccagaacgaggcagtgtaatcctcgtccttcggctcggcacgcgcctgcaccgcgatcgcgatgctctcgatcaagactgcccggcagaattcaagcgccagcgcccccgttgccacgatgccgagaatctgcggcgacagcagccgcgccatgatcatgtagatcgcgagcgtgagagcctgcccgactgcggaatcgagtgcggaccaaatgacgcccgaaacgatcgagcgcggcttgatattctcgtggcgcaattggaggcctgtcacaatttccggttaggccgactttcgtcgttgagccattggctgcaatggtccaatagtcgccttgtttacgaggacactacggcaagaaagcagctacaatccgaggcagcatgaattttcggaccaatctacgacggttgatgaacgaggtcggttgcgactttattcatcagctgccgtatccgcacgtggacttgttcttctggcgtcctgacgatggaacgataaatttcggcgactatctttcggtcgtcgtcgttgaccatctcttgcggcatttcggctatacgctcgccgacgaggtgccgcggcaaacgcgcttgttcgcgatcggctccgtgctccattacgcgcgaaatgacgatgtgatctggggcagcggcgtgaacggacgccccggccaggatgacctcaatcgccgcgtgcagaacctggacgtgcgagcggtgcgcggccctcgtacatgggagattttgcggcgccggggcatcgcggtacccgaagtgttcggggaccctgcgttgctgctccctcagctgtttccgaatcgctttcgccccaccgccaagaagccgtgggtgtttgtcccgaatttgcacgatttgagtctcatcgaccgtggcgccgatacggtggtctcaccgctgggatcatggaaccgacgaattgacgccattctcgaagcggagctggttctggcaagctcgctccacggcatcattgtcgccgaggcattcgggataccggctcgctacgtgcgcctgagcagcggagaatccgagttcaagtatcgtgactattacgagggcaccggccggtttgccgtcgagtttgcctcgagcattgacgaaggtcgcgagatgggtggggctgcgcgcctcaacttcgatcatcgtgccttgatgagtgcattcccgatcgacctctggagcggaaacagctgatatggccaagcgcctccgcgtcgcgatctacgcaccgcattttgcggaatattcctaccgtctcgcgtcgggattggctcgccattgcgacgtccggctggtgctcaaccgcaaggacgccaatcagcaatgggagctggccgatatcgccgtgacagctccgttcgaaacgagagttcgcgacctgagcctgcgccgcggtggcgcgatcggcatcccggcctcattcctcgacataatttcgtttcgtcccgacgtgattcattgtcacgaagttccggagatctacacgtccgggctgatccagcttcttcgtccgctcggcattccgctggtgttgaccgttcacgatgcgatcccgcattcggaaggcggctccggtacgtcgccgcgtgaagatgcatggcgcgggcgcatgcgcgcagccgcgtcggtcgtcaccacgcatggcaagagctgcatcgccgattttcgccgtgcctcgcctgacttcaaaggggaagcgatctccagcatgcacggcgtgctcatggttccaccggccgggggcgcggtcaccgcgccggaggccgcgcgcatcctgttttttggacggatgtgggcctacaagggcctcgacgtcttcatcgatgcgatcgacatgttggcccggcgcggtgtggcccatgaagcgatcgttgccggccgcggccccgagatgacacggctcggagcgcgcatggaggcgatgccgaccgtcaagaccatcaacgcctatattgcgcctgccgagaccggacgactgtttcagtccgcaaccgtggtcgccctgccctataaggatgcaacgcagagcggcgtgcttgcatccgcctatgggaattcccgccccgtggtcgccagtgccactggcggcattcccgacgtcgtgaccgataacgtcaacgggctgctggtcccgcccggcgatgccactgcgctggccgatgcgctcgagcgcgtgctgacgtcgaagcctctcgccgcaacgttgaccgagggcgcatggcagaccgccgtcggcatcctcaactgggatcgcatcgctgaaggactgctggggtcctatcacaagctcgccggtcgcaccgtgagctgagcgcggccggcgccctcaaaccgattgctcgatctgcggccgggagaacatgctgctgatcgcgccgtccagcagtcgccttagcctgacctcgattagctcatagctgatcgcgcttgcaaccagcgacatcaccagcccaagcccgatgaaggcggtccacagcagccagcggtcgacgccggcggcgaccagcttcaagccgatcacctgcaggggaaacagcacgaaggggtgaacgagatagaggctgtagctgatcttgccgacatattgcagcgccggtaggctcagagccctgccgaggcccgagtccggagcgagcaccatgccgaacagcagaaatccgggaatgagcccgacgaaggggtgaaacagcaccaggctcgcatacagcgccgctccgcaagcaatgcccgcgagcaagccgatgcgtcccggaatcgagatgcggaatcccgtggcactgaacagcatgccgatgcagaagaaggcggtgatcggccagtgcatcaggcaggcgatgccaagcaggatcaggggcgccgccagcaatctgccaccggtgcgccacaccgagaacgtcagcgcaaaccagatgtagaacgcccactcataggtcaatgtccaggcgttctgctgggcgatgggcaggccgagcgcgtcctgcacgaagaacagattggccgcaaaaatcccgagatagctggtgagatcgatcccgcggaagaatttgtaggccacgatcggaccgatcgcgaacagcgcaagatgcagcacgacgaacaccggcatgatgcgcagcacgcggtcgaagaagaaccgtgacagcgacccgtgccgcaccaggcttgccgggatcaggaatccgctgatcatgaagaacagctcgacgccgtgcccgccgacattgatcaccgattgcagccagggccagagcggcggcaggaagccgggatccgggatgtcgtacatccctcccttcggcatgtcgtagaaatggtccatcagcacgctcagcgcggcgatggcgcgaaggccctggaccgacggaacgaacgatccatcatgcgcggcgcccggctggtggggtgccttgatcactccgcggcaccctggatgctgagggccggttcggggacgacaggccttcttcgcgccgagcggaacctctgcccgaaggaaatgctgggcttctcgatgaaggcgaatgtcatccagctgacgaggatcgacaacaccagggtcacggccaggaagatcgaccagccgagaggtccgtcgccgaaccagacgaggcgatcgatgaagcccatcacgaacggcgacatcaggtagaccgagtagctgatgactccgacgaaagccatggggcgccaggccattcgttcgccgaacacggcaaatccgatgaagaccagcgccgcgcagacataggccgatccgatcgaatagctgtagaagaaattctcatgatacacgcctccgaacctgcggtccgacagggtgatggcgaagatcgcatacatcagagtgcagatcgtcacatggctccaccgcagctttccgccgatgacggtgtcgcggatgatcttgcccaggaacatcgccgacaggttcagcccgacctccatcaccgaggagaccgtcctgttctcgacgaagagtgcggccgcggttccgaccagcgccgccgcaacgacgatgctcaccgccgtgaagcgccggttcagcagccccatggcaaagagaatggtgcatccgacgtagaacaagagctcgatcgccagcgtccagtagaataccaagaggttcgggacgttcacgaaggtctggaacatcgtcaggttcgcgacgacctgccccagcggatagaccttcgaatcaagaaggtacatcgccacgagcccgaccacgagcgaggtccagtaggccggatacaaccgaaagaagcggctgatcgtaaagtcgcgcacgggcgtggcgctgtccggaaagctgaacggaatgacgaatccgctgacgaagaagaacaacacgacgccgaaccggccaaaattcatgtagtagccgaacagatcatggatcggccagtaatatgcgcccgtcgggtgcttttcgacgatcacctcgaatacgtgctggaccacgaccgacaacacggcaatgccgcgcagcgtgtcgatgaatgcgagccttttgtgcatcatttcgctctcacctgcctccgctcgccgccggcatatccgggcggaagccttccaatgacggcatcggcggccgcatgacgattggcacggcgtcgcctgctcgtgcggaggctgcgcgccgtgagaacacctcgctgaagctcaacgcgatgatcagcagcccggacgccgggccgtagttcaggaccgtgatcgtgaacatattgacgacgaagatcagcgtcagcttgtagacgtcggtcgtcccgaacgtcgcgcggaataccatcaccatgaatgcgacgaacgggaggccgaacatcaggtacgtgccgatatagaaattgtcgacgggaacccagaagtgcgcaagcggcgagaacagcttctgtggatagttgaagcagcccacgccgcagccggtcacgagaccaacgggcatgagctggctcaggtagacgaacggcagctgccagctgttgttgatgcggtcaacgatgctgaacagggtcgtgtgcggcactgcggcggtaccggaagccagcacgatcatgaagaagggtacgagtatcgcggcaaacgaccacagtgcaatggtccggatcgcggcgaagcgcgatctctccggaagcatccgcacgcacaccagcaagaccaggtagagcacgaggacgatcatggtcgtcttgctcgtggtcaggcgagtcacatagatcgcgatggaaccgaacacgatgcaccaagtcgtactcttacggatcgacgtaattgcgaaggacacgagtatgaagaaggcggccattgtgctttctgccgcaaagccagtgagacgctgatcgtcgccgccataggcccaccataggcggcccgcctcacgaacggcgccgaaggactcatatttgtagccgacccagggcatcaggtagaatttcgtcagcagcacgccgatcagcgagagatagaacgtcacggcaatgaccgaccgcagcttcttgtaggagcccaggctggtgtcgcagaaacagaatccgacgaacaccgggagcatcatcttgaacgacgacatcgccgcattcgtcgtgcccagcatgaaatagccgagcactagcgacagcatgatctgcaccagtacaactgcagccatgatgctgcgattgcgcaagatacaatgcacgatgaactgaaccaggcacagaagcgcaatgccatccggcgcgaaccacagcgcgtccaaatgcatgatgcttgtgtaataccgcatcacgccaccgaaggcgtcccggaccagataggccgcgagcgcgatcgcctcgatattgaggctgatcagcatcatcctgcggggctgcagcgcgaaggtgctcatgcgcggctcagttgctcagccgcgccgatcgggcgggggatggcgcaaagtccggggggcttccgaatgcatttcgcaggagcctgccgccgggaatttcgacgtagagataggtgaggtgcgaaaccgccagcacggcggccagtgaaacgacgagattcagcgtcgccggcaggcctgcccagatcgaatccagggcggcgattcgccccgctcccacgccccgcacgaaatattcagccagcagcaccacgagcgcgtgcaccatatagatggagtacgaacggcgtcccagccagaccaacggtttggccaccaggatgcgcggcaccagcagcgcatccggaaaggccagcaggctgccgaggaagaccgcgaacatcactggcgcgaggaaagtcgccgcaggattggtctccgccaatgataccaggactaagctcgcgatcatggcgacgaattgcaacgcgccctgcacggcagggtgcggcctggccggcaggcaatcgacgatcctcaccatcaacacgcccaggaaaaagccaacgaagcagcgcagaagaccgaaatccgtctgaagctcgatgcttttcttttcgagcacgaagatgatggagacaagacttccgaccgcgagcagcccggagaggacataaaaccacgacagcgagcgcatgcgcagggcaaagagaacgatcagaccaaacaccaggtaagtgtagaactcgacgctgatgctccagctcggcgcattccagctcagatagtcgatgaaccccatcgagtggagaagcacgacgttgaggccgaacgaataggcattgttcacttcgaacgccgcaggcgcggccaccaccacaccccccatgaccaggccaatgcgcagcaggcgaaagacgaggttagccagcagcatgacgatatgcagtgggtaaactcgcgccaggcgccgtatcatgaactcgcgcagcgagaaacgcgaaaagtcgttctcgacgtaactgagcgccatcaccattccgctgagaacaaagaacagatcgacaagcagccatgcactcctgaagaaggagcaattgatccaggcgttatgcggaaatgccgcaagaaaggtcggcatcagcaacagatggtggatcaccaccgaagtcgctgcgatcccccgaatactgtcgagcggcacgacgtgcgccttctcacgatgaaccaactccgtcacatcaacattccgtagccgttgcatcgcagcagtgtgtatcaggtttcgcgcgtgttcaatctttgcgatcgcgaactcgcattcgacgcatgataaccgacgataatttcaacgcttgcagactattcggacatgcgagcgccaagttgatgccacttttcgtttgaggcctgtgtacttcgggcgcaaagttcatcagccataatgattgcgagtatttgcgtgaaaagtgtgcgcgaaattcggcgctgttgcggtagcgcctagcgacgagctgattcgcctgcggcggtgctcgcacaaagatctctctcccttagcggaacaaagaggagagtgatgacttgcgtcggttttgcgacgtgcggacgcgcgaatgccttttatgttctcaagttgcaacattcctgagcgcggaatgccgttctcgcaggcattgcaaaccgttcctgtgcaaccgcagaccggcgagcgtcgcattcgctctcggcaatcccgcgccttttgcgtcgcacaacatttgacacagttgcctgccaggtttcgcttgttctccaattgcaacggaagcaaggaacacggatgggccgcggactaacacgtctccatgcgcagccgcgatggctggcaattgtcttgatcggttccgcgttgattgtgacgagcgtcgatgtctgcagcgctcagtgcgtcgaattttcggatcgcgcctcgcagcttgagctcgacgcattcgtaaagtcgccctcttcgctactggagcggatgcgcaatgacagagaaaagctgagatttcggctcgccagctacattactacggatccatcggtgttgccgtccgtgcagacgttgatctccacgtcggcctcagccgaacggtcagccattggcggcgcgctgcgatttgccgaagcgcgctgcacgtcgacgaaacctgcggcggcacgcaagatcagggatttcgcgcagcggatcggagatctccacgtgcaagcgggctattccgcagcgggagaggacagctcgggcgtccaggcccaatcgcaaggcaagcgtctggcaccgccgccccgagccggagcccttctcgagggcgaatggaagaccaagctggccaacccattcaagcccgttccccttccgaattgatcgatgattgtcaaaggcagcaaagtttcagatgtaccagcctagagaacatttccagtcggggcaacgcttcggcatcgaattcggcggagcggtgctcagcttcgagcgcgtggctgacgtgctgcggcgccagtggccgatcattgcggcttgcgtcggagcttcgttggctctggtgatggtatacctggcttcggcgcaaccgatgtatacggcgaatgcccggatcatgatggatacgcgtcaggcgcaggtgctggacaaggagagcaacaccagcagcgctttgatagataccggctatgtcgacagccaagtcgaaatcatcaactcggatgacttgatcctgtccgtcgtccgtcgcctgaaactgaccgaggacccggagttcaatggctccaatcctggcctcctctccctcattctcggcaaagtcatgtcgccgtttcgctcggacgagccggcgtcccaggagcgaatcgaacatgccgtggtgcagcaggtgcagaaaaacctcaggacggagcgcgtcctgacaacctatgtcctgtccctgagctatcgcgcgcgaaccccggacacggctgccaagatcgccaacgccatcgccaatgcgtacttggtcggcgcgctggaagcgaaatatcagtccaccaagcgggcgaccgagtggctccagcagcgcagcttggaactgagcgagcaggcaacagccagcgaccgtgccgtgcagaccttcaaagccgagaataacatcgtcggaaccagccgcggcctgatgtcggagcaacaattgtcggacctgaacagtcagctggttcaggcgcgggctgcgactgcggaagccaaggcgcgtcttgaccggatcgaggcaatctccgatcaggatctcacgcagccgacagtaacggacgccctcaacaattccgtcatcacccgcctgcgcgcgcagtttctcgacctccaggcccagtacgccgattggtccaggcgctatggcaagacccaccttgcgacagtcaatttggccaacaagatggaggagctgcgcaagaacatcgccgacgagctgcgtcggatcggagacgcctatcgcagcgactacgagatcgcaaagagccgagaggcatcgctcgacaagagcgtaaaggaactcgttgcccaggcaggccacactggccaggcggaggtcaagctgcgcgatctcgaaagtgccgccgatacttatcgtaatctctacaacaatttcctcgaaaagctgcagagcgccacccagaatcagagcttcccgctcagcgaggcgcgtctgatcagcaccgccaccaaaccggaccgcaagagctcgccgcgcaccgtcctcgcgctggtgggcggcctcgtcggcggtctctgtctcggtttaggcgtcgcatttgcgcgcgagctgctgagcgacgtgctgaggacccccggagaagtcgaagacgagctcggcgtgaagtgcctcggcgtgctgcccgatattcgctcgccaacgaaggccagcttatccgatctgtcccgctacgtcgtagatcatccattctcgcggtttgccgagacgttgcgcaacatcaaggtgtcgatcgacgtcgcgcgcctgacccgcgagatcaaggtgatcggcatcgtctcttcccttcccaaggaaggaaaaacgacggtcgcagccaatttcgcacaattggtcgccctcactgggcaccgcacggttctgatcgacggcgatctgcacacgcgctcgctgacccgagagctcgcgcccgatgccaaaagcggacttgtggaggcactcaacgaccccgcgagccttggctatcacgtccaacggagcaaggagacgggtctggatttccttccctccgtcgtggcttctcgcatggtgaattcggccgatgtcatcggatcgaaggcgatggccgagctgctcaagatgttgagagagcactatgaatatatcgtgatcgacctggccccggtgatgccggtagcggactcgaaggctgtcagcctgctgatcgatgccatggtctacgtcatcgaatggggccagacgacacgaagcgctcttcaggagtcggtttccgggtcggaagtcctgcaaaagaagctgctcggcgccgtgctcaaccgcgccaacccaaagatgctcaagcgtatcgaggcctataagggtaagcaccacaacagctattacgtcgagcacgcctagtcttgggcggaaggagttcggccccacgttggatcgccgcattggaccggggagttgcaccgaggtggggcattcccgcgcaactgtggtgaggaaactcggcccttcgggcgagctcctgcattcaaccccttctcatcgtgctcatgttctccgggccgcagccggcagcgggccgacataacggatcgctggcgcgcgtaacgatcgtgaacagttccgctgctcggtcggcttacgttcaccgtattcgtccggaatccacaacttgcagttattttgctctaccaaacgcaaggattggcgtagacgatggcggccagaacagccgtactttggaccatcggtcgacaccagacacgtccggcgcttgatgcctccacaatgccgaaactttaggcatctttctttctcggtcctgcgccgctaatctcggctcatactggtggtagttcctttccggtggactcggatgctgatcgtcctcacgattctaattatttgggttctgctcaatattcttttcgtggtgatcgtggttcctccacgcaagccgcttcggcagcctgtggcgacgacgctctcgccggcgcccatcgacccgagccggcgcgaaatcgaccaggacgagcccttctcgatccgccacgtcatcgtctccgtcgccatgggagcgttcttcgtgctcgtaccgccgctgctcgccctgcgcgatgcgatcatgcggctcttcggcaggccgccgcggaatggaacctgaggcttcagggccggggagttccactcaccgagagtgagcgactagtacgcttcctggaacatcaccgcagacgctgtgcgggccatgatcttgagatcgagccagacgctccagttgctgacgtaccagacgtcgtactcgacccgcttctccatcagatcgatcgtcggcgtttcgcccctgaatccgtttacctgcgcccagcctgtcagacccggcttcatgtgatggcggtagacatacttgctgatgagctcgtcatagtaattgtcatgggcgagcgcgtgtgggcgtggtccaaccagtgacatgtctccacgcagcacgttccagagctgcggcagctcgtcgatgctcgtcatgcgaaggaaacgcccgatctttgtgacccgggcatccctcttggtcgcctgcgtcaccgtctcgccgttctcgctgacggtcatcgtccgaaatttccagatctcgaacggcctgccgttgaagccacgacgcgactgccggaatatgacggtccccggggaatccagcttgatcagcacggccacagtcagcagaagcggcgtcagcatcacgagcgcgaacagagcgacgccgacatcgagacagcgcttctgcaaccgctcgagaatggtgagcggcggccgctggatctcgaccgctacggttccgctgaccggcagaaagggacgggtcacgagatcggcaacggagtcgtctggcagcaggcgaatgggctgcgggacggcgcgcaaatagggtcccagcttacgcagcatcggcaactcgttccagtcgatcgcgagcagatattcgtcgacatcagccgatcgcgactgacggatgacgtcgcgaatctgtcgttcccactggccatcctcccggtctgctccgagcacgaaatggcgcatgacgtcgaagccattcctccgcaaatccttgaagcggctggaggtgaagtcgagcggcttcagactgagcaggatcaccttgcgatcgaccagccggcttctcgcaaaagtggtaccgaacacggcctgccaggcgaagcgcaggctgatcaagccgagcccgccgatcacggcgaagacgatgacggtgccgcgcgatagattgtccgtcgatttcagcaggaaggcggcaacggcaaggatcgtgagtgatgtcagccaaatgaacaccgccattcgaagctgccatacgacgttgagcagacggtacgtggaatagacgtcccggaaataggcgatcccgacgaacaccacgccgacaaacaaccccgctcccgccgacgcgctgtcggaaggcgaaccgacgaccacaccatacagcgaagcccccgccacataacttaacaggatcaacagaaagtcggcggcgatgacgacgatctgaaagggcctctgaagagcgctgccgcgcgcggatgacagcgcatgagcactttcagaaccataagttgcaacagccattctaacctctacttatcgagagagtgcctgacgctcatcgtgatgctgaagactcgtcaattcccgcacggaaagtgttgattgatcgcagcgacattgtggcgccgcacgcaaaacttttgcggcgcacggaagatgcgccatgttgaaatgcgaagtgaaaattcgaacgctgaaaatgtcgtcacagtgctgacatatgagcgaaccgagtgccctattttgaatcaagttccgtatccacgcgacgcaacgccgttgcttaagcgctgtttcgctcaactatcaggcgcggcgttgctctcgcaaagagcagatcagttgatcacgagaatctcttgggacttctatctgtgggtgcacctgcctccttttcatgagtcatgcggacttgcggcacaccccgggtcagcgatgcaatttccgcggaccgatttcgttccgccagtccagcacgagacgagtaggcagaaaattccgcgcccttcttttggcgtgatcaggtcggagaacaacgacgcggccccaccgaattcgcgttgttcgtgttggatggaagctctccggtgccggcgacttggggaatttttcgatcacccgaccgattgagcgtcatgagatccctcgcgcgaccacgcccgcccattcccaaaccgcaattgccggacggagtgcgcatctatgccatctcggatatccacggctgcgcacatttgctccagcccatgctgcgggtgatcgacgccgacgtcgagcgcagccggccgcgccatgctgtcgaagtcttcatgggcgactacatcgatcgcggcccggatacgcgctccaccctcgacatcctggtcgagcggagccgccggggaaacgcggttttcctcaagggcaatcacgaggcctttctggtgagggtgttcgaagacccttcactgttcgaggactggattgctttcggcgggacccagacattgatgtcctacgggcttgccccgccggatctcaagcgcgacgagccggcatcgatcctccgcgacctcattcgcgcaatgccgaccgagcatctggaattcctggacaatctgaggctgagcttcagttgcggagacttcttcttcgtccacgccggcgttcgccccggcgttccattggccgagcaaacggagcgcgatctgctctggattcgcgaggaattcctgcaaagcgaggagcagttcggcaagtatattgtccacggtcatacgccggtccgcagtgcggagttcctggccaaccgcgtcaacatcgacaccggcgcctatgcgaccggcaacctcaccctgatgagcatccagggaagccgcatgctcgccgtgtgacacggccgcgcccgcacggcagctgacgcgagaccgtttcacgggatggaaggaggtccgcgctccttgccgccgctacctgggacgacctatgactccttcgatttcgcgtggagaggctcccgagagatccaccggcgcgtgctcacgtagtggtcactcggtcgggatcgccgcgtggtctacttcgggtcctgctggctggacaagaaggctgaataagccaatcgtactccatccttcagcgcggtttgggcccgccagccgagcttagcgaggcggctaacgtcgagcagcttgcgcggcgtgccgtcgggacgcgaggtgtcgaaagagatctcgccatcataacctacaacgtctgcgacgacacgcgcgaattcggcaatcgtgatctcctcgcctgtgccgatattgatcagttccgcactcgaatagatcttcatcagatgtatgcaggcatccgccagatcatcgacatagaggaattcgcgccgcggcctccctgtaccccagacaaggacgctcccggcgcccgtcagctttgcctcatgaaagcgacggatcagggccgcaaccacatgactgtactcgggatggtaattgtcgccgggaccatagagattggtcggcatcacgctaatgaagtcacatccatattggctgcgataggcctcgaccatcttgataccggcgattttggcgatcgcgtatggttcgttggtcggctcgagagcaccggtcagcatcgagtcctcgcgcagaggctgaagcgccagcttcggatagatgcaagaggagcccaagaacatcagcttctcggcgccgttaacgtgcgcggcatgaatcacgttcgccgcgatcgcgatgttgtcgtagataaactcggcgcgtagcgtattgttggcgactatgccgccgaccttggcggcggcgaggaagacgacctgcggccgtgttttcgcgaaccagtcgaacacggcggcttggtcgcggaggtcgagctcgtgccggtcaaccgtgacgagccgcgcatcttcctgatggagtcggcgcacgagagcgctgccgaccataccgcgatggccggccacatagacgctcttgcctttcagttcaaaccgtgcgtttgccacgggccgcgtcccgctttgcctctgccaggtcgctcgccaccatctcctcgaccagttggtcgaacgtccgcttcggcttccaaccgagcttctcgcgcgccttgctggcgtctccgacgaggagatcgacctcggtcggccggaaatatgtgggatcgatccgtaccacgattttgccgctcttcacgtcaacgccggtctcatcgatcccctcgccgcgccattcgatacggcgctcgatctgcgcgaacgagagctccaccatctcccgcacggagcgcatctcgccggttgcgagcacgaagtcgtcggccttgtcggcctggagtatcatgtgcatgccctcgacatagtcgcgcgcatgaccccagtcgcgtttggcggacaggttaccaagatagagcgtgtcctcgagaccgacctcgatgcgggcgacgccgcgggtgatcttgcgggtcacgaacgtctcgccgcgtaccgggctctcatgattgaacaagatgccattagacgcgaacatcccataggcttcacggtaattaaccgtgatccaatagccgtagagctttgcgacgccgtatggcgagcgaggatagaacggcgtcgtctccttctgcgggatttcttgcacgaggccgtagagctcggaggtcgaggcctggtagaaccgcgtctccttctccatgccgaggatgcggatcgcctcgagtagccgcagcacgccgacagcatcagcgttagcggtgtattccggactctcgaaactgacggcgacgtgactctgggcggccagattgtagatctcggtcgggcggatctgctgcaccaggcggatcaaattggtcgagtccgtcatgtcgccatagtgcatcagaaacgggacgttcccaacatgcgggtcctggtacagatgatcgacgcgagcggtattgaacgaagacgagcgccgcttgatgccatgcacggtatagccgagcgacagcagatgttcgacgagataggcgccgtcctgccccgtaacccccgtaatgagcgcgatacgctcagccatgactaacgtctcacctttcgaccagaactgggattagcgaccgcaaactcgatacgattctcttgatgatgcctgtagcgttgggccaaccgcacactgcctttcttggccatatcggccgcccgggtcaacccgaacgtgactgagactgcggcccattgggtcttccgacggccgggacagtccaatacccgagatctgcaggccccctcgctcggtcgcaatcgctcaatcaaaggccgccccgcatcatcggccaggccggccggcccccatttacccggcaagccacggcgagacgggccttgccgcccccgttgctgatgatcggagcgatacgctcgaccctcacctaccctggacaagcagcggcacgcgtcgcgggcctatttggctgtgggtcgaattcggtcactcttgccgctacaactcgtgcagttgcaccgtcctatgggttatgcgaccaatatcttggaaatccggcgcgatttggcctgcgctcctgctttgatctgcgtagcgtcgctttcgcctacagagcaccgtccgattgcaacgacagagagccaagcaatctcgcagcacttcacctggttctcgggctgttgttcgtaccgcctgtccaagcgtcgcgttggggcccgttcagcagctgacgcaggatcaacacgcacggttggctgatgccctggaaaagctgtgggcgggttggtcggctgctgtcgtgggaggagcggggcggcccgtctgaatgacagttcgaaataaatgggcagtcagcctgatttaaacagacttgcggaacaaaattgatcacgcgctgttgattggattgaatacccaaagcttcgtacgcggcgcagccgtgtgcgcacccagacggtctcatctttttgaaagccatttaccgcccgatgggcgacagttcgaatttcggatgcgacggatggtgctgaaagaacctgttccagattctgatctgcttctcttgatgtcagaaataatttccttgcgggaacaggtggcgcaagccgaactgcgggcccatcaactcaaacgggatgccgcgcggcgagcgtccgccatgtcgacaaaacgaggggcacagaagcgccgatgaagttgggcgttcaggtctcggggtgactaccctgccgcacggaaatcggccctcccaggcgctcaaaccgatgcgacctgaggcagtcccgattcttcgattcatcaattgacggcctcagaatatatctgtaataaatacaatataatatagtattaaatgcgtgagactcgcctatgatcagaacgtgcttcgctgccgccctgacgggactgattgctgctaccacagcccaagcggctacgattccataccagaaccaaggtacggaaaatccgattacttacacgttcgttgcgaactccactggttcattgctcgcgtacttttatgggtcaggagccgctttcagcgagaacctgggcttgctcgtcaacggccaggacgatcggggtacggctctgaacaaccacaccagtcagtacggcacgatgcacaatttcggccaggtgaacgccggtgatatcctggtcttctacatcgacgtcaagacgacggggcatacctactactctgacatttcggagaatagtgatggcgtgaaccacgtctactcgacagcattcgatggcgacgggaagattccgacgggaacctatgttggcttcgaggatctcagcctgcatcagaccgggtggacggatcacaactacaccgacgagcagttcgttttcacggtcgcggccgtgcctgaaccttcgacttgggcaatgatgatcctcgggttcgccggcgttggtctccttgcatatcgtcgccgcaatttgctgccgaccgccgcctagaccagccggctccccgaactcctttcgagagaaggtctgcgaagcgacctttttgtccgccagaaccacctttctgagggatgcaacacaagcgatgacaagggttgaaactaggactaagaatccagtcctgcccataaaatgaatatcgtctcctattatcatttgatcgctggagagtgacatgctgacgaggtatttcgtatggctcgccgcgctggaattcttgcgccgccgacctcaagaaggagaaagaggaagcacgccgaatagcaggcatctcgaacaccgcgagatgcagacctcgatctaattccaaacacgcttgaaatgaagatcggtcgttttagcgagccgaagcgaaaaagaaggcgcgtacagcttgtcatcgttgtcgcgcgttaaggcgaggccgcgatggccaaaagggcgggcgagcgtgtggttcagactgccgtcgcctctcacggatggcgaagacggatccgacgatgtccggggaaacttcctgggcctgagcgatcttgatcagggaggtcctagttcaccaatcggcctcgtactgcaatctcgaaattggaaacacaggactcgatactacgggccggaccgtcgtcgttcagatcttgagctacgtagcgaaggcgcgcatgggaccttccctcgatttcgtcgaggtcgctcgcaatcttctcaagagcctcctgaaggcgtcgcagatgagaaaggtgcatcgcggcatgacccatcagatctctccccatagtaggcccgacgaggattgagcgtaaccggtatgagctcccac

SEQ ID NO: 138 - DNA, 3060 bp, Bradyrhizobium colbertium
taaccaggggccgtcaccggacgcgtactgctaacctggcttctgtgagtgaggttgtaacgcaggactccacgatgacatcggcgcaagtagatagttccgggttctcaagtatgaagatgagcgatgactgccatcctgaattgctactcgcggtgttgttgtgaagcgtagttccagagagaatgctcgctcagatcggcgcggagaaagagaccaatcccatatcaagcatatcaagccagtcacgccagcggtaaccaaccgccttggtctgatcgacggtcggtaggccgcacacctgcaacatgctgcgctagcaaatgaggacgcacctcggaccaaatcacctccatgatctcacagaagcttcggcgcctatcaaccagctccgtccgcctgttctcgggtgcaatcttgtccaaaggtgcgataaacctaatgcgatccaagaaaggcggatggcttttccgtggttccggaacgtcgctgcccgtcgccaacaacgcctcagcgcgtcgaactagatcaagcgtacccaatatcagcacggcgccgactccggcttccgcatagatattgccggccgcgtcgctcatcgaagcgagcatcgagatcgtttgcccaaacacgtctgcgtcatgttcctgaccgaacttatcttcactctcgtttgtcgattccacgaccccatgctttaggacatgatgaccgtactcgtgtgctattgaaaatagctctatgcttcgcaaaagctgcgttctaatggttccttcgataggcgtgaaagttggtgtactcagatcaggcggatgcctggatgccccaaacacttccaaaagctcgatccacagtcgtagtatgtctggctctgcctgaagcttagcttggatggacgacggacgattgtctacaatccagttgttaccgtgctttgaatagaccaaactcttggccgtcgcctttgccactgcattgcagaaattgaagaagggcagagataggccgatcatgctcgcgtcggttgtcattacaggcgactggttggcaactagcccaaatcctggagtgacgccaaacaccaccccattccttagggggattcggaatttggtgcagatagattcgatttctttgatcacgcggttcatgatgtgcagtgcatgaggatcatcgtactccgatcctagcgacacatcattgaggctttctctgtattctcgaatgaaatcgggcagttcgtcagtagtagcgccgccagcaatggccgcccgaaccattagttcttcattgttgagaagccactcgatatgttttgacgggtcgatggcatctacgccagctttgatcgcctctctcttttgccgctctcgacgatactcctcggcccggtctctttcttcttgtgaaacttggtcagttttcggaaggtcaccagtcatttgcgaatcctatccagctacggtcttagcgaaggagcagggttcgaccttcagcttaaggcacatttgttgcccataggctcacgaacttcaacagtgccgtcgctcggatgcatcccgtcagataatctcgccttcagcatcgtcgagttctcgctagtcggatcatttacccgttggtgctcgatccggtcgggggtactaagaaagcggatcgtcttcatccggctctggtttgcctttctcgacaagttcttcgaggagatcgtgatcgtcgtcctttaggcctccaccgtatttgtccaacagcttcgcataaaacctatgaacgtccgtatcgtcgatgatccaaccgacttgattgttctgccccggaattttaatgagccgctcgacctgagcaattgtgaattgatcgaatgtatcgagcttcccgatatgcacgtgcgttgacgcgaaactgccgctattactcagactgttaatggcgagatctgcttcaacctgactcgcgatcttaatgtcggggaagcagtctttgaagaagtcagagatcttcgaatagtagatcagagacgacttcttccgactttcccattcgtcccgaaggaactcattgaaaacgccttcggataactgagatcgataatctttatcctctgacacaaagtagagagcgttccccttatctactgtagccaacaaggtttcccaattcacagcgtccccaaggctctcgttctttccgggtggattgcccagccgcacgcgcctcatcgcgttcaaatagtcatcgttatcgaacctcggcttgttcgccgtcttgaatagcccagtgacgatctcatccgccttaagagaagtatctttcgcatcagccatgatcttgctgacgagctcagcatgcagcttgtcggccttcttcagcaacgcgcgaagttcattgtattcatcgtagtcctttgagaaagccgggaacgacgcgttaaatcttgcttccctcagcttcttcatggcatcggagattttgccaccgcgattccgccaaaactcgtcctccacttgcttcggaacaatgagatcgatctctttgtttttaacgagtgcgacgagcttcttcagctcctcgatgtcctcgctcgtcaggtgataaaatgaaagcaggacgttggtatctataaaaagcgtgatcatgtgccgaatcgttgctccggctgaagtgaacggcaacggcgagctttattcaagggctcccgcagaggtttagtgtctaagagaggctggggtccttccctgcacgcgcatcggcgtgccatagagcgcgcagctaaccgccccggaacgtttcgctgcctcttccttgctcggctaatatgatctgagcaagcgaacgccatgctggtgggcgtgcgatttgcatgcctgttccggttgttttgcgcggctggggtcacgttcccatgcaccccgttagcgaaatgccctctcgaacaggagcgcgcctgcaacttgccgctgaaggggaacagcacaggcgcaatcttcgtcgcggccgcagagtagaccggaatacccacaatcggggcaagcgttctcgtcgctcggctacatttgccac

SEQ ID NO: 139 - DNA, 17143 bp, Bradyrhizobium colbertium
cccgtcatcacccactttcccgcatagctcgcggagagtccccctcacccggattgcatcttctatgcaatccgacctctccccgcacgcggggagaggtgaagaaaggcaagctacttcgcaacgaaaccggcttgcgtcatcagcgacttgttcagcgcatcgtcctcctcgaggaattgcaccatgtccttgccggtgaggaagatcggcttcaacgcctgcttttccatgtactccttgtactcggcggtctgcgtcaccttgtggaagagatcgacgtagaacgcctgctgctccggcgtaaccttgccgggcaggaacatcgcgcgcagcatcagatattgcacgtcgacgccctcttccttgcaggtgggaatgtcggcccaggactgggtatcggtcaccttgctggtgtaggaaatgcgttccttgtcgaacacgcagagcggccgcacctgaccggcgcgccagacttccagattctcggacgggttgttgacgttggcctgggtgtggttgccgaccagctgggtggcggcctcgccgccggacttgtagggcagataagagaatttcgcgcccgtcttctgctccaggaagacggtcagcacatggtcctcgcgcttcgagccggtgccgcccatcttgaacggcgagcttgccgccttcgcggctgcgacaaattccttcaccgtctttggaccggcgctgttgtcccacagcacgaattggtcgagcgcgaccaccgacaccggcgtcagctcgcgccagttgaacgggatcttcgccgacagcggcagcatgtagatcagtgaataggcgatcagcaccttgttcggatcgccttcgctcgacttcatgtacatcagcgcttccgcgcccgaggcgccgcccttgagcgagacgaccatcggctgcttcatcagattgttcttctggatcgcggcctgcatcatccgcgccatctggtcggaggcgccccccgcgcccgccgcgaccacgatctcgaccggcttggtcggctcccagccggcgaaggccggcgtgctcaacaacagcgccgtcgcggcgccgacggccttcactggaattcgcacgagtttcgtcccctgatgttttttgagtttgtagttcggtagcttctatccctgcattgtgcggacttataccgacgagttcaagcagaccggcaattcaagccatatgactttcggctgaccaagcagaaagccgacaagactctttacctgcccttccagaccggcgcgcgcttgttgaggaaggcatccatcccctcgcgaaaatcttcgctcatataggccttcaggatcaggtcctcgccctcctcgcgcgacagcgtgcggcggatgcggcgcaccgcttccttggtcgcttccagcgtgagcggcgcgtggctggcgacgagcttcgccgtgtcgtcggcgcggcgctgtagcgtctcgacgtcgggcacgacctcattgagcaggccgagagccagcgcttcctgcgcctcgacgaggcgcgccttgaagatcagatccttggtacgggcaggaccaaccagcgcgacgacgcggctgatgttggacatcgacaggcagttgccgagcgtgcgcgcgatcggaaagcccatccgcgtcgtctcggtgccgatgcgaagatcgcagcaggcggcaatgccggcaccgccgccggtgcaggcgccggcaatggccgcgatcaccggcacacggcactgctcgagcgtgccgagcacgcggtcgatccgcgcctcgtaatcgagcgcatcctgcgcggtcttgaaggcacggaactgcgagatgtcggtgccggaggcaaacgccttgtcgcccgcgccggtcaggatcagcgccttgatcgaccgatcggcgttgatttccaggcagatatccgccatgcgatcgtacatggcgaaggtcatcgcgttgcgcgcctgcgggcgattgaaggtgatccgcgcgatgccgtcctggacggagtagagcagatcttcgttggtcgtcggtgcgttcatcgcgctctcttcttctctgactggtcttctctgactggttcaggcgtcgagccttcaagcggctcgcgcctctaggctaagcaacttgggccttcgtcatcggcaaaacgtcgcgtcccttcagcacatccatggccgccagcacgccgccgctccgatgcgggatcttggcgaggtcgagccccatctcgacgccggcgagcgtacccatcagcatcagatcgttgaaatggccgatatggccgatgcggaacaccttgcccttgaccttgttcaggcccgtgccgagcgacatgtcgaagttttcaagcactaccttgcggaaggcgtcggcgtcgtgtccttccggcacgcgcacaccggtcagcgccggggaatgcgcggcgggatcggcgcattgcgtctccaggccccagaccttgaccgcggcgcgcgtcgccgcgctgtggcgcttgtggcgggaccagacgttctccaggccctcttcttccagcatcttgaccgcttcgcgcaggccgtacagcaggttggtggcgggcgtataggggaaggtgccgagcttgttgaagttgatgacctcctgccagtcccaataggagcgcatgcccggattggccttggcaacgctgagcgccttctcggagatcgcgttgaagccgaggccgggaggcagcatcaggcccttctgggaacccgcgaccgagacgtcgatgccccaggcgtcgtgctcgtattccatcgagccgagtcccgagatggtgtcgaccatcagcagcgcaggatgcttgatgcgatcgagcagcttgcgcacctccagcggcggcgtcacgcaaccggtcgaggtctcgttgtgaacgacgcagaccgccttgatcgcgtgctgcttgtccgcagccaggcgcgtctcgatctcggcgaggtcggcgccatggcgccaatcgctcgggatgaagtcgacgtcgagcttgaacttgtcggcaatgccgcgccacaacacggcgaactggccggtctcgcacatcaggactttgtcacccggcgaaaacacgttgaccatcgccgcttcccaggcgccggtgccggacgaggggaagatgatcacgggctgcttggtgcggaacacgcgctgcatcgcggcgaggacggcgaaaccgagttcggcgaactccggaccgcgatggtccaaggtcggcatgtccatcgcccgcagcacccgatcgggtacgttggtcggtcctggaatctgtaggaaatgccttccagtatgcacggtcatcggcgtccttcccggtctttgaggctgtcttggctctagcgtcggcacgctcgatctgagggctccggcgagccgttcgcatatcattattcgccgggcttgtccctcgcccgcctagctccgtcaatgcagaacaagcagggcttgcttgccaagggccgtgacgggaggcaagacggtgccggcgaacaagcgaaagtggaccatggcggcggaagtggctggaaaattgccgaaatcggcccagaaggacggcctggcggcgcgtctagcccgggaaatcaccggtgacgtcctgttcgacccctacagccgcggccgctacgccaccgatgcctcgttctaccagatcatgccggccggcgtggtggtgccgcgcagcatggacgaggcactgcgggcgctggcgatcgcccgcgatcaggggctgaaggtcaccccgcggggcggcggcacctcgcaatgcggccagaccgtcaacgacgggctggtaatcgatctttccaagcacctgaaccggatcctgtcgctcgatgtcgagggccagacctgcgtggtcgagccgggaatcgtgctcgacgagctcaaccggcagctcaaaaggcacgggctgtggtttccggtcgacgtctccacggcctcgcgcgcgaccatcggcggcatggccggcaacaattcctgcggcgggcgcagcctgcgctacggaaccatgcgggacaacacgctgtcgatcgaggccgcgctcgccgacggcacgctgagccgcttcggcgaggtttcacgcgatctttcccttgtcgaggtcatggacagcacccgcgcgctgttccgcgacatgctcgatctcggcgcacgcgaagccgaggagatctccgcacgcttccccaaggtgcagcgccgggtcggcggctacaatctcgatgcgctggtgccgcgcaacgccccgaataacatggcccatctgttggtcggctccgaaggcaccctcgccttcaccaccaaggtcgagctgaaactgtggcccgtgatccgcaacaaggcgcttggcgtctgccatttcggcagcttctacgaggcgatggacgcggcgcagcatctggtgaagctaaaaccgatcgccgtcgagctggtcgaccgcaccatgatcgcactcggccgcgacatcgcgatgttcgcacccgttatttccgcagcgatcaagggcgatccggacgcggtgctggtggtggagttcgccgaagaggaccaggcggataatctcgtgcgactcaaacagctcggcgagctgatgggcgatctcggcttcggctggaacaacgacacgcgcaaatggggtggcgtggtcgagatcgtcgagccggcgctgcagagcggcattgccgattttcgcgccgcggggctcaacgtcatgatgtcgatgaagcaggagggcaagccggtctccttcgtcgaggactgcgcggtgccgttgccgcatctcgccgactacaccgcccgcctgaacgaggtgtttgccaaacatggcaccagcggcacaatgtatgcgcacgcctccgaaggctgcctgcacgttcgccccgtgctgaacctgaagctggacaaggacgtcaaggcgatgcgcgcgattgccgaagaggcgttcgcgctggtgcgcgagtacaagggctcgcattccggcgaacatggcgatgggctggtgcgctcggaatttcacgagagcatgttcggcgagcgcctcgtcgccgacttcaagtacgtgaagcagcgcttcgatcccgagggcgtcctcaatcccggcaagatcgtcgatgcgccgaggatggacgaccgctcgctgttccggttcaagcccgattatcgcgtgagcgagctgagaacagagctcgattggtccgcttatcccggcgcggacggcggcttccagggcgcggtcgagatgtgcaacaacaacggcgcctgccgcaagctcgaaggcggcgtgatgtgcccatcctatcgtgcgacgcacaacgagaaggatgtcacgcgagggcgtgcgaacacgctgcggctcgcgatctccggtcagctcggccccgatgcgctttcctccgacgagatgatggagaccttaaaactttgcgtctcgtgcaaggcctgccgccacgaatgcccgaccggtgtcgacatggccaagatgaagatcgaggtgctcgccgcacgcgcgcggtcccatggcctgacgttgcgcgaccgactggtcgcgtacctgccgcgctatgccggcctcgcctcgcgcttcgcgccgttggcgaatctgcgcaataacagcccgctcttgcgaaggttgttggagcggattgcgggcatcagcgcgcgccgcgctctccccgccttccgcagcgatgtgttcgcatcgccggccgacagcgtcgggcctgagggcggccgcgaggtcgttctgttcgccgatacgttcaaccgcatctatgagcgcgagaatctcgacgccgcgctgcgcgtgctcacggccggcggctatcgcgtgcacctgccgaagcaggcaagcggcaccaggccgctctgctgcggccgcaccttcctgtccgcgggactcgtctctgaagcgagggccgaactggatcggctcgtgaccgcgttcgcgcccttcgccgcgcggggcgtgccgatcgtggggttggagccgagctgcctcttgacgctgcgggacgagctcgcttcgctgcgcaaggacgaccaagccaaggctgtcggcgctcacgcgctgaccttcgaggaatttctggtgcaggaagccggagctggccggctgcagctcccgctcggcaccatcgccaacaaagccatcgtgcacggccattgtcaccaaaaatcgttcgacgccttcaagccggtcgagcaggtgctgcgcctcgtcccgggcctcaaggtcgaaaccatcgaatcaagctgctgcggcatggccggcgcgttcggctacggcgccgacacctatgacgcctcgatcgagatggccgagctgtcgctgctgccggccgtgcggcgcgcggaccagacgacgctggtcgtcgccgacggcacctcgtgccgtcaccagattcatgacggcaccggacgcgaggcacttcacgtcgcccgcgtgctcgcgatgagcctcgaccgcgccgaaacccattccacctctcaagctgcaaaggaagccagcaatgactgacctcacgctcgataccgctcgcaagatccttgatgccgccttcgcgaaggccggtgagctcaagctcaagccgctggtcgtcaccatcctggacgcgcggggcgtgctcaagctcgcagccgcgcaggacggcaccagcctgatgcgcgccgagatcgcccacggcaaggcctatggcgcgctcgccatgggcatgggttcgcgggccctgttccagcgcgcgcaggagcaggcgtatttcatcgatgccgtgaacacgattgcaagaggcgcgctggtgccggtccccggcggcgtgctgatcatggacggcgcgaccctgctcggcgcggtcggcgtctccggcgatacgtccgacaatgacgaggcctgcgcagtggccgggatcgaggccgcggggctgaaggccaacgcgggctgagcggggtcgacacgacgatctcgccatcgaacggcggctcccgaccaaaattgaaataagtgcaaagggccggtggccggacgattcggtacgccgcggcctcacaagtcaatcagcgctggcggcgactaccgagtggcctccgtgtatttggagcgttgctcaagcgaccggttggagacatccgaccgggatttcagaaactcagggcagtgctgattgtcaccgtcccggggggtttcggcccatgcgggcgctttggcttccgccgaccgccgtgcgaaacgtgccttgagatacgaccgacggctgaatatcgggcgcaggcagggcggcggagtttctcggccccgttagccccgcatcgcgcaggcacaatacagtgcgatcggaatttttctggtgaagacagatacttgcgagggtctccccgccctcagtgaccgcatccccctgaaccgatcatccttgctctacccatggcgcatttcgctccagcagacggcaggcctgctgcagggcggttgtgatctcgtctcgttctagcgacgggtacttcgcacgcacgaactcgtcgatcgacgtgtcggccagcagggcaaagacgggccccggcgacacgcgcgtgccccgaaagaccggtttgccacccatgatgccggagtgccgcacgatgacgggctcgtccgccgagatgttgccggcgacggtatcaatgatagcgatccgggcgagccactcgaggggggattcgccggccttgctctggctgcccctgatgcggcgcatcattcccggcgagacgagatgaaccccgcatccaaggatatccgccatcgctgccttggcggcgaacatctgggcggagtttccgcggaggacgagcagcaattcgccatcgcacatctctgcatccagcagtctcatgacattatctcgcacaaataacttccaaatgatcctcagcttgctgatgccggccgtcgcagcgccctctgcggaccattgttgatggcgaaggtctgcgacgcgggggagcagtccgcgggcgcgtcgacgagacagatgttgacgacggtcatttcaatttcgcgctgcccgctgatcgcgctcgcgcaggaccgcctccaccatccggcgcagccgccgcatcgagccgccgcgccaactctgcccgatcgcggcgcgctcgacgccgtccagcggcggcacccaggccgcatcgaggccacgctcccgtgcgaggtcatccagcacagccggcagcagcgcgtcgaggtcgtcggctgacggtttcgggaacatcacgacgcgaaagcggtcgcggatcggcgagggcaacggctcgatgctattggcagttgcgacgtaggagacctgcgagacgtcgagggtcgtctgaagtgccggatcaggatagcgggcgctggtctcaacttccaagaagccgagcaggcaatcccacaagcggccgtagtccgaccgcgtgcccgccttttccagttcgtcaatgagcaccagcgggtttccaattttacctcgcgcaattgcgagaaagggatggcagggttcgaccgaatcccagcgccgatcggtgccgccaaacaccgcgccatcggagcgcgaggcgtcctcccgccacacactgacgccgaggatttcgccgagccgacgggcgaatctgcttttgccggcgccgggatcaccaacaagcaacagcggccgcaggcgaacggtcgcgcggccgacaaggtcggccagcgcgaagtcgatcacgttcagtgcatagggaaactcgaatgcaagcgcgttgcggaccctaagcagcggcggcgcctcgaccagcggcaggggcgtattgatgacgtgcgcgagtggtttgagaatttccttcagcttgggattcatcatctcgctcttctcgaggtgggccacgatgacgtggccggcgggaatggcttccgcggtcgccgccggcgtcacttgcaaggtggctgccgtttcctgctcttcggcctcccgttttttccggtgctcttccgctagcttccgccggactgccgccttcgcggcagtgacacgctgctccgcaatgcggcggccaagataggccgcattcgtcgccgccgacgcccttctggacagcatgccggtgcaggccggcagcgctgcccagccgaacgtgaatccctcgagatcgcagcagagctcctgctccacatgcctggcgctcgcataaaaagcctggactagcgccttgccgacccttcggtgctcctcgatatagtcggaaccatgcggcgtcggcagcgacagcagccggacgcagtcggccaggctgcgcaagttcggctggtcctgagcgaccgcacgatggtcgagctcggccgccaactctaatgcgctgtcaagcgtgcgcgcgaccgcccaagcgacggtgtgcggcaattgcgggcacagctcatggatctctgctatcagccgctcgatgacgtgctggctaccatcggtgaccagcatggcatagcgcagaaggcgcggtactcccttcaggcgctcgtcacagtcggcggaatccgccgccgcgcctgtcgagacggcgttttccacggcacccggaagatcggctgtctcctcctcagagcccatgcgtgcccgcttgtacgcagagccggacgagcgtggtcgggctcagcggctgggagaagagatcgaggcagacgagattggcgcaggcgagcgccatcactgctaccgcgggctcaccctctccgtccaaagccttcaggagctggccgagcgccatcggcccttcctcgagcaggacttgctggatgcgcaggcgaacgccgaccggaactgccacgccgctatacgtccagaccaggttcgcattgctgcgccgcggctcgcggcttagctcttcagccgtcacttcaagcggctcgagcttgagctcatcccatgcgatcagcgcgaggcctccctcgtcgaggtcgaggacgcgtcgcgccggcacgatgtcgaggacataacgaccatgctcgcgctggaggacgacggcatcgagcgcgacctgcgcggaggcaacctgggcgctggcgacgtaatcgatggaacgcacctgcggatcgagggacgcctgaatcagcgcatcccggactgtcgggtgtcgcacagggatcgcagtggtggtcttggccgagataaaaaaatcgttcggggtctgggcgtctgtcgtgtcacgcatactcttgcaccttgttttaccgtcatggaaaggacgtaagcacgtccgcctgcgtccggtggtcttcgatatccgtcatggcatctcgctgccccttcagatctcgatagtcagttttggatcgaagctccggttgtcccaggcgcgctgctgcggcggccagggtccgtagccttttgcgttcgaaaccacgcgcgttgcgccgatcacggtgtcatcggacgcgtgggtatggccgtagatccagagatcagcgggcttcagcgtgccgcgtccatcattggcggccgggcgcatgagagcggtcaggtcgctgcgataggcggcgctgaggatctcgtccggcctcgggggatcggacagcggcgaaggcgcgccgggatgaggggcatgatgagagatcacgaccagcctgcccggacggggcccgcgcatctgcgattcgaagaatgcacgggcttgctgatgccggatcagcgcgtggggcggtcggaatcgtctggcatagcccccgatccggatcttccggaaatcgttcatccgctcgcccgcaagaaacatggcgcgatccgcgtcgccgaacagatcgaaatccgtccacattgttgcgccggcgaaagtaacatcaccgatccggacgtagtcgtgctgcagcacatgaatgttcgtgccggctgctgccgctctcgccttctcgaccgtccgatcgatatcggcgccgtagaattcgtggttgccgggcacgtagatcactggccgatcagggacgcgttcgtgcagccacctcacgccccgctccatgcgggggatcagatcgccggcgaccaccaggacgtcgaaccgcggccgcgcatcgggagccggcaggtcccagcctcgcgtcagttccacatgtagatccgacacaacccatagacgcacgtcagtcctcatgctcattgtcgccgtcatcgagaggctcggcatcgagcagcgccgccacgagctcttccgccagctcatcgatgccaggcgcgaacacgatgtccgccgatccgcagagcggacattcgtggcggtacggctggtcatcgcacgcgccctcgcgctcacaccggaatccagccatcctatcgctccaatctgcgcgcgggccgcgtgcccttccggggcgcacgcgaagcaaggcccctgcggtggacggatgttctcgctccgccgatggcttggccttttggcattgccctgggtgtgttcggaaaagcattgtgttgaaagacctcagcatgctgcagcgaccgatccctccaggccgcagatgtcacaggtccagcttgcgcgctggacggcgaggctgatggcgtcttcgatcttcgcgcgactctcgcccgagacctcgccctcccacttgatccagagcaggcccagtttggtgccgatgcggacgaacttgaaagtttcgttatgcgccaatgcggcttcaattctccggcaaagctggtcgagaacatctcgccaccctgaccggcaggatggataaccgaacgacgcctgaggcttggcctgcacgatcgcgaacagctttggatgagcctgcatgagatcgacgcgccaatccgcggtaacagttgtctcaggcctccttgtttctcgaacttccgggtcctcgtcagcgaaacggtcagccaggcggtcgtagcgtcgcgccactatccggtagccatccgccatcgagacacggacaaggtggacgttctcccggcctggcggggtcggaatcagctcgccttggacgtgggcggcgcaacggatcatgtagacactgccaacaaagcaaagctgcccctccgcgccgcacgactcgcaggtgcaggtggagcgtgccttggcaagcgcaatcgcttcgtgcagcctggcggcggtctgcggagtgacgtcgccgcgccagtagacccgcaggctgccggacttcttgtcgatctggatgatccggatcgtctcgcccggctgcagcgccgcttgcatgcgcgcgcagacacgctccagcagatcgcgccagccgtcggcgacgtccggcaaggtccgcgcaggcggcggatcgccggcgggatgaaataaatccgggtaggcccgcacgagttcgccccgccaatccctctcgtcacgcgccatcacaatccctcgctaccaccgctgtgaccgagaacgaaccataaacagcgatacatgtcaacgttcatctatatatctagttacataggatatgcccatatacagcaagttacctatggttatttgaccgagcacggcctacattcggcccggcttcaaggattcgcctaccggcgaatccttgccccctcatcacccacggagagcccatggccgagcaaggaaaacccgcaaaagcaggcaagacggcggtcccgcagccaagacgcaacttcttcgcaaccctggacgccgagctgatcaaatcgatcaagcgcgtcgctctcgaggacgacaccagtgcctcggagatccttgaggaggctgcgagagactggctcgaacggcggaagaagtcgccaaagcgctaggcttgctggtggtcggcagcgagggcgcgatcggctcggagcgcaccctcgcaacgagttcgatcgcctcgggcgtcctttgcgcagcatgcatccgcgccaggctccgcatgtttccgcgcggcgggtccgacgggcagcatggtggatttgaggacgagagacgacggaaagctcatgcgcggccttccctgcccgggcgcagggcatcgaaggcccgcagcgtcttcagcaaggctgtctcggccggactgaagccgccgcagctggccgagcggccgaagcgaaacgccaaccaggagccgcacagttgatctgctttttgggcatcgtgctcggcgcgatcgatcacgtgagcgagcacgagcgcgcacctgggctccccctcgagcgcgagggacaataaggcagtcatcgcaatgtcggtcttgatcccgcccaagcgcttgatcggcatcaatgagcgcgccagcgcgatggccgcttcggcatccccttgcagcgccggctcgacctcggcgccttcgatcagccttgtgacctcctcgagggtggaccggaccgcgaggtactccgccgcccgaaaagcgtccgccggcatcgaccgccaccagcgcagcggcgagatctcgacgagcgcacggacgatcggcgatgagacatcgagcatccggccatcgtgatccgcacccggatgcgtcgccgcccctccagccggcgcggtgctctcgatcggcgcgccgccttcgccaagacggccgcggagacgggcctcgccatcttgccggggctcgtgccccggcattgccgtggaattggacatccggccgctcctactccgcgcccgcgatcggcccgggagtgcgcgggcgcacccacttggtgccggccacatgcgctcccgcgacgaacttggctgcgaccgcggcagaaaagaagcgccagtcgacctggaagcgcaggcgatccttgatgccggcgatcggtaccacgacgcccgtggcgaggagatccgcgcggagctttttgatgttctgcctgaggcttggggtctcgatgttgcgcacctccgatccggcccggaccacgaacccttcgcgatcgtggtgcccgcgcgcccagatgcagcaataatcgaattcaagctcgccttcggctggcggcgccatcggcaagccggtctcgacgaccgcattcacagcctgattgtcatcgaactcggcctccgccggcagctgcctcacaaggttggcgttgaagatccggcagccggcatcgaacagcaggcggcggccatcggccactagccgctccagggctgcggcgtgttctcccgggcaaggaagaccccgcggctcaacggtgttggccagggtgaccagacctgcctctttggcgagttcgttcaaacgatgcgcgaggcggagtcgcgccgaccatggcagtacgtgcggctcctgtgcgtggagcaggtaggcctccgcgccaaagatgttggaggcagccgcggcatgctcggcgacgcacctgaccgcgcggttgctctccccgatataggcttcgtctcgcccggcaatgacgtagcacgcggaccacagctcgcaggtcgccgccaggctcctggccatcgacagcggaaacgccgtgaccgcgagccggccggccggatcgtggatctggcgataatcctcgacgccaccgaacgggcgatagatcgtgtgggtgcaaggctgcaccatcgggatggtctcgttgggaaatttcatggatcgatctctctgtcctctgagagatcgcgaggtcgacatcggactggctgacgcgccacgcgacgccctgccagacgtcgcagggcgtgggccgtcattgcagcttgcctggcatgatccgcagagatcgaggacgccaggattggcgtcctcgatgcgcggaattgccagcgcaggccacggaccgcgaccgattcatgcgacgccgtcgcgccgcatgacgtcgggcctcgcgacccgcgcctagtcgatagagggggtgatgctggacagaaccgtgtcgtccaccgtgggcccgaccccgggcaccaaagcgcaaccgccggtcacatcggaccggacacagagcatcggagaggacggaagagggatcgccgaatcggcgctatagtggcgcttagccatgactgactcctgttaagtcggttgtggtcaggccgctcgtcggtgttgcaaccaccggcggcggccgcctcgcagggatccgcgagggtaagctcaatatgcggtctgttctcggaatattccagctggcacgccaactgatggttaatgaccggcaggcaacagcattttgagaaaggccggtgttctgcctgccgagcatgagctgatgcacgagcacaagaccgcagtggccgagcgtcaaaaacgcggcgcttggtagtcgggctcctccgtctcgaccgcctcatcattgaggccgggaatttcggcaggccactgcgggatcggctggggaggcctcgtcggctgctgaagcttcgcgttcctcggcgaagcggcgccctcacgccgaagcccgggcgattgccccgtcttccgacgcaggaattcgtcgagctcctcgtgaatttgccgctgccgcttgaaaccgacctcaagcgcaagcgcatcgcgccccgacctgattggatcgggtttgaccttccaggaatcggcctgcaacggcatttcgaagcctcccaggggttcggacgatgaaccggcggttcgcctcgcatcggcaccagcggcctcgtgtgggctgtcgttgcccgacgtcgcgatggccgcaaccgttgaagccaggccggcgacctcgctcgggcggagcggagcggtgctcagagccctcgggcctgccggcgatcgagaagggctgttcgatgccacacccagtcgaggcaatcgggaggcttctctgcgatgtccggacgctcgtgcgatcgtttcggatgaggaagcagtggctcgcctcacgtccccgtcggtggccacgcgccggctgccattccctgggctcgcaatgggcgcgaccgctgaagcgagcgcgccgacctcgctcgcctcgattggagcggtgctcggtaccctcaggtctgccggcgatcgaggagggttggagggcccgcccactctggacggccggcgagcctcactgcgatctccagacgttggagcgatcgcctcggacgagaaagcagcggctcgcctcacatcatcccacccgacggttacgtgtttctcgttctccgacgttgcggtcggcacagcgaccgatgccggctcagcgacattgctccaccgggctggtgcggtgttcggcaccaccggctttgccggcatttgaagatcgcagcccacatccacctgcagggcagcatcgagcgcttcagctacttgcggggcagcctggttcgcctcgaacttcgcgtagaaccctgcggcgatcccgagcagatcgtggcgcgcaatgtcgtccttcatctcgctgtagaacgcccgcgcaatgagatcccgggcagggccgcggggggcgcgattgaccataaagacgtgttcctttgctgcctcgattgccaccaggtcagcaaggcgtgcacctcccttcacgaccaaggctggccagttgagttcgcgagcgaacctcgcaacgatagcagcatcctccgacctgcccgttgccgcgatcctaaatttgccgcccgcgaaagtgacagacgtcccatggagcgccagcgcattggagcccgatcgcgcataaacctcgtaacccgccttctgcgccgcatccgcgaacttttccctaagttcgcccgaccgctttttggggacagaatacatggcggcgtttgtcacgatcacgctcccctcctccggctctggatcttgcttcgtcgcctcgcccttcttcttcagctctcggcccttcgccagctgttcgatcgcctcgaccttcctgccctcattgctggcgcgaaacatccaccgcggccgccgcttctccggacttccctctcccttcgccttattccggcgcgggtcgacgtaggcgtcaatgcccagaatcgcgcagccaagcgtaagcctccccccgatcagggcccgcacgtacctgccgtcgtcgtacaggaacagccggctccattcgatgcgctccttcggaccgaagccgtgtggcttcaacacgcgttgcgagagccagctgtgagcgtgcgggttcggctcaccgtcgcttgcctccacgcattcgacatccagccgcaccgccatcccccgctcgacaaagggcagcagcgcgaacgccgcaagcggcagtatgaacttcctccgaatgagtggacacctg

SEQ ID NO: 140 - DNA, 74209 bp, Bradyrhizobium colbertium
  misc_feature (36910)..(36964): n is a, c, g, or t
  misc_feature (47807)..(47816): n is a, c, g, or t
cggcagcgtcgctgagcaggtgcagtgcctcccatttcgtttcggccatcttcttgatggcctgggcggtgaatttcggcgtcgagatgtcgaggaatacgtccgctccggcagccttcaaagtcaggacttgagagtcgacggtcggctcggagatctcatagctaagctccttgacgatcatcgaggcagccttgtcaccgagcccgtcgcgaaaccccttggcatagtctcgcccgaaatcatcattctggtacaacacggcgatcttcgcgttggggcgctccttcagaacatatttggcatagatcacgcccttggcgtgattgttgggctgccagcccatcgaccacggatagtttgcgggctcggagacgcgattggcgccggtgccgagaaacaggcccgggactttcttggcgttgagatatttctggatggcgaagttggtcggcgagccgaaggtcccgacgatcgccaggacttcatcgctcttcaccagccggcgcgtctgttcgacggccttcgggggactgtagctatcgtcgagcgaaatcaggttgatcttgcggccattgacgccgccttcgtcattcaccttgcggaaataggctgtcatggcgcggccgatggccgcaaagctggaggccgggccgctatagggcatggtttgaccgatcttgacctcgctctcggtgacgcctggtccttgtttgccgctctcggcacatgcgatcggggagaggacggcgcatgccattgcgcaggtcgcggcgatgagcttattcatgctccattccttgtctggttggtcgaggggtatcaggcgggctgcaggtagcgctgcttcagcacatgcttgaatagcttcccattctcctgccgcggcagttcgagctcgaagtcgatcgagcgcggacatttcacgtgcgagagctccgcccggcagaacgcaatcagatcctgtgcgagcgcgggcgaggcctgcgacggattcttgagctggacgactgccttgacctcttcgccatattccgggttcggaatcccgaataccgctacgtcggcgacctgcgggtgcaaggccaggcggtgctcgatctcggcggggtagatattgacaccgccggaaatgatcatgtgcgatcgacggtcggtaagatagagatagccttcttcgtcgacatagccgacatcgccgatggtcgaccaacccagcgcgttgcgggatcgcgcggtcttctcgggatcgttgtgatagacgaattgcgggccgtcaaaatagacgtcgccgatctggccaggtccgagctcgttctgcgcctcgtcgagaatgtggatggtgccgacgcaggcgcgaccgaccgagccgcgatgagcgagccattctgcagtcgagatacaggtggcgccattgcgctctgagcctgcatagtattcccacacgataggcccccaccattcgatcatctgctccttcagaactggcgggcagggtgcggcggcatggatggcgaagcgatgcgatgacagatcgtagcgggcgcgtatctcggcggacagcgccagcaaacggaagaacatcgtggggacccattggctgtgggtgacgcggtagcgcgcgatggcggcaagcgccggctcggccgcgaacttcgtcatgatgacggcggtcccgccgctttccagcgtgcgcatggtgaagcgcagcggcgcgccgtgatacaggggtgcgggcgaaagatacacggtgtcctgcgcaaagttgaaattgctgcggacccagtcgccggaggcctgggcctgccggacgctagagaacagcggctgcttgatgcctttcggcttcccggtcgtgccggaggagtagaagaagtccttgcccacgggaccgtctccgatttcgatcatgcggtcgaaacgcgagagctcggcggcataatcgaagctgccgtcatcggagccgccgatcacgaagatggcgcaccggttagtattgttggccttgagcgcgcgcacggtgtcggcgaagcgcgctgcgacaaagaatatcttcgcgccgctgtcccggacgatgtaggcggcctcgtcgggctgcagatgggtgctgacgggcgtgtaatagacgccgtgccgccgagcgccccagagaagctcgaaataggtgaggtcgttgtcgagcatgatggcgacgccatcgccgacggtaaggcccatccagacgaggatctgggtcacaccgttcgctcgccggtcgagttcgccataggtgaggatgtccttcgagaaggcgacgcgcgctgcgattttctcaggatgacgctcggcccattgacgcaagatcggcatttcttccccgctgacgccacgtcggtggcccattggcgggtagtatcaggtcaatggcgcggccgttgaaatgaccaagcatgccaatcgggttggcggaatcctaccgcgcgtccgccgcggcggcgtgacgctcgcggaattcgcccggtgtcagccctgtccaccgccggaatgcacggtgaaacgtgctgagctccgagaaccccagcgacagcgcaatctcctcgagcggcaggcgggatttcttgagcatatgtgtcgcaatgtcgcgcctgacgcgatccttgagctcctggaagccgcactgctcctcctcgatcaggcgacggcgcagggtctgcggcgagacggcgagcgtctccgcgacgtcctcgagcgacatgggacgtttgaggttgcggcgcagaatggcgcgaacgcgttcggcaacgctgctgtcgtccctgtagcgcacgagcagcgcgttcggcatggaggctagaaaccgccgcagccgttcttcgtcgggcatgatcggcagatggagcaactcggcgtcgaagcgaatttcggtgcgcggctgatcgaacagcatgggagcccggtagaaaggctcgagctcggagctgaagggctcctccgagaagacgtaatgcacggtgatcaggggcagacgacggcccacaagccagcacatgaggccgtaggtgaacaacaggatggcgccattgaccattcgccggcggttcggctggtcgatcctgtcggtcacgtagaccgaggcgtcgtgctcgccttcggcgagtcgaacggcgaagtcgtctacgacgagatgatagaactggcaacctatcctgatggcctcgcgcaggttggtgcagcggatgagcaggcggcacatcatgcgaaacgtgccgggcttgatgggcctgctgcacagcagccagagttcgtcacgcgtttggcgagtcaaggttgcgatcatgcgcgcgaactgctcctgcggcagacgggtgcccggcctgtcaagctgaccgttcgcgattcccgcgcgtctcaggagccgattgatgtcgagcccggcctcccgcgcaccgctcagcaccaggccgacatagccggtgtcgattgccgaacgcggcggcgtttgagctgatcggcttctggcctgtgaggttcccgacatgacgcatcatgttaacggccggatcgccgtcacgccagcattcccctggcgtcgatggtcaatgcgtctgatcgttttcgtcattgcggcgagccagctccgcttcattctccgccgcaggattcagccaagagagaccagatgcgggcgttgatgagctgcgaaccgggcggacccgagggcctgcggctgctcgatgtaccagatccggtccccggagccggccaagtcctcgtggcggtgagggcgtgcggcgtgaactacccggatgtactcaccattcaggaccgctaccaggtcaagacacctcgccccttcgcaccgggcggcgaagtcgctggcctcgtgtcagcggtgggaccgggcgtgacggcgttcagcgtcggggatcgcgttgccgcccgtaccgggacagggggcatggcagagttggtcgccgttgccgtcgaccgctgcattccgattccggacggcatgtccttggccgacggcgcggtcatgcaattcacattcgagacggcctactatgcgcttcatacccgcgcccggcttcaagcaggcgagacggtgcttgtgctcggcgccggcggaggtgtcggcatcgctgcggttcaggttgctcgcaatctcggagcccgcgtggtcgccgcagcgtcgtcggaagagaagcttgccttcgcctgtcagcacggggctgctgagggggtatcctatccggtggagatgccaaagcaacgcagcgaggttgccttacgtttgaaggctgcagtcggtccgaatggtgccgatgtgatcatcgatcccgttggaggctggctcgcggaggccgctatccgaagtgtcgcagaaggcggacgttatctcgttcttggcttcgccgccggcattccgtcgttgccgctcaaccttccgctcctgaagaactgcgacgtgctgggtatcaattggcgaacattcaccctgtcggaagatccgcggatcgttgctaaccggcgtcagctccaggactggtatgaacaaggcctgttatcgccaggaattacggccgagttctcgctgcgggagggcggtgaggcgatccggcgtcttgcctgccgacaatcggtcgggaagattgtcgtagtcatttgagcgattgacaattgctcgacagaaaagctctcatgacatctatgatgccctcttcagcaacgaccaggtccttctgaggcgttcccgtacagaaagcccccatcgaatccgccacgtagttggtccaccaatagaaggatctcgggaggaacgtctcaatgagaagcacgaacttggaatcttgattggattcggcagcgcatcgcgccactgcctgctacggacaccgcggccggcaagatcaaggggtgcgtcgtggttgatgtgacggcatcgaatcgcttctcggggcagggtgcgccgccggcctgttggaatagccgagggctgcgccgatggcccgggctgcctccattacgtggaccgagtactccttgatctgcttgcgcttgatgcgggtgtcggggccggatacgccgatcgccccgacgagttcgccggagcggccgaggatggcgcaagcgcaggctgcgatgccctcgcgccactcgccatggaggacggaggagtaaccctgcgtgcgcgccagctcgatgtcctcgcgcagctcctcgatcgtcgttcgcgtcgtttccgtataccgcttgagatgcggccggaagcgttccagatagtcatctggcatatgggcgagcatcgccttccctgtcgccatggtgaacgcaggtgcgcgcatgccaacgctcgtatgggcgcggatatggtgagcgctctcgatcttgtcgacgtagacgacgtcggtatcttcgagcacggacaggtggatggtttcgccggtgatctcggcaagcttcgtcattgccggccgcgcgatgttgatgagatccatccggtggatgacatggctgccgagcgcccagatcttggtcgtgagctcgtaggtgctgtgcgggggaatctggcgcacatagccctgggactgcaaagtcatcaggagccgatgcacgttgctcttggtgagcttcagctcgctcgcgaggtccgtcaccccgcggggctgctcgctcagagcaagtgcttccaggagacgcagccccttggtgaaagccttatccatccacaagccaaaatagaatgatctttcaccgcgtctagcatggtcgcgcgatccgcaacagcccgcgtgtgggatcggccccgatcctcctggatcggggccgatcagcctgcctattgcgccagcaaggcgttcagtttctcctggccgtactcttcattggtggagtttccggccggcgagggtgcgccccaatagtccgggctccattcgattgccttcgagacgttgtccggattgttggcccagtagcgggcgagcttcttgtccgtcgctgcctcgaacacgacctgggagggaagcgcgaccgggaaggtcgaggtgagctgcgctgcgcgcttgggatcgagccgccaggaaagcagtttcagcgcgttatcgtagttcggcgctcccttggggatcgagaagaaatcgtagtagacgaagccctggttgaaggtcagctcgatcggggcgccctccagggcgagcttgctcatcgagccggtgtaggccatgcacatgtcggcctcgccgtcgagcaggagctgcggcggctgtgcggatgtggtccaccatttggcgatgtgtggcttgatttccttgaccttcttcagcgcccgctccatgtcgatcgggtagagcttgctcttctccacgccgtcggccatcagcgccgcttcgaatacgaaacgcggccaggcgggcatgcagcgccgtccgggaaatttcttcacgtcccagaagtcggcccacgtggtcggtacgtttgcccccttgtacttgtccttgttgtagacgaggccgacgccgatcacctgcagtgccacgcccttcttgcgcttcagattgtccggcatcgccgccagcgtctgtttcgccgcgtcggacagcttggaatagtcgatatcggccaggcagcagtcgccgagcaacttcgtctcctggtcgaagatgaacgtcaggtcccattgcgccttgccggcttcggcctgagccttgatgcgggggccgctgcgggcctcctggacggtgaccaccttgatgccggtctccttctcgaacggatcgtacatgaccttgcgcaatgcatcgccatatccgccgcccggatcctgcatgatcacgacgttgctctgcgcttgagccaggcccgtccccatcgcgatgaacagggccgaagccaatacggaagccgtcaatcgccagcgtttcattcccagcattttctctttcctccagttgaagttgatctgtgtcacgtcgccttccgcgacgtggcgagaacgggtcgcgcaaggacgagccccgcgaccaccagcagcacctccagcgtcgagaccacggccagcaccggattgagccgatagttgatgtcgccccacagcatgagcgggagcgtcttcagctccgcgctcgacaggaacagcgtcagcaccagttcgtcgaacgagtgcaggaaggcgaagaatgtcgctgcagccaagcccggcatgatggcaggcagcgtcaccaggcggaataccgtcagggacgatgcgccatggacggcggcggcctgttcgagcctggtatcgacgccttgaagcgatgcggacaggatcaccacgacaaggggaaggccgccgatcgcatgcgccgcggcaaggccgaagacggagccgaccagatcgaaacgcaggaacaggctgtacagcgacaggccgagcacgacgggagggacgatgatcggacttacgagaagcagcatgatggcggatttgccgcgaatgctgcttctgacgatgccgagggcggccgaggcgcccagcacgatcgcgatgccggctgacatcgccgcgacgaccaaggatgtccagaatgcccgcatccagttcgagtcggagaagaactgctcgtaccagcggaatgagaagcccggcggcgggaacgtcagatagcttgcgctgctgaaggaaatgatcatcaccacgatgatcggcaggatgagaatggcaatgaccaatccgcccacgagacgaacggtccaagttccgaagctcgccggcagccgcccgaaaagcctcagaagcggccagccgacaaagtcggcagctgtggcgctgaggctgcggcggccgacatcggctgcggggcggtcagtggttcttggtgttgcctcggtcagcttgcggccaccccatatgaactcgaaaccgaggaagcgtcccgccaccgcgacgaccgccagcgtgatcgtcagcagcaccacgcccaatgcctgcaggaagccttccgatgtgaccgagtctgcctgctgggtgatatgcatggcgaacatctggtcaccgggtcccccgagcagcgtaggggttatgaagaagccgatcgccgcgacgaagaccagcaggaagccggcgcccatgccgggcaaggtcagcggcagcaacacgcgccagaacgccgcaatgggcccggcgccgctggccagcgccgcgcgggtcaggctttgatcaaggcgcgccacgctggaatagatcgtcagcaccatcagcggcagcagcacggcggtcatgccgagaagcacggtgccgcgattgaagagcagctgcacgggctcgctcaatatgccgatcgaaaccagcagcttgttgaccggcccgttgcggccgagcaggaccatccaggcgtaggtccggatcaggatggcgatgaaatagggcagcacgatcgcagtcgcgatcaggacctgggcaatgccgcgactgcggtgaatgagcagcgcagtcggatatccgaacagcaggcacagccctgcgacggtgaccgagatctgcatcgtgcggacgagcgaatcccaatagagcgggatcgcaaacacccgctcgaagtaggacgaccacgacggcccgctcacgctgatacggatgagatcgatcagcggcaggagatagatgaaagccagaaacgcgagcgcgggcaggagcagcagcgccggatccttcaacctcctgacgagatcgagagtcccagggcgccccgccagggcgccgagcgatgccgaggtcatgcgagcacccaacagtccgcggcgccccagctcacatgcagacgatccccaacggccggcaggggccggtcggccatgtcggtgcaccggatcaggagcggatctcccccatccatttgcgcctcgatccgcaggatctcgccgaggaagatcgcagacgtgacgctgacgggcgtggaattcgcagccggctcgttcgacacggcgatgcgttccggacgcacgagcacagttgcgcgcccgacgtcgatcgtatcccggctttcggcgctgaatacgtatcctgcacggttcttcatcgtcagtgtcgatccgcgcttctgcagaatttccgcctcgatcagattgctctcgccgacgaacgaggcgacgaagcgatcggtcggatgccggtagatgtccagcggtcggccgatttgaacgatcttgccggcgttgagcaccgcgatgcggtcgctcatcgtcagggcttcgccctggtcgtgagtcacgaacaggatcgtactgccgatggtctggtgaaggtcgcggatctcgatctggatctgttcgcgcaaccgccggtccagggcgctgaggggttcgtccatcagcacgaccttgggcctcctgacgatggcccgggcgatcgcgacgcgctgctgctgtccgcccgacatctgggagggagatttcgccgcatgctccgtcagccgcatgatctccagcgtttcggcgacacggcgctctgcagttgcccggtcgacacccgccatgcgaagcggaaacgcgacgttctggctgaccgtcatgttcggaaacagcgcgtagctctggaaaaccatgccgaagccgcgcttgtgcgtgggtacgttgtggaccggcttgccgtcgacgagaatctcgccgctgtcgaggctctggaatccggccacgaggttgagcagcgtcgtcttaccgctgccggatggtccaaggagcgtgatgaactcgcccggctcgatatcgatgctgatccggtcgacggcatggaagctgccgtaggttttcaccgcctcgcggacggaaatgctcgatccgatcgcgtcgcggtcccggaggcggccggtcggcaatgtccgaacgttcgcatcgccggagcgcatcgcgcgctgagccgcaggctcacccattctttcctcccgacatgttctatattgtagaacgctattccaattattcttggcgtagcgcatcgtcttgtcaagtcgagccgcccgatcgcggcgcaatcatgcgctgctgcggtcggctgcgcacgggaaagtcctgcaaatcaaggctccggcggcgaagtcagattgacagcatcgtcgaaatccgcctagattaatttggaattgcgttctacaatatagaacaagacggggaggatgatggtgttgagcgagcctcgcgcaatggcgaagcacatcgagccgggcatgcgcgtggcgctgccggtcgactacgccggcgtctccatggccatgacgcggccaatgatcgagcatggtgcgggtgatctcgatctcgtctgcgtgccaaccggcggattgcaggtcgaccagcttatcggtgcgggtctcgtccggacggtggagaccagcgccgtctcgctcggtgaagcgggtggagcgccccggttcaatgctgcggtcaaggatggcgcggttcgactgaaggacgcgacgtgccccgccatccatgcgggcctggtggcggcgcagaagggcagtcccttcatgccgctccgagggctgattggaacggatctgctccgccatcgtgacgattggcgcgtggtcgacaatcccctggcggacggcggcgatccgatcgtgctgattcccgcgatcaagcccgatgtcacgatcttccacgttcccatggctgatcgtttcggcaatgtctggatcgggcggcgccgcgagctcgccgccatggcctatgcttcgcgaaccgttctcgtcacggtagagcgcatcgtcgaagaaaacctgctcgccgacgagatgagcgctgccggtgtgttgccggcactctacgtcacggcagtcgcgcgcgcaccgaagggcgcgtggccgtacggtctttggggcgagtatccggccgacagcgccgagatcgcgcgctatgcgaaggccgcgcgaacggctgaaggcttctccgcctatatggcgcaggcgcagatggagccggcgtgatggcggacgttctccctcgcgaagtgctgatttgcacgatcgcgcggctgctcgatggggtcaggcatgtcgctgtaggcgcctcctctccgattcctgccgcgggtgcgatgcttctgcgcgcactgaaggaagcgggcggcgccgtcggtccacgcatctccattctcggttctgtcgagcataatttctttaccaacggttcggccgagctgttcgattgtgcaggtcaaggacggatcgacgcgttcttcctcggtggtggccagatcgacggcttcggcaatgtgaacctcgtcggcgccggtgattatccgcgctccagcgtgcgctggcccggctcgttcgggtcggcctatctctactttgtcgtgccgcgggtcatcctcttccgcgaggagcatacgccgcgcgtcttcgtcgaacatgtggacttcatcagtgcccccggcgtcagcgcagagggagtctttcggagcggcggtcccgttgctctcctgacgggcaagggtctctttcggttcgacaagacacggccgggattcgaactcgagagcattcaccccgggcatgatcttgccgagatcaagcaggcgaccggctttcagtttaaacatgacgccgagccgcggcagaccccgctgccggacgggtcgacgctggagctgctccgcggccgcgtgttcgacgaactcgccgagacctatcccgaattcgccgcgcaaatccggcgcgatctggtggcggtcgacgcatgagcaggatcaagcgggtcccgcattgcagccattggggtgcttacacgatcctcgtcgaggataatcgcatcgtgggcgtcgagccgttcgagcacgatccggcgccttccccgatcatccattccgttgccgaatgggctaatcccgaccggcgcgtgctgcggccgatggttcgttccggttggttggacaagcgagaaaagagtgatcgccgcggtcgtggccgggacaagttcgtcgctgtcagctgggacgaggcgacgacgctggtcgccgacgaagtacgccgtgtggcgggcacgttcggcaatgcgtcgatcttcgcgggctcctatggctggaccaactcgggtcgcctgcaccatgcctcgtcgcttctgaagcgcatgctcaacctggttggcggcttcaccaggcatgtcgacacctattccatcgccgcgggtcccgtgatcctgcgccacacgctgggcagcgacgacgcatgcggcggccgcgccaatacgctcgacacgatcgcgcagcataccgagacgctggtggtgttcggcgctctgtcgccgcgaaccgcgcaaaacgaggccggaggaatcggcagccaccgcctcgagacttatctcaggaagatcgtcgagcgcggcgtcaagatcatccacgtctcgccgctgagggacgatctgccggactgggtcgatgccgaatggtggccaatccggccgaacacggacgccgcgctgatgctaggccttgccggcgagatcgtgaaggcgggccggcacgacacggatttcctcgcgcgctgcaccagcggcgcggatcgttttcttcgctatctcgaaggccaggccgatggcggtcgaaaggacgccgcgtgggccgccggcatctgcgggctcgatgcaggccagattgccgagctcgcaagccgcctggtcgacacgcggagcatgctgacggtgagctggagcctgcagcgcgcccatcatggcgaacagccgttctgggcggcgctcggacttgcatcggttgtcggccagatcggattgccgggcggcggcgtcggctacggctacggatcgctgggcggcgtcggggccccgatcaacgtcggcaagtctccggctatttcgcagttggcgcgaccgatcgacagcttcattcccgtggctcggatcagcgatatgctgctcaatcccggcgcgtcgttcagttacgaaggagagacacgctcctatcctgacacgcggctggtctactgggctggcggcaacccctaccatcatcaccaggatctcaatcgcttatcggaggcctggaccagaccggaaacgatcatcgtgcaggatccgatgttcacggcgacggcccagcgcgccgacatcgtcctgcccgcaaccacgtcgatcgagcggaatgacatcgccggcaacagacgctcggatttcattctggcgatgaagaaggcgatcgagccgctgggcgaggctcgatccgactttgagatcttcaatgagattgcggccaagctcgggatggccgatcgattcaacgaaggccgagacgagatgggctgggtccggcatctctacgaagcctgccgcagtgacgcatcgcagcgcttcggctttgcgatgccggatttcgatgcgttctgggaagccggctatgcccgctgcccggtcaagacggagcatacgttcctggctgacttccgcaacgagccggaggcgcatgcgctcaagaccgagagcggaaagatcgtgctcggcagcgaaactctggccaggctggactatgccgactgtcgcccgcatcccgcgtggatcgagccggctgaatggctcggcaatgccgccgacgcaggccaaatgcacctcatctcgcaccagccggccggtcgtcttcacagtcagctcgaaaccggcgcgtcgagccgggccatgaagcgcaatggccgtgaacaggctcgccttcatcctgacgacgcggcagctctcggcatcgatgacggccagacgatccgcatctggaatggtcgcggggaatgcctcgcgacggctgaaatcaccgacaaggtccgtcagggcgtactggtgcttccgaccggtgcctggttcacgccgacaggcaatagcggcctggaaatcgccggcaatccgaacgtgctcacgctcgatatcggcacgtcccaattcggccagggctgctcggcccataccagcctcgtgcgagtcgagccgtacgccgccgatcagcgcgacgcgttcggggcctatcaggaatcgctcgtcgcgctcgcggcagtctaacaggagcttgcaacatgtctgcgcccgccatcagccgctttcccgtccccgacatcgcgacgcttcctacggatatccgctcgcgaatcgaggcggttcaggaaaagtccggcttcgtccccaacgtcttcctgatactcgcgcatcgtcctgacgagttccgggcgttcttcgcctatcacgacgctctgatggacaagcccgggccgatcaccaaggccgagcgcgagatgatcgtcgtcgcgaccagcagcgccaatcaatgccagtattgcgtcgtggcacacggcgccatcctgcgcgtgcgcgcaaagaatccgcagattgcggaccagatcgccgccaattaccgcaaggccgacatcaccgcgcggcaaagggcgatgctcgatttcgcgatgaaggtctcggcgcgggcctatgaggtagacgactccgacatccaagatctcaaggcacacggattcaccgaggaggacgtctgggatattgcggccatcgctgcattcttcggcatgtcgaaccgcctcgccaatgtcaccagcatgcgtccgaacgacgagttcttctcgatggggcgatgagcgacgcggacgaactgcaatggtatcgctggtcatcgacagacgcttccgggggccgcccaactccggcaacggaggctatgtatgcggatctctcgcaaggcacgtcgccggagacgctgaagtgacgttgcgcgccccgccgccgcttgagcggccgctcgatgtgctgacagggaccgacggcgggatcgagttgcgcgagagcggcaagccgctcgcgacggcgcatgcagcacgcgtcgatgtgccggacgttcccagggtgagctacgaaaccgccgaaaacgcggtcggcagaacgccctacgacgaacagagccacaaccttccaggatgcttcgtctgtggccccgcacgcagccatggcgacggtctccggatcttcgcaggtccgctcgaggcaggggcagtcccgggcaagccggtcgtgttcgctgcctcctgggtgcctcatggcagtctgtccggcgaggacggtcatgtcgcgcccgaattcctctgggctgctcttgactgcccgaccggctattgcagcgtgggtgcccggcacctgggactgaatggtgacgagacggccctgctcggacgaatggcagcgcggatcgatcgtcggccgcgtcccggagatcgctgcgtggtggtggcgtggccgaccgggcgggccggccgcaagctctttgccgagagtgccttgcttgatgcggagcaggaggtgctggcgaccgcccgagcgacgtggttgttggtcgaccggcaggtccagctcggagcaagtgcatgaacggggacgggaccaacatatgagcgggcgcgaagcagagttcgaacttcgtcaatccatcatcgacgcgtgccgcgagatggcggcgcagggcatcaaccagggaacgtccggaaacatcagcgtccgaaccgatggcggcatcctgctgacgccgtccggccttccctacgaccgcatgaagcctgaagatatcgtggccatgaactgggacggctcgtggacagcgtcggccggcaacgttccctcgacggaatggcgctttcacctcgacatcctgaggtcgaagcaggaggtcggcgccgtcgttcacgcccatccgatcttctgcacgatcatcgcgatcatgaaccgctcgatccccgcgattcactacatgatcgccgctgccggcggaaacgacatcccttgcgcgccctatgctcaatacggcacggccgagctgtcgcaggcggccctgaacgcgcttcgctatcgccgcgcttgcctcctcgctcatcacggcctgatcgccatcggtcccaacctgcgcaaggccttgtggctcgccgtggaggtcgaggtgcttgccaagcagtatcacggctgtcttcaactcggctctcctccgctgctgccggacgaggaaatcgacagcatcctgaagcgatgggggcagtacggcttgcgcgataacgacggcaagcccgagacccgccatccgtcgagctagatcacgaccaaaccactgtcctgcgagaaatcatggctcacactcacgatgtcagcgtctgcggtacttacattctggacattctaggcgtcccggtgacggagattccgcccggtggcggccgcttgctgatcgaagaaattcggctcgcagtcgcaggcaccgccggcggaacggtcgttccttgcgcacgtcttggtctcaaggcgctcgcggtcggcgcagtcggctccgacgagaaggcggattggatgctgaacgcgcttgagcgtgaagggatcgacatctctctcatggagcggatggccgacagcccgacctcggccacgatcctgccgatccggcccgatggctcgcgtccggtcatgcatgcaaggggcgcctcggcgcgctggcggatcgcacccgaaacgcagaaggcggcttgccgcagcaaggttctgcatctcggcggagtcggctccctgctcgcgatggacggagcgccttccgtcgcattgctgcgcgacgccaaggcggccggttgcatgacgacgctcgatctcatccaggcgcggcgtgaaacgctggcgctggtcgagccgctgctgccttatgtcgacttcttcatgccgagcatcgatgagaccaatgccatggttggaaccgacgatccggccgcgtgtgcgcgcttcttcattgagaagggagcgggggcctgtgccatctctcttggggccgacggatcgttcgtgatgacgcgggacggacgtcaattctccgtgccggctttcgaagttgcggtccgcgatacgtcgggatgcggcgattcctacacgggcgggttcattgcgggtctggtccgcgactgggacctgctcgactgcgccagacttgcgaccgccaccgccgcgatcgtcgcaacgggtctgggctccggcgccaacctcgtatcattcgaggagaccgtgaaagccatgaacaccttcccggtccgcaagtctgctcgcgcctgatctttctacaccgcaagaacaattcgtccgaacaacaggggagaacgtaacatggcccgacatgcgatcgtgacgggagcaagccgcggaattggccgcgccattgccatcggccttgccaaacgcggctacgatctcgcgctgaccgacatcgcagcgcaggagaaggtccttctggagaccgtcgccgagatcaaggagattggcggccgctgcatcccggtgctgggcgacgtcagcgcgatcggcgattgcaggcgggccgtggcggaagccgtcgggggctttgggcacatcgacgtcctcgtcaacaatgcgggtatcctcaggctggcgaccatcgacgaactgacgaccgatacatgggatcagacgttcgccgtcaacacccgcggcgtgttccaaatgacccaggctgtggttgggcacatgaaggagcgcaagtacgggcgcatcgtaaacatcgcttcgctcgctgcccgaacaggcggcccgggacagtcccactatgccgcgtcgaagtccgccgtggtcggctttacacgggtctcgtccatggagttcggaggccacggcatcacggtcaatgcggtatgcccgggcatcatcgtgactgagatggggatgaacaatctccgcgatcccgagcgcgtcgcctatttcgagaaggtcacggacttgcaccggctcggacaaccggaggacgtggtcggtccagtcgcattctttgcgtccgatgattctgccttcgtcaccggccaggcccttaacgtcgatgggggtatcttctacagctaagaggagggccgaccgcaagagaactcgctagtgcctgcttccagtgcgtcggttctgatccgaaaccggcgcggtcttcgtcggctcaggcattattcgtcggcaatggtgtcgcgaccctgcatgctgatcgcggacggagagcggttcgattccgtagctttctggaagctctcgtgctgggccgcgggtaggaaagtatggagaagcttgagattgatcttcgtctggcccgggtttgcgctaatgcaccggttggccgcagccgtgccccggaagctttactctcgtggcatacgctgactcaggttagcaacgggtcataggggtctcggccagtgaaaactgctatcggtgatcaagtcatccgacgtgatgatcggcaagtaacgccgcaggcgcatcggcgggcgcgtgcgccgtgcgggcctgtttcaaccgtgacgacagctcctgccaccagccctcgatcgctgctcgctcgcacaagagagttgtgccgatcccgccggtaaaatcattccaggcgtccaggcatttttccggcactgccgtgagcacggggataccggcggcgatggcgcaggccagctcgtcgcgcaggccttcgccggctgcctcctgcttggagaatttgttgatcacgacgagatcgacgtcggccgcgatcgcgcgggtgacggcgaccgccgcctcagcaaggcccgcagcgtcgagcctgcaggccatggcgcccgagccgagtggctggcagatcgagatctccgcgccggtcatgaggtcgatggcctgcatgccaacctggcagtcggcgccatccttgacgttgcgctggaccacgccgccgatccggccgcccgaccgcccgaggttctgtgcaaactcggcaagcagggcgtcgacgtcgtcctgcggacgatagaggatcgcggcgacgcggttcgggtcgatgtcgtgaaagtcgatcggcatggtcatcctcgtcggattatctacgcggttccgtcgagccgagcaatgtccgtaccgatcacggctcccgaccagcggtatcggatggaggctgtgcagcgggccggagtcgacgacgcggccactctccatcaacatcagatgatcggcgaagcgctcgatctcggccatgtcgtggctgatatagagtaccggcagcaacatgccgcaccccttgcggcccacttgtcggcgattgccatggtcaggatcaccgcgaaggcgaagatcaccatgaggcctgcgagcatgctcgcttcacgccaccgggacgtctcgacacaatcgaagagcgcgaccgacagcaccttggtgcgatcgggaatgttgccgccgatcatcagaacgagcccgaactcgccgaccgtgtgtgcgaagccgagcaccgttcgccgggggcggcgctggagcagggcgccccgatcctccaagcgcgcggttcggccccggatctgctctggagctggaaggtggcgcagaccttgatcgagatctggtcgggcgtggccagcgaggctcgcgtcatcatcgctgcggcgcgggcggttgcacccgagattgcggtcgcctgcacgcgcaagaacgtgccggggaccaagcgctttgcagcggcggccgtgaaggcgggcggcgccgtgatgcaccggctcggccagtccgagaccgtgctggtgtttcccgagcaccgtgcgttcctcggcgaactgccgctgtttcaagcggtccagcgattgcgccgggcggcgccggagaagaagctggtgatcgaggtgaagaccgccgacgccgcacttgccgcggcggttgccggcttcgacgtgattcaggccgagaagttttcgccgaccgagatagctgcattggtcaagcgcatggcatccatggcctatacgcgtgctcgtccgatcgtcgccgccgcgggtggtgtcaatgcggcgaatgccgctgcttatgcagaggccggggccgatgtcctggtcacatcctcgccctacttggcgaagccgagagacgtcgaggtgcggattgcggcaacggtcgaaagcagccgtcccgcatggaccggaagagacgcgagcgttcctgcgagccggcatgcccgagaaccagaagggcgtgttgaactctgacgcgacgagttgccaaaggcgccagagtttgcgcctcgacaaagaggtcgtgactgcagctgcttaccgttcctgagcgctggcacgggatgtgtgccggcgatgggaagcaagccggtgatcggaaccagcgtctgcaaatggaccgtcagttacttcgcgctcgcagtcgtgtggctgctgctcgcagaagtcctgatggttgccggcttcggctttccgcacagcgacatcggcggaccggatacgctcgtcatcgtccacatggtttgcgtcggttggttgagcaccgcgttgtgcggcgcgctgttccagtttgtgccggtgctggtcgcaaagccgctctatgcggaacgctggacgccgctggctctggcgctgctgacgcttgggctgattgtcctgctcgctggctttctggcgctcggcggccacctcaacgggccgagctggctgctaccgctcggcgcgggcctgttggttgcaggcttcgcgttggtcgttgccaatctcggcatgacgctctggtcggcccggccgctgccggcggctgcgcggtttactgccgtcgggctcgcctgcatctgtgtcacggccgcattcggcggcactttctcgctggtgctgtccggaacgggcgtcggagcgttatggccggacctgctgccatcgggcgtttcgatccacgcgattgcggggcttggcggctggctgacgttcactgccatgggcgtcagctatcggctacttgcgatgttcatgctcgcgcccgatggtgatgcggagctaggccggcttgcctggcgcagcggagccgcggccctggcggtcgttgtcgtcggcggggtgcttgcactctggcgcgcgaccgggctgaaccttgtgcttctgcttgcaggagctgcggcccttctatcgctcgccgcatacggcagcgacgtattcggtctgtaccgcacccgcaaacgccgtgcgctcgagctcaacacgcgcatgagcctgctgtcgctggggaacctcgttgcggctgcaatccttggcgcagcgtctgccgcggccggttcgttgcagtcgcatgcgggagcgctggccttcctcgtcgcgttcggctggctcaccggtctcgtgctcgccaatctctacaagattgtcccgtttctgacctggctcgagacgtacggcccggtgatgggcagggcgcccacgcctcgcgtacaggatctcgtcgccgaacgtcgcgcctcaaaatggttcgtcctgttctttgccggaacttgggcggccgtgttcatgctgtcgatcgacagcgcgctcggcttccgcattgctgtcgcgcttgtgacgctggcaacgctcggactctgtgaggagctcgtcagggccaggcggcttgcggatgtggcggagtcgctacgcctgccgttgggagccacagtcccccatcttctggtctcgcgcaattgaaaggagactgccatgactgatttcatcgacgtcgatgtccggccgattctgcgtgcgggcggcgagccgttctcgatcatcatggccgcgctcgaacggctggagcccggagaaggcttgcggctccttgctcccttcaagccggttcctctgttcgacgttatggcgagcaagggcttcgcgcaccgcgatgccgagctcgaaggcggcgactgggagatcctgttcaagccgcacgatggctcgctcgaagcgggcgaacccgcgcccgtggcgttgagcgatgacgattggccggagcccgccgttcgcctcgacaaccgcgacctggatccgccggagccgatggttcggattctcgcgtcggtggagcggctcgcgcccgggcagacgctctccgccttgctcagtcgcgaaccggtcttcctgtttcgggagctgaccaagcgcggccatcagtggcgcggcggcttcacgccgcagagggacgcctatcagctgacggtgaaggtgctcgcatgaaggccgatgacgacgatgtcgtggcgcggataaggcagtcgctgaaggtcgtgatcgatccggaactcggacacaacatcgtggacctcggctttgtctatgatgtgtcggttgacgatggcgttgcgcacatcaccatgacgacgacgacgcgaggctgtcccgccacgtccttcctcaaggagggcgccgccaacagcgcgcgtcttgttccgggcgttgaagcggtcgaggtcaccatgacattcgaaccgccctggcagccctgcatgatctcgccgggcgtgaaagcctcgcttggcttcgccgaggtgaattgatccggcgggacggtttcgacgagctagttgctttccggacctgggccggaccagatcttttgccggtgcccgcgatcggatacgagccgctggcgatcgaggcgccgacgtctgaatgaaattgtcgcttcgtctgcgagaatgacctgcgccaatctgctgggcgaggcgggagtactgcacgagagccacatcggctcgctgcgcctgttgccgcaggattgcgacatggttgctgtcgtccaagcgtttcgcgacgtgctggacgggcgtgatgatgtcgactgcggcaaccgccgcattgccgcggcctatccaggtgtgcctttctcgtacgggttcctgcgagcggagcctgggcacgtctaccgccttgaccgcgcagagccggcgcagggcgcgacgtggcaagccggaactctgttgcccgaggtaactgccgcgttatgcgacgactgagtccacgcaggaacgctttcggcagcgctccgttagcgcagcaaacgcccggagttttccatgaccgactatccaaagccgccctatccttcacagcagcaaccgatgcccggctcgacgcgggcgatgcagccgcgaccggatcatggcgaggagagttacaagggcgcggggcgcctggccggaaagaaggcgatcatcacgggcggtgacagtggcatcggccgcgcggtcgcgatcgcctacgcgcgtgagggcgcagacatcgtcatatcttacttgaacgaggacgaagatgcggccgaggtgaaggcgctggtggaacgggagagacgcaaggtcgtcctgatccccggcgatatccgcaatcccgagcactgccgcgccatcgtgcgccgcgccgtcgaggagctcgggggaatcgacatcctggtcaacaacgcggcgcatcaggccacgttcaaggatatcgccgacatcagcgacgaggagtggcagttgacgttcgagaccaacatccacgccatgttctatctgaccaaggctgccgttccccacatgcggccgggagccgcgatcgtcaacacggcctcggtgaactcggacatgccgaacccgagcctgctggcttacgccacgaccaagggggccattcagaatttcacgggcgggctcgcccagatgctggccgagaagggcattcgggtgaacgcggtggcccccggtccgatctggactccgttgatcccctcgaccatgtcggaggaaagggtcaagaacttcggcaagcaggtcccgatgcagcgcgccggccagccggcggagctcgcgaccgcctacgtcatgctggccgatccgctctcgagctacacttccggagcaacgctggctgtcaccggcggaaagccattcatctgatcgcacgtgcctcactcccgtcagcaagacccgtgggcggcaccggaaggccgggccgccacgtgcaatcagcagcattcgatcacgccgcgttggacgccttggcgttgacccctttgcgaagtgccacagtattcagcttggtgttggcggccttctcctcgttcagattggtcgtgaggaagcgtacgatgtcgtcgtggccgagctcttcggcccaggcgatcagcgtgccgtagcggcacatctcatagtgctccaccgcctgcgcgttcgccacgatagcggcatccagcacggccttgtcctcgatctccccggcggtttcgtcggcttccttgattaggccgtcgatggccgggcaattggtgccgctcggctccttgccgagcttcgcgaacaccttgtcgaggcgctcgacctgcttgtttgtctcgtccagatgggccttcagcccggcaacgagatccttgttggtcgccttgtcgatcatcttcggcagcgccttcaggatctgctgctccgcgtagtagatgtcctgcagcacgtgcagcagcaggtcctccatcgatttgatgtccttggtgaagaatcccataaaagacgccttcctttcacaatgatggcagtggaacgccgtgcggccaccgctgttccattcccatgtgcagatcgggagagccgaatgagtgatggagtggatcattttgcgagcctgctcggacgtgccgcactggacgtgtggggcgacataccccgagacattcaggaagcgctgttcgagaccgcgatgaaggggcgcgaagcggagcgcgaggatctggcgcggttgctgcatgagcggcatccgcgcactcttcatccagaccggcccggctgacgaagccggcgggaacgatcctacgagcttctgattggtgaaatgggtggcgcgtcgccgaacggctcgaatgaggaccgcacgaggcgcatcgcacaatcgcgatcaaatctgtgagccgggcgacgtgactgagatgaatatgggaagatggtacgacccgatttcagagcgatggattgcgccgcgggaagcgcccgccattgctgcttatgatcggccaagcccggagaaggggccggaggctcacaagagggaagaggtgcagcggatctggaacttgctggtcgattgctgcgcacgcgggtgatgtaggcgaaggttcttgccgcgcgtgcgagcccgttcggcgacgtctcagcgtcaagggacgtcattgcgcgggactgcccagcgtttccgtcaaccctgatctcgacgacgtccggtacggagcggtatattaccacccggccgcagagcggcgccggacaaggatcagatgatggacgacacgattggcttccccgacccaggtctcgacctgtcggacggcttcaagccgcatacctcgcattggggcgcgttctctgcgcgtcagggcgcggccgggctggaggtcagggcctatgcgggcgaccccgatccgaacggcatcatcgacaattttcccggcgcactccggcaccaggcgcgcatcgcccagccggcgatccgtcgcggctggctggagcgcgggccgggccccgacgatcgccgcggccgcgacgacttcgtctccgtcagctgggagaaggcgctcgacctcctcggcgacgagctgggccggatccgcgatacccgcgggccgggcgccgtgttcggcggctcctatggctggtcgagtgccggccgctttcatcacgcccagagccaggtgcatcgcttcctcaacatcgcgatgggcggctatgtgcgctccgtcaattcctattcctcgggcgcgtcctcggtgctgctgccgcagatactggccggctacgaagacattaccaagcgtaatgtcacctgggagcagatcgcgaccgacactgacatcgtgctggccttcggcggcatggcgctgaagaactccatggtggccggcggctcgatcagcaagcatgtcgagcgcggggcgatggcagcggcacgccggcgcggctgcgagttcgtcctggtcagcccgctgcgcgacgatctgcctgtcgaggccggggcggaatggattgcttgcgtgcccggcaccgacactgcgctgatgctcggcgtcgtccatacgctggtcagtgaaggcctgcacgaccaggcctttctcgatcgctacaccgagggctggccggtcttcctgcgctatctcaccggcgaaagcgatggccagcccaagcacgccgaatgggccggggcgatctgcggcgtagaggcggaggcgatccgcaaccttgcgcggcggcttgccggcaagcgcgcgctcatcaccgtctcacactcgcttcagcgcgccgagcacggcgagcagccggtgtggatgggcatggtgctggcggcagcgctcggacaaatcggtcttcccggcggcggctacggctattcgcttggagcgatcggctattacggccgccgcgtcaacgacgtgccggcgccgacactagggcaggggcgcaacggcgtcgccgatttcattccggtagcccgcatcgccgacatgctgctcaatcccggcagtacctatcgctacaacggcgaaactcgcagctatccggacattcgtctggtctactgggcgggtggcaatccctttcaccaccatcaagacatcaaccgtttgcgcaaggcgttcgcgcaagtggacacattcgtggtgcacgagctcggctggaccgcaacggcccgccacgccgacatcgtgctgcccgcgacgatgacgctggagcgcgaggacatcggctattccaccaacgatccgctgatgatcgccatgcaccgcatcgccgagccgttcggccttgcgcgcgacgactacgatatcttcgccgatctcgccgaacgtctcggggcacgcgagccgtttacggaagggcgcacgtcgcgacaatggctaaagcacctctacgagccgacccgcgcatcgcttgcgaagcgcggcctggaagcaccgagcttcgaagaattctgggcgcgcggtagcctggtcgtgccgcagcaacccgatgacggtggccggctgcgccgcttccgcgaagatcccatcaatcatgccctgccgacgccgagcggacgcatcgaaattttctcggccaagatcgcaagtcatggcgatgccgattgtcccggccacccggtctggctcgagaagaccgatatgcccaggccggaggcgccgtgcttcctcgtcgccaaccagccggcgacgcgcctgcacagccagctcgatttcggcggacactcgctggccgcaaagcatcgcggccgagaggtcgcgcgcatgaacccgatcgatgcgaacgcgcgaggcatcaaggacggcgacatcatccgcctgttcaacgagcgcggcgcgtgcctcgccgcggtccatctcaccgacggcatcgcgcccggcgtggtgcagcttccgaccggcgcctggtacgatccgatggacccggaagacgaggcgccgctctgcgttcacggtaatcccaacgtgctcacccgcgatatcggcacctcgtcgctggcgcagggctgcaccggccagctgacgaccgtcgaggtggagaggttcatcggaaatctgccgccgattcgggcgttcgacccggtgtaggggctaacggaaccgctgcggcgcgccgccggtttgggagggcaggcggtcacgccgctgccgccttcgacgggtaccgagcgccggtactgagaccaaacgaggagaactgaaatgatccgcaaggcaacggcagtctggaagggcaccggtcgcgacgggaccggtcatctcacgagcgaatccggcgtgctggcgcagacgccctattcgttcaagacccgctttgagaacgagaagggtaccaatcccgaggagttgatcgcggcggcccacgcaggttgttttaccatggcgctggcgttcggccttcagatggccggtttcacgccggaggagctctcgacggaagccgcggtgacgctcgagccggaaggcaagggcttcaagatcagcaagtccgcgctgaccttgcgtgcaaaggtgccgaacctcgacgaggccggcttcgcgaagatcgcaggcgaggccgagaagaactgcccggtatcgaaggtgctcaacgccgcgatcacactcgacgccaagctgggctagcggcgcgtgctcgcctcggtccacccggaagcgccgggtggacgcgcgtgcaatgcgtggctttcggactagccgccgaaagcctatatgatgcggcagctgcagaaccgacagagcgatcgattgggagcacatcagatgacgacagaacgtgcagtcttggccggaggttgtttctggggaatgcaggatctcatccgcaagcagccgggcgtggtctccacccgggtcggctacaccggtggtcacgtgaagaacgccacctaccgcaatcacgagggccacgccgaggcgatcgagatcatgttcgatccggccaggaccagcttccgaaccatgctggagttctttttccagatccatgatcccaccacgctcaaccgccagggcaatgatctcggcaccagctatcgctccgcgatcttctacacgagcgaggagcagaagcggatcgccgaggataccattgccgatgtcgaagcatcgggcctgtggcccggcaaagtggtcactgaggtcgcgcccgcgcgcgagttttgggaggccgagccggagcatcaggattacctcgagcgctatcctgacggctacacctgtcacttcatccggcccggctggaagctgccgcgccgtgcggctgcgttgggcggctaggtcgccgtgccctgacgtgcgctcgtcgtgacgatccgcgcagatagcgtgacgaggcccatcagcgccgccagcagcccgaacgccagcggcagcccgccgatctgtgcaatgaagccgacgccggccggaccgatgaggacgccggcatagcctgcggtcgtgacggccgcgacggccaggccggcaggcatcaccttttgccgcgccgcgcgtctgaacagcaccggcacgaggttcgaggcgccgagcccgatcagcaggaaaccaccgatggcagccgctgcaaagggtgcggtgagcaggatcacaaaccccgcgatcgcgatcaggctgccccagagcaatgtcgcgcggtccccgatacgcgctaccaccgcgtcgccgccgagccggcctgtcgtcatcgcgatcgagaacacgatgtagccggctcccccttgcgcctccgtcacgagccccgcgccgatcaggagcagcgcgccccaatcgagcatcgcgccttcgacgaggaaggtgacggcgccgagcagcgcaagcagcaggaccgatccgtgcggaagcacgaacaatgggccctcctgcactgacacggaccgcagcaggcgcggccaggtcacgagcatggcgatcagcatcaggacggagcagatcagcgtgcaaacaagcgcccggagttgcagcgatagcagcgccgtcatcagcgcagatccggcgaagccgccgatgctgaacagcgcgtggaagccggacatcagcggtcgtcctgcggcgcgttcgacctccacggcgtggatgttcatggcgacgtcgatcgagccgagcgcggcgccgaaggcgaacagcgccagcgcgagcgtcgtgggggatccggccatcgccagcagcggcagcaccagcgtgagaccgagcccgcctgcgatgatgatcggtctgctgccgtagcgcgcgctgagaatgccggtcagcagcatcgcgaggacggagccgatgccgaggctgagcagaagcagcccgagaacgccgtcgtcgaccgcgagccgcgccttcgcgaacggcaccagcggcgcccagcacgcgatgccgaagcccgcgacgagaaaggcaagcctggtcgctaggcgggtcgccggccgatcggcagaagacatgagaactccgggaaagcagaggcggggcggagcaaaaacccgacaaatgtcgcggctttatgtccgagacgtgcccgcattgtcgcgacttgcgccgaagagcagcaaacggacgcgtaggcccgtgggcgcgttgtccagcagttcaagcgttccgccatgcgcggtcacgatcgcctgtgcaatcgaaagaccaaggccaaatccagccgtctcgtccatggtgcgggcgtcctctccgcgtacgaagggttcgagcatcgccgccttcctctcatcgggaatgccggggccgtcgtccgaaacctcgatgacaagccgatcctccgatgttgacagcgcgacctcgacccgggttccgaagcgcgtcgcattgtggacgaggttgctgaccgcgcggacgatctcgtccggccgcaacacgaaggcggccctggcggggcccgaatagctcaccgcgtggccagagtcggtaaactgctcgcacaccatctcgagcaatgcggcgacgtccacaagcgtcggcttgaccgggctttcactgcgcaacaacgagagcaccgactccagcatcgactgcatctggtcgagatcgcgcaccgtctgggtgcgctgagccggatcctcgatcaattccgagcgcagccgcagccgcgtgagcggggtacgcagatcgtggctgatggccgcgagcatgcgcgtcctgtcgttcatcagcgcaccgatgcgctcgcgcatccggttcagcgctctggctgcggacctgatctcctccggcccgttctccggcaatggctgcgatgactgattcaggctgaagctctctgccgcgcgcgcgaaggccgacaaaggcgaggagagcgcccggcccgcccagatgccgagcagcgtgacgctcgccaccaggaacagcagcgtggaggtccagaggccgctgacgaaagctggcatcttgggcgatccgatcgtggcctcgagcacgtcgtcgttgccgagatcgaaccagaggcggttgtcgtcggaggtggcaccgcgaatgaggtcgaccttgccggccagcggcgaggggacgttcagcggcgaccgctccggcatgggcgaggcggagacgccttcgcgcaattgcagcttcagtgccggataggttcggcggatgttgtcgagcaccatggcgcgctgtgctttcggcgtgttgtcgatgatctccacgatcaactcgagctgctcgaccggtctgtccgtcagcatcttcggccggctgagcaggaaatatccggcaatcaggatgtggatcaggaccagcgacaccagcaccagcgccgcgatctggccgctgatccgcctgaggctgaacagcgccacgatctcggctgagcggctcatgcttcctccaccaccggcgtgaagatgtagccgcccgtgcgaacggtcctgatcacggacgtctcctgggtgcggtcgagcttgcgtcgcacgcggctgaccagcacgtcgatgctgcggccaaagttgccgccgggacggccgcgcgtcatgctcagcagattgtcacgggtgaggatgcggccggcccgttcgcagaacgcttgcagcagatcgaactcggcgctggtcagcggcacctgcgcgccctcggggtcgcgcaattcccgcaagcgaagatcaatgatccagccctggaacttgaggcgcgttgccgtggggccggcggcaagtccgctcgcttggcggcgcagcacggcgtggatcctggcaagaagctcgcgcggattgaacggcttcggcagatagtcgtcggcgcccatctcgaggccgaggatccggtcgagatcctcgcccttcgcggtgaggatgatgatcggcgtcatggactccatgcgcacccgccggcagaggctcaagccatcctcgcccggcagcatcaggtcgagcacgatcaggtcgatgcggttctgcgacaattgccggtccatctcgcggccattcgtggccgcgtggaccgcgaaggaatgctcgcccagatagcgcaggatgaggtcgcgggtctgccgatcgtcctcgacgaccaggatgttcggggtgccattggtcatgatcgaactcgcatcgggagtgccgatcgttggtcgatttgaggacgtttgtctcgtccgaagaactacggtcatggtgcaatcctacggtcagtcgcggctcagcgccactacgggatcgagaaaggcggcgcggcgcgcggggaagaagccgaaggtgacgccgataccggttgaggtcaggaacgccgcgccgatcgagagcggcgaatagctgatttggaagtccggcaccgcgatgttgacggcagtgccgagcaggaccgcgatcagaatgcccgcgatgccgccgatggacgagatcagcatcgcctccacgaggaactgctggaggatgtcgctgcgcctcgcgccgaccgccatgcgcacgccgatctcgctgatccgctccgacacggataccagcatgatgttcatgacgccgattccgccgacgaccagcgaaattaccgcgattgctgccaccaggaatgccagcgtctgcgtcgtgctggtaatggtgcggcggatgtcgtcggtgttgaggatgacgaagtccctggtgttgtgccgctgggtcagcagcgtggtcaccgcgtcctgcgccagattggtcgagatctcatcgctgattcgcaggagaatgctgcgcaacgcgcggtcgccggtgaactgagcctgcaccgtggtgtagggcaggtagaccgagaggttctggttcgagccgaacccgccctgctgctgcgcgatcacgccgacgatgcggcatggcaccttgccgagccagatcacgcggccgatgccggacgtctggtcgtcggcgaagaaggttttcctcgtattgtcgtcgatgaccgcctgccgctcgatgttgcggacggcgtctgcgtcgaacaggcggcccatcgccagcttggcgcccttgaccagaaaatagctttcgccgaccccgttcacgagcacgttcgactcgttgccgcgatagcgcaccgtcgtgctggtcgacacggtcggcgtgacaccggcgatgaagctctggcgggcgagcgcgcgggcatcgccgagcaccagcgtcttgatcttggcggcgcgggcgtcgccgaaatccttgcccggaaatacctcgatcgtgttggtaccgagacttgagatgtcggacagcaccttgcgctgcgaggcgttgccgagcgcgacgacggacgagaccgccgcgatcccgatgatgatgccgagcatagtcaggaaggcccgtagccggtgcgcggccatcgccaccagcgccatgcgggacgcctcgcgcggccgccgcaaggcgccggaccagccggggcggctgtcccatgtggtggttcgggcggcgggagctacgggccccgccgcggccgtggtctccgtgcggcgatccgaaacgatcctgccgtcccgcagctcgatgatgcgctcggcccgggcggcgacatcggcatcatgggtgacgatgatgatcgtccggccctcgcggtgcagctccttgagaatcttcaggacctcttcgccgctgcgccggtcgagcgcgccggtgggctcatccgccaggatgacctcggcgccgttgatcagcgcccgcgcgatcgagacgcgctgctgctggccgccggagagctgattggggcgatggcctcctcgggcgccgacgcccagccgttcgagcagcgcgttcgcacgtatccggcgctcgcgggcattgacgccggcatagacggcggggatctcgacatttgcggcagccgagaggtctccgagcagatgatagcgctggaagatgaagccgaaatgctcccggcgtagcgccgccagcgcgtccgcatcaagcttggaggcgtccttgccggcgacgcgataggtgcccgacgtcggccggtcgaggcagccgaggatgttgagcagcgtcgatttgcccgaaccggacgagccgatgatcgccaccatctccccggcgcggatgtccagagagaagccgtcgagggccaccacgctggtgtcgccggccgtgaattcgcgccggacgttctcgagcgagatgatggaatcggtcatctcaggggcctcccggcgggccgcccggcatgccgcgcgatacaatctgctcgtttgcttctcccgtgacgacccgttcgccctcggacagtcctgacctgatctcgaccatggtgcggtcgttgaggccggtcttgacctcacgctcgctgacctcgccggacgcgtccagggtgcggacggtgctgcggccgtcggatttgcgcatcaccgccagcgccggaatgaccttcacgcgcttcgcgtcgccggtgatgatatgcacttccgcggtcatgtacgtccgcagcgcatagtccttgttcggcacgttgaagacgccgatgtagtagattgccgtgctggtcgagcttgatgaactggacgagcccgaactcgacgtcgtggtcgaggagaagctcgcgtcgttcttgatcgattcgggcgctggctcgatctgctccagccgagcctcgtagcgatggtcctggtctcccagtatcgtgaagtagagcgattgtcccggccggaccttgacgatgtcggcctcggaaatctcggcccgcaccgtcattgtctcgagctggccgagcacgacgatggtcggcgcggactgcaccgcgttgaccgtctggccctcctgcaccacggtggcgagcaccgtgccgtcgatgggcgcggtgatgcgcgtgtagtcgaggttcacccgcgccgtctccacgctggcttcggcgcctacgatcagcgcctcgagagctgcgatctgggcgcgggtctgccgcaccgtcgaatccgcactgtcaaaatcgctgcgcgaggtggcgcgctgcgccagtgtcgcctgctggcgcgcgagattcgcctcggccagcaccagggcagcctccttctcggccttctgcgcgcggtagttcttcagtgcggcttccgagttgcgcaagtcgttctgcttggtgacggggtcgatctgggcgatgacatccccggccttgaccgtgtcgccgacgcgcacgttgagcgcggtgatccggcccgacacttgcgcaccgacggccgtcagccgcgccggcttgagagtgccgctcgcgagcacctcttcccgcagatcgctcacgatcacgggcgcagtaatgtaggactgcgtcttgctcgacgtgccgaggaaacgtgtggccgccaagacggcggttgcgacgatgacaatcagggccgcggcgattttcaggcgcctggcggtgatgatatcagtcacttcaccgtctcccggaagtgaggtcccgtgttggtgtccacgatgatgggcgtcgacgtttcgaccggatcggtccagccgccgccgagcgccttggcgagggaaatgtagtccttggcggccgacaccttgctctggatcagcgaatcctccgccgaatagagcgagcgctcggcgtccagcacgtcgatgaaactggcactgccggtctcgaacagcgaccgggatagttgggcggcctcgcgatagttcttcgccgcttcagtcagcttggccgcccgcacgcgctcctgcgacagcgacaccagcgcattctcgacgtcttcgagcgcggtgagcagggtcgaatggaacgtggcgaacgcctgatcgcgctgcgcttccgcgatcctgacggtcgcgaggcgcttgcctgcatcgaacaccggcaccgttaccgagggccccaccgaccagctcacgctggaatattttgcgagatcgcctgcgcgcagcgcagatgtgccgaccgagcccgtcagcgacaccgcagggtagcggtcggcctcggccgcgccgatctgggccgtggcttgggcgagcttgcgctcagcgctcgcaacgtccggacggctgatgagaaggtcggcgggcaggcccgtggggagcggcatgcgcggcgccggcaccggcatgggccgtgccatcagcgaagcgacggcgtcgggcggccgtccgagcaggatgccgagccgatggatgtcggccgcgagcgccgcgcggtaggtgggaacgttcgcttccgtgctcgcggcttgcgcggttgccttggcgagatcgacggcgttgccgctgccggcctcgtacttgctgcgggtgagcttctcggtgtcgcgctgcgagacagatgtgcgccgcgccagctcgatccgggcttggtatccccgcgcgtccacataataggcggcgacgtcgccgatcagcgtgacgaggctgtcgcgcaaatcctcctcggccgattgctgcccgcgcaccgcggcttcaatgttccgctgcgtgccgccgaacaggtcgagctcccagctcgaatcgaagccggcctggtgaagcgtgtagggcgccgtatcgaccacggcggaggcggagcccgcgctggttttgttgcctgtcaccgaggcagaaccgctgacggaggggagcaggccggcgctggtctgttgcaccgttgcgcgcgcctcgcgcacgacagccttggctttggcgacatccgggttggcttcgactgcctgttcgatcagccggttgagtacggggtcgcgcaggcgaagccaccagcgatcgagcgtagcggtctggcggcgcgatcccggcttgacgctccactcccggggcatgtcgagcttcggcggcccggtatagtcaggcccgactgcgcagccagccagtgtgcagcccagcaacagcgctgcgcacgccgatccggcgcgcgagagggcggcgtgcaacaggggcctcgtcgggcaatggtcctcctctgcggatggcgcgggaatcgcgtcggacaagtgtggctgcatcgaattggcttgagacccattggccttaccgcggtacgggcggtgcccatggcccttggaaggaagaaggaatagcacgcctcaatagccgcgcgatcgtggcctttcggcagcccgaatgttgctgaatgtaaacagatgttgcggggcatcacgtcgccaacaatgcaggacttcaggcctgtttctcctacgcgtcaagccctcttcgagaaaatattccgctttaccgaaattcggaannnnnnnnnnnnnnnnnnnnnnnnnnnnnnnnnnnnnnnnnnnnnnnnnnnnnnnacaagaaggcgtgtcttgccacctcacgttcgctgtcatcgcccggttcgaccgcacgacagttccgagacggcagcagcacttcgcgctgcatcgcgtccgggatagcgggtccgatcaccaggaaatcggaattcgctgcatgagtccgcccaggtccgcatccgggctcagcggctgtctatcgagcggccggttgttgttgctacgcgcgaacgaagcaccgggtggaaaggcatagtctgtgaacttccgctcgccgggcagcacttcggtcccgccatccagccacgaccgcttgctcacatagatgcgcgttcgcggaccggattggtaagaccgattggggccgcgcggaacgtactcgtagacggcattctgcgtcgtctgttgttgatcgcgcttgccggtgtttgcggcatgcgcggtgagggtagaactgaggaggagggcgaccagcaccgttctggtcgcgacgagcgcgttcatcggcagataatccatgcatgttcacgatgccgcggcctctcgcaccggcgtgggaggctgtaaagaactctggcgttgcgcgatgttgctgcgcccttgtgcggactggcggcatgcccggcacgcgcattgcggtcgttcgctcccgtaaggctcgcgcggtcggcatggtgtccgtattggcgcggctcatccgcccatcaatttcaacgacctgaaacagtgcagcaatctggaagccacatcgcggccacagccgtttcgtttcagagcagcaggtgctcttgaggtgtggaatgtcggtttggcgggccttgctgatcgtggtggcgatgagtggtgtatcgattgcgagttcaattccagcggtgctattgccgcagccggcgtccgcgcagaacgtggacacgatcgtggtcgagggtaaccgccgcgtcgatgccgagacgatccgctcctacttccggcccgccgcgggaggccgcctcgatcaaccggccgtcgatgagggaatcaaggctttgatcgggacaggcctgttccaggacgtgaagatcagtcgggccggcggccgcctcgtggtatcggtggtggagaacgccgtgatcggtcgcgtcgccttcgaaggcaacaagaaaatcaaggacgagcaactctcggccgagatccagtccaagccgcgcgggaccttctcgcgggcgctggtgcaatccgacacgttgcgtatcgccgagatctatcggcgctcgggccgctacgacgtgcgcgtcacgcccgagatcatcgagcagccgaacagccgcgtcgacctcatcttcacgatcgaggagggcggcaagactccggtcaagtcggtcgagttcatcggtaatagtgcattctcggcctcgcgcctgcgcgacgtcatcaagactcgcgagagcaacctgctcagcttcctcgccagcaacgacatctacgatcctgatcgcgtcgaggccgatcgcgacctgattcgccgcttctatctcaagaatgggttcgccgacgtccaggtcgtcgcagcgcttacagaatacgatcccgagaagaagggctttctcgtcaccttcaagatcgaggaaggacggcaatatcgagttggatcggtcgacttccgttccagcattcccagtttcgacgccggttcgctccacacctattcgcgcgtcaacgtcggctcgctctataacgtcgaagcgatcgagaagtcgaccgaggagatgcaaatcgaggcctcgcgccgcggctacgcctttgccgtggttcgccccgccggcgaccgcaatttcgaggcgcacaccgtatccgtcgtgttcaacgtcgacgaaggtccgcggacctatatcgagcgcatcgacctgcgcggcaacacgcgcacgcgcgattacgtgatccgccgcgaattcgatctctcggagggcgacgcctacaaccgtgcgctggtcgaccgcgccgaacggcggctgaagaacctcgactttttcaagagcgtcaagatcgtcactgagcccggctcctccagcgatcgcgtgatcctgatcgtcgatatggaagaaaagtcgacaggcgacttctccgtctcgggcggctattccaccagcgacggtgcgctggccgaggtctcgatctccgagcgcaacctgctcggtcgcggtctgtacggcaaggcgtcggtcagctacggccaatattcgcgcggcatatcgttgtccttcgtcgagccctatctgctcggctaccggatcgcgctcggtttcgacacatattggaagcagcagaagtcgaacagctatacgagctacggcgtgaccacgcttggcttctctccccggattgggctggccttgcgagaggacctctcactccaactccgctattcgctctatcagcagagcatcacgctggccagcgcctacaacaactgcaacaacaacgcgtccaacccctcgctcgcgtacaatcccacaccggcctacatccagagcgtactggggggcgcggatccgaccaactcgacggattcgggcgtctatggatatggctgctacggcgacggcgagtcgagcctgccggttcggaaagaactggccaacggcgcggcctggacctcggcgctcggctacacgctgaactacaacacgctggacaacaccaggaacccgacggacgggttgctggtcgacttcaagcaggattttgcaggtgtcggcggtgacgtcacctatctgaagacggcgttggacaccaagtactacactccgctcgtgtctgacattgtgagcgtgatccatctccagggcggtctcctcagcaagcttggtaaccaggatctgcgcatgctggatcacttccagatgggcccgaacctcgtgcgcggcttcgcgtccaacggcattggtccgcgcgacatcacctatcggagcctgggtgcgagcggcgattcgcttggcggcacgaagtattggggtgcctccatggagttgcagatgccgttctggttcctgcccaaggaagtcggtctgaagggcgcggtctacgccgatgccggatcgctctggggctaccaggggccgacctcgtggtcggcgacgggcgaagtcaacaccaaggcgtgcccgacctgcggactgcaatacgacgacggcaatgtggtgcgatcgtcggttggcgtcggcctgatctgggcctcgccgtttggaccgctgcgcttcgactatgccgtgccgatcacgaagggcaagtacgacaccgtccaggagttcagattcggcggcggcacgtcgttctagcccccgagtatccgccggcaggcatcgacgaagacctctgcgccggtgacgatgtcggcatcagcggtattctcggtccagtggtgactgatgccgccgattgatggcacgaacagcatgcctgcgggcatcacggtcgcgagcatctgcgcatcgtgcccggccccgctgggcatgcggatggaccgggcaccggcgacggccttgctggctgcctcgatcgcgtcctgaaagcccgcatccatcattgcgggcgcaccagtgcgcagcttcgtgaccgtgacggtgcaggggccaatcgcactggcctcgtccgccatggtccgcagcagctgctccagccgcgcgatcacggccggatcatcgtcgcgcatctggaacagcatctctgccccgcctggaatgatgctcggtgcgcccggatcgagcgtgatgcgaccggtggtccagaccgtgcgcgggccgcagtcagtcggaaagcgctcgtcgatcgcgacgcagaacttggccagggcgagccctgcgtccttgcgcaccgccatgcgcgtcgtgccggcgtggttctgctcgccgacaaagttgatctggtactgccagatgcccacgatggacgtcacgacgccgatggcgaggcgcccgctctcgagcgtgtcgccttgctcgatatgggcctccagatacccgacgtgtcgtcccggctcggcggtttcgcgcgggcgtcccgcgaggcccatgtcggcaagggcctcgcgcatggcgcggccgctggtgcggtcacgcgcggcatcgatttcggtgtcggtcacttgtccgacataggagcgcgagccgaggaaatgaccaaaatgtccttcctcgtcgcaccaggcggcgacttccactgcgccattgaacgaaggatcggtgttcagcacgcgcgcagcttccagcgcgtagacgacgccgagcgggccgtcgagccagccggcgtagttctggctctccagatgcgagcctgccagcagcttgggcccatgcttcgcgcttgtgccgaagacattgccgatgccgtctacagccgcggagagattggcctctggcagcttctgcacgagccattccagggagagcttgtgcggctctgagaaggtcggcttgtgcacgccggtcttgtaggcgccaaaggcgcgcagcgcatggaggtcagcgaggacgcgatgtccgtcggcgcgagtgtcaggcatgttcagcaaccttgagcgcttcagcgcggatctcctcgaccaaccgttccttgagctggacgaattccggcgtggtcttgatcttgtaggagcggggatgcggcaggtccacattgatctcggccttgatgcggccgggacgcgcgctcatgacgatgacgcggctgccgaggaaaatggcttcctcgatgtcgtgggtcacgaacagcaccgtcttctggtcacgctcccagatcccgagcagcatctcctgcatcagcgcgcgcgtctggttgtcgagcgcaccgaagggctcgtcgagcagcaggatcttcggatcgttggcgagcgcacgcgcaatggccgtgcgctgctgcatgccgccggaaagctgcttcggccagtggttctcgaagcccgacaacccgacttggcgaatgaaggcgtccgcgaccttgttccgctccgcctcggccacgccgcgctcgcgcaggccgaaggcgatgttctcgcgcacggtcagccagggaaacagcgtataggactggaacaccatgccgcgatcggcgcccgggccggttacctcgcgtccgtcgagcgtgacccgtccgctggtcggacggtcaaggccggcgacgatgcgcagcagtgtggatttgccgcagccggaggggccgaggatggtgacgaagtcgttgttgccgatgacgaggtcggtcggctccagcgctttcgtgggcgcattgccgtgacgtgcgggaaaggtgcgagaaacctgttcgatcctgagcgtcgtcatgccagcttccacggaaagagccaggcgttgaacgccttgaacagaaagtccgagacgaggccgatcaggccgatcacgatgatgccgaagatgatctggccggtgttgagcagggcctgactgtcggtgatcatatgaccgatgcctgaggacgagccgatcagttcggcgacgatgacataggtccaggcccagcccagcaccagccgcaggatttcggcgatatcaggcgcagaggagggcagcagcacgcggcggatgatgccgcgatcgccggcgcccagcgtataggctgcctcgacaaggtcgcggcgcgtggcgccgacggtcaccgcaaccatcaggatcacctggaacaccgagccgatgaagatgacgagcagtttctgcaactcgccgatgcccgcccacaggatcaagagcgggatgaaggcggaggcaggcaagtaacgggcgaaggagacgaacggctcgaggaacgcttcgaccggcttataggcgcccatcagaacgccgagcggcacggcgatgattgccgcgagcgcgaaaccgccgacgacgcgccagatcgtcatgccgatgtcgaacaggaagccgtgcttggtgaggagctcaaggccttcctgcaccatggtcagcggattggcgaggaaggtcttcgacacatggccgccgaacgtcgcccaggaccagagggcgacgaacagcacgaagaacgcaaggccataggccgcgcgctgcctcgatgtaacgggatccagagggcgcatcagactgcttatccgagaatcgacgcgccggtcccgcactcgggcggcaccggcggcgcgaaggtgttacttgatgaagctggcgtcgtagaggtcctcgaccttcggcacggccttgatgattccgatctcgagcaggagctcggccgcctccttgttgaaggtcaggaaatcgccggcgaagaacttctggttcgcggccttgtcctgccagcgcagatacttcgccgaattgccgaactgctcgccggtctgcttcacgtcggcgcccatgatctcgtaggatttggcctggtccttggcgatcatctcgagcgcctcgaaatagctgtcggcgagggccttggccgccttgggattctcggtcaggaacttcggcgtgcagccgaaagtatccatgaccatcggatagtcgagcgtggtcgctatgatcttgcccttgtcgggcgctgcacgcaccgtcgaaagataaggctcataggtcatcgcggcgtcgttctgcccggaaacgaaggcctgcgcagcggcagccggctccaggttcacgacggtgacgtccttcacggacagcccgttcttcttgagcatccaggccagcgcaaagtagggcgaggtgcctggtgcggaggcggcgaccgtcttgcccttcaggtccttgatcgcggcgacgtcgttgcgcacggccatgccgtcggcgccatagctcttgtcgagctggaagatctgcttggtcgcaacaccgttggcgttccaggaaatccaggtctcgaccgtggtcgccgcgcactggatgtcgccggatgcgatggcgagatggcggtccttctgcgggatcttcttgatggtgacgtcgaggccgttcttcttgaagatgccggcctccttcgccagcgtcagcggcgcgaagccggtccatccggaaatgccgatgccgaccttgacgccgtcggcgagcgcgggagtggaggcggcgagagcaatgattgtcgcaaatacctttgaactacgcatgattgtcgtcctcttacagatcggtggattgacgttctgttgatcactgccggcccatccggaccgttgctcgaagctttgcacgatttgtgccgacatctcctctcagcctcccttgaatcgtgcgacaaggcggtgagagtcaccgggatagagcaggcgcacggcggtgatcgtgcgcgcgctgcgccaggtgtagcggtcgatcacgaggcagggcgcgccgacggcgatgtcgagcgcttccgccgcgcgttcgtccgcaacgatggcactgatggtgtgttccgcctccgtccatgggacatggtgaagcagccaggagccgggcggctcgcgcgagaaatccgcggtcgcggcatcagggacggacgacaaatcgatcagcctgtcctcgacggcgaagggcacgttgtcggcgctgtgccggcaggcgatcgcgacgaccttgccggctttcgagacgccgagacgatcgcggtcagcgctggtcgctgtccgcagcttgcgttggatcagctcgtagccgtaggtgcggccgagcgcggtaatttcggcgcggatgtccgcgatcttgagcaccgccgactgatgctgcggccgccgcacgaacgagccggcccggcggcgccgctcgatcagatcggcctgtgccagctccgacagtgccttgttcaccgtcatgcgcgagcagccgtagcgtgccaccagttcgtgctcgaaagggatgcggtgaccgggcggccactcgccggtcaggatgcgcttttcgatgtcggcgcggatgcgcttgtagagcgtcggcttatcggtatcagtcacgaggctcatgcgacgagcctccgcaccgtcgcgttgaatcgctcgcgcgcggcttggcgcaatccgtgccggccgccttcgacgaccttgcggccgccggcccagacgcaatcgatcgcaccgctgcccgccgcaaagatccagccgtcgatggcggcatcgccggtgcgtcccgccagcgatggatgcgacgtgtcaagtgtgacaatgtcggcgtgcgcacctggcgtgaggcccgccttcgtttgcgccagcgcttgggcgccgccagcgagtgcgtggtcgaacaacgtgcgaccggtggaacgtccggcgccgcttgagagcacgttgcgctggcgatgctgcagccgctggccatattcgagctggcgcagttcatcggcgacgccgaccagcacgttggaatcggtgcccacgccgaatgcgccacctgcggcgagaaattcgtgcgccgggaatatgccgtccccgaggctcgcttcggtgacaggacagaggccggcgaccgcacccgtttcggcaaatgcgctgatctcttggtcggtcatgtgggttgcgtggatgaggcaccagcgctggtcgaccggcgcgtgctccagcagccattgcaccgggcgccgcccggaccaggccaggcaatcctggacctccttcacctgctcagctgcgtgaatgtgcaccggcccgccgtcggccagcggaacgatcgccgtgagctcgtccggcgtcaccgcgcgcaggctgtgcggcgcaatgccgatattgccgccaggcaatgctgcgaccgccttgcgcgatgcggccatcaatgcggcgaactgatcgaccgagcagacgaagcggcgctggccggcatgaggtgcagcaccgccgaaggagccgtgcgcataaaagctgggcagcagcgtgagggcaatgcccgacgcctcggcagcctgcgcaatcttcgtagccatttcggcgacgtcggcatagggcgagccgtcgcgatcatgatgcaagtaatgaaattcgccgacacgggtaaaaccctgctcgagcatctcgacatagagcagcgtcgcaacagccgcgacgtcgtccggcgtcattgcgagcgcgaagcgatacattgtttcgcgccaggtccaaaacgtgtcggtggaatcgccgcgcagctcggccagccccgccatgccacgctggaaggcgtggctgtgcaggctcgccaatcccggaagcgcgatggcgtggcgctcgtccccgacagccggcgccacgcccggcatcacctctgcgatcgtgccggcggtgatcaccacctgcacgtcatgggcccagcctgaaggcaggagcgcggaggcgaaatgcagtcgggacatgattgatgacacgccggctggacagaacggtcccacgattatatgtctagacatataagtcaagcatcccacgcgaagggaccgttgcatggcagagcgcttcgaccggatctggcacaatgcccggctcgccacgatgcgggccgaccgtcccgatctcggcgagatcgagcttggcgtgatcgcagcgctcggtggccggatcgtctatgccggagcgcaggccgattttccggcggacgccgatgcgattgagcggatcgactgcgacggacgctggatcacccccggcctcatcgactgccacactcatctcgtctacggcggcaaccgcgcgcacgaattcgagttgcgcctgaagggcgcgagctatgaggaggtcgcgcgcgccggcggcgggatcgtgtcgaccgtggccgcgacgcgcagggcgagcgaggcggacctcatcgcgagcgcgttgccgcggctcgatgcgctgatcgccgagggcgtcaccacgatcgaaatcaagtccggctatggtctcgacactgaaaccgagatgcgccagctcgccgccgcgcgcaaccttggccgtcagcgtccggttgcgatccgtacctcctttctcggtgcacatgcgctaccggtcgaggctgatggcgacaaagaccgttacatcgaccttgtctgcaaggagatgctgccggcggtggcaaggactggacttgccgatgctgtcgatgcgttcatggaaggcatcgcgttttccgccgaccagaccgctcgggtgttcgagacggcgaggggacttggactgccagtcaagctccatgccgaccagctgtcgaatcttggcggtgccgcactcgccgcgaagttctcggcgctctcggctgatcatctggagcacaccgacgaagccggcgctgccgcaatggcgagatctggaacggtggccgtgctgttgcctggtgcgttctacttcatccgcgagacgcagaaaccgccggtcgagacgtttcgcgaggccggcgtccacatggcgttagcgaccgactgcaatcccggcagctcgccgctgacctcgctgctgctcgcgatgaacatgggcgcgacgctgttccggatgacggtcgccgaatgcatcatcggcgtcacccgtgaaggcgcacgggcactcggcgtggtcgatgaaaccggcacgctggaagcaggcaaatggtgtgaccttgcgatctgggacatcgagcgcccggccgagctggtctatcgcatcggcttcaatccgttgcatcgccgggtctggaggggacagtgacggagcagaacgcagcgatcgtcgtcaccccaggaacggtcggtcttgatgacctcgcgtgtgtgctcgaaggtgcgcccgttgtgctcgatgcctcgttctggccgcgcgtggaggccgcggcggaaattgtcgcgaaggcggcgcgagctgacacgccggtctacggcatcaacacaggctttgggaagctggcgtcgaagcgcattccgcccgatcagactgcacggctccagcgcaacctgatcctctcgcattgctgcggtgtcggcnnnnnnnnnncgagccgattgttcgcctgatgatggcgctgaagatcgtctcgctgggtcgcggcgcctccggcgttcgccgcgaggtgatcaagcagctgcaggacatgttggcgcaggccgtccatccgctggtgccgcagcagggctccgtcggtgcctctggagatcttgcaccgctggcgcacatggcggccgtgatgatcggcgaagggcaggcgatcatcgacgggaaaaccgtatccggcgccgaggccctcaagcgcgcgggcctcacgccgctgacgcttggtcccaaggaaggcctcgcgctgatcaacggcacgcagttctcgacggcttatgccgtctcaggcgtgctgcgcgcgtttcgcctggcgcgcgcggctctcgtgaccggtgcattgtcggtggacgcggccatggcctcgacggcgccgttccgccccgagatccaggcattgcggggccatgccgggcagatcgcggcggccgcgacgctggtcgcgttgctcgacggcagcgacatccgcctgtctcacctcgaaggtgacgagcgcgtgcaggatccctattgcctgcgctgtcagccacaggttgccggcgcagcgctcgatctgatcacgcaagccgcgcgcacgctgatcgttgaggccaatgcagtcaccgacaatccgctcgtcctggtcgagaccggcgagatcgtctccggcggtaacttccacgccgagccggtggcctttgctgccgatgcgatcgcgctggctctgtccgagatcggcgcgatcagcgagcggcgcatcgcgacgttggtcgatcccgcgctcaatttcggcttgccaccgttccttacccccgatcccggcctcaattccggattcatgatcgccgaagtcaccgccgcggcgctctatgccgagaacaagcagcgcgcgctcgcctgctctatcgactcgacgccaaccagcgccaatcaggaggaccatgtctcgatggccgcgcatgccgcgcggcggctgtccgacatggccgacaatctcgccgccatcctcggcatcgagctcctggtcgcagcccaaggcatcacgctgcgcgcgccgcatgcgaccagcaggccgctggctgccgttatgactgcattgcgcgagcaggtgcccgcactcggtgctgaccgctacatggccggcgatcttgccagggccgccgcattgatcgaagccgacgctctcccggccattgcgatcaccacacttccatccgatccgtttccgagactcgattaagaggtctgcatgaaccgccgactggataatgaccgcaccattcgtgccccccgcggcagcgagatcagtgccaagagctggctcacggaagcgccgttgcgcatgctgatgaacaatctcgatcctgatgtcgcggagcgcccgagcgaactcgtggtctatggcggcatcggccgcgccgcacgcgactgggagagtttcgaccggatcgcggcggctctgcgcaagctcgaagcggaccagacgctgctggtccagtccggcaagccggtcggcgtgttccgtacccatgccgacgccccccgcgtgctgatcgcgaattcgaacatcgtgccgcattgggcaacgctcgatcatttcaatgagctcgatcgcaagggcctgatgatgtacggccagatgaccgcgggctcctggatctatatcggcagccagggcatcgtgcagggcacctacgagaccttcgtcgaggtcggccgtcgccactatggcggcagcctcgccggaaatggattctcaccgccggcttaggcggcatgggcggtgcacagccgctggcagcaaccatggccggtgcttcgatgctcgcggtcgaatgccagccgagccgcatcgagatgcgcttgcgcaccggctatctcgatcgccaggccgcgagcctcgacgaggcgctcgcgatcatggcggattcggcgaagacgatgaaggcggtatcggtcggcctgctcggcaacgcagcggagatctttccggaactcgtgcgccgcggcgtcaagcccgacatcgtcaccgaccagaccagcgcacacgatccgatcaacggatatttgccgaagggctggacgctggcggagtgggaagcaaagcgcgcttccgatcccaagggagtcgaacgcgcatcgaagacctcgatggtcgagcacgtccaggccatgctggatttccacgcgctgggcatcccgacactcgactacggcaacaacatccgccagatggcgcaggacatgggcctgaagaacgccttcgatttcccaggcttcgtccccgcctatatccgccccttgttctgtcgtggcgtcgggccgttccgctgggccgcgctttcaggggatccagaggacatcttcaggaccgatgccaaggtcaaggaactgatgccggacgacaagcatctgcacaattggctcgatatggccaagcaacgcatcaagttccagggcctgcctgcgcgcatctgctgggtcggtcttggcgatcgtcatcgcctgggccttgccttcaacgagatggtggcgcgcggcgaactgaaagcgcccatcgtgatcggccgcgatcatctcgacagcggctcggtggcgagccccaaccgcgagaccgaggcgatgaaggacggatcggacgcggtgtccgactggccgctgctcaacgccttgctcaattgcgccagcggcgcgacctgggtctcgctgcatcatggcggcggcgtcggcattggttattcccagcacgccggcatggtgatcgttgccgacggtacgccggaagcggcagagcggatcgagcgcgtgctctggaacgatcccgccagtggcgtcatgcggcatgccgacgccggttacgacatcgcgatcgactgcgcccgcgacaaggggctcgatctgccgagcatggcgagctagcggcctcagtcgctttccaggagccttggcatcgtcgtcttggcgccgtccatgaaagtccggaccgcgtcgcggacaatggcgtcgaggtcggatggaattggcgtcgcgtagatgaacttgcgaatggcgagatagaagatgcggccgtgcaggccccagaacagctcggtctcgcgctcgctcaaggcgtgaacctctgtcccgggcagcttcagctcatgacgcagctcggccgccgccggctcgatgatctcgcggcggacgatgtcgagatagcggctggtgatgccgaacgacttcatgccggagaacacgaagatccgtacccagttatattcgaacacgcggtcgacatagtcgagatagaaacgcgtgagccgggcctccagcggcagggcccgctcgcggatcatggcaccccagtcgggcgaccagcggctgagataaacctcctgatagactcgctcgatcagcgcctccttgctcgggaagtgccggtagattgccgaatgtgtgatgcccatccgcttggcgagctcacgtgtctggccttcgaagccgtgctcggcgaagaaacggatcgcctcctcgacgatcgcacgctcgcgatctgccgcacgcatgttgcggcgctttggcgcagacttgctgcctgcctcggtccgcttgcggaccggtcgtttcgcggttctctgcgcttttcgggccatttcgtcgatgaatcgcacgtatcgagtccttcttagcccaaggtgcatttgtgaccaaatggtcatttcctattgaccgatcctgggcggcgtgtcaggattttgagaccagatggttacaaatctgacgtcccggctgatgagccgacggatctcgaggaaacggcagtgaaggcgagggctttcagctattttcgtgctgcgaccatcgatcaggcgctggacgctcacgcgcgcgcaggggacgatgctcgcttcattgccggcggccagagcctcgtgccggcgctttcgcttcggctgcaggcgccgcggctcttgatcgacatcacccacatcgacgagcttcgcggggtcaggcgcgaaggcggttacctgcgcatcggcgcgctgacacgtcattgcgagatgctgactgaggcgtcgatcgccgagtccgccccgctcttgcacgtggcggcgccgttcgtcgcccatcccgcgatccgcaaccgcggcactattggcggcagcgttgcgctcgccgaccccgcttctgaatttccggcgatgacgctggcgctggacgccgagatcgagatcgtcggtccctcaggtcgccgccgcgtcaaggccgatgatttcttcatcgacctgttcgagacggcgctgcaacccggagagctgattgcggcgatccacgttccactgttcagggccgatcagcgctttgcgttcgatgagctggcgcggcggcgcggagactacgcgctggtcggttgcgggatcatggcgacgtgtcagggcagccgcatcgaggacatccgcatctcgttcttttccgtcggaaatacgccgacacgggtgaagggggctgaacgcgccctgatcggcgcgcgtctcgatgttgagcgtatcgcggccgcgcaacgagcgctcgaatgcgatctcgccccgcccgagggtgacgaggtgccgccggccatgcggctgcatcttgcccgcgtgctgcttggccgcctactcggacgtcttggagagggcgcatgagcggcttcgacgagaccctgttgggtgaggccgacgagacagtgcgggtgcgtttcgtcgtcaacggccgcaaggtcgcctgcgaggtcgcgccgcgcgagacgctggtcgactgcctgcgcgaaaagctcgagctgacgggcacgcatgccggctgcgagatgggcgcctgcggtgcctgcctgatccagctcgacggccgcgccgtgcattcctgccttatcttcgcggtgcaggccgacggcgccaggatcgatacaatcgaggggctgtcggagagcggcgtgattgcggacctccaggccgaattccaccgccgaaacgcgctgcaatgcggcttctgcacgccgggtatgctggtcaatgcggaagaactgctgtcgcttgtggcgcagccgagccgcgagcagatccgcgatgcgttgtcgggcaattattgtcgctgcacaggctatgaggcgatcatcgacgccatctacgcggtggccaaagcgcgctccggcggagtcaccacatgagcgcgcctctgatttcgctcgaccggcccaattcctatatcggccgttccctgccgcggccgaatgccaagcgcctgcttgccgggcgaggccggtatgtcagcgatctccatctgccacgcatgctccatgctgcgttcctgcgcagtccgcatgcccatgcgaagatcgtttcgatcaataccgacgcagtgcgcgcggtcgaaggtgtgcatctcgtcgcgacggggccggatctcgcaaagatctgcacgccctggatcggcacgctcgaccatttcaagggcatgacctcttcaccgcaattgccgctgccgctggatcgcgtggtctggtccgggcaggcggtggtcgccgtcgtcgctgaaagtcgcgcgatcgcggaagatgcgctcgagctgatcgaggtcaactacgaggagcttcccgtcgtcgtcgatgtcgacggcgcgcgtgaggtcggcagccccttggtcaatccgggcagtgccaataacgtttgcttccgcagccagcttgataacggcgctgtcgacgacgcgtttgcgaaagcctcccatgtggtggaggaggagttctccttcggccgccatacagcggtgacgctcgagccgcgcgccatcgtcgccgactacgatccggcagccggcatgctgaccgtgcatcatgcgacgcaaacgccataccaattccaggacctctactcgcggcactacggcattcccgaggcccgcgttcgcgtgatcgcgaccgacattggcggctccttcgggatgaagctgcacgtctatcatgaggacatggcggtggtcgggctctcgatcctgctgggacggcctgtcaagtatgtcgccgaccgtatcgaatccttcgtctccgatatccacgcccgcgaccaccgcgtccgcgcgcgcatggcgctggacgccaggggcgggattctcgcaatggacgttgtggatctgaccgcgatcggcgctttctcgacctatccgcgcaccagcgtggtcgagggcaaccaggtgatccgcctgatcggcgcgccctattgcttcaggaactaccgcgccacgctggaggtgatctttcagaacaaggtgcagaccagtcagtaccgcgccgtcggccatcccattgcctgtgccgtcaccgagcggctgctcgacatggcggcaagcaaggtcggcctcgatcccttcgccatacgcgcgcagaatgtcattgccgacgatgcctatccgcatacctcgccgaccggctaccgtttcgaggcgctgtcgcatcaggcctgcctcaagcgcctgcatgagatcatggactatgactcgctgcgagccgagcaggcggacttgcgcaagcgcggcgtctatcgcggcatcggcattgccacgttcgtcgagatcaccaatcccagcccggcattctatggggttggcggcgcccgcatctcctctcaggatggcgcgatcgtcagcctgacgccgtcaggtgaggtgcgttgcctgatctcggtcaccgagcaggggcagggcaccgagtcgatcatcggccagattgtggccgatcagctcggcctcgcgcaggagcgcatcaaggtcatcacgggagataccgaggtgacgccgcatggtggtgccacctgggcctgccgcggtgccggcatcggcgggggaaccgcgctgcagtccgcccgcgcgctcaagcgtaacatcctggagatcgcggcgctcgtcctgcaggagcagccgtccgcgctcgacatcgtcgatggcgaggtcgtggacgcgtcgacccggaaccagcggatgccgatctccgagatcgcgcgcatcgtctacttccgttctgatacgctgccacccggtacgcaggctcagctcaccgtcagccatcatttcgcgccgcagggctatccgttcgccttcacgaacggcattcagggctgcctgctcgaggtcgacgtcgagaccggcttcgtcaagcttctcaagcatttcattgtcgaggactgcggccgtgtcatcaatccgatgctggtggacgagcagctccgcggtggcatcgtgcaggggctcggtgcagcattattcgaggagtgccgatatagcgagaccggccagctcgtgaacggctcgctcgccgactacctcgtgccgatgccgatggagatgcccgacatagtcatcgcccatgtcgagacgccgaccgccgacaccgagctcggcgcaaagggtgtcggcgaggccggcaccgcagctgcgtctgcctgcgtgctcaatgccgtcaacgatgcactcgcgccgctgggcgcgaccatcaactccatcccgattacgcccgcaagagtcctaaaagccctgaagcgattctagaaaaaagacagttggaggagatcatgcccaaatccggttcgacttggaagataacccgccgcgccgcgctcgccggcctctcggccagcgcagcgctgctcgccgcaccccggctcggccgcgccgcggacgagacgatccgcatcggctttccgactccgctgaccgggccgttcgcggcggaagcgcgcgatcaggtcaaatgtgctgagctggcggtgaaactcgtcaacgacaagggcggcgttgccggccgcaaggtcgaactcctggtgcgcgacgacaagctcaatgccggtgaagccgcgacccgcacgctcgagctgatcgagaaggacaaggttcacgcggtggtcggcgcgctctccagcgccgtgcagctcgcggtcaacgaggtcacccgcgcccgcggcgtgatctacgtgtcgatcagccagtccgacaccatcaacgaggccaaggatttcagcaaatacaccttccatgaggcgctcaatccgcacatgacgacagccgcggtggcgcgccagaccctgaagaagggcatgaaggtcgcccatctcgtcgccgactatgcctacggccacgagatgctgcgcggcttcaagcgcgctcaagcggcgatcggcgcggacaacgttggagagatcctgcatccgttcggcgccgcggactactcgacattcatgccgcgcctgatgtcgatgcggccggatgtgctgtgcatctcaaatttcggccgtgaccaggccaatgcgatcaagcaggcggtggattttggcgtcaagcagcagatgaagatcgttgtcccggtgatcctgcacaaccagcgcctggccgtcggccccgacgtgttcgagggtgtgatcgggggagccaattactactggggcctcgaggcgcaaagcaagtcggcagcggctttcaacgcagccttcaaggcggccaatggcggcgcgattccgaccgattacggcgcctatggctactcaggcgttgcctcgctcctgctcgcgatgcaggctgccggcggcaccgataccgacaaggtcgtcgaagcgctggagaagctgaagtacgacctcaccaagggcccgcaacactaccgcaaatgcgaccaccagtcggtgcagtcggtgctggtgctggagtccaagaagaagtcggccatgacaggcgagagcgacctgttcgcgatcctcgccagcgatgccggttccgaggacatgctgcgcagctgcagcgagctcggccacgcgacctgaagcctgtcaagatggatctgtcgcttatcatcatgcagcttctctccggggtcgcccttggggcggtcctggtgatcactgcgcttgggctgacgatcgtgttcggcatgctgggggtggtcaacttcgcccacggtgcgctgttcatggtcggggcctatgcgggactgtatctggcgtcgctcaccgggagcttctggtggggtctgctgcttgctcccgtcctgatcggcgccttcggcatgctgatcgagctcgtcctgatccgcaggctctatggacgctcaattgacgatccgctgctgctcacctttgggctcagctacatcctggtcgagggcgtacgcattgtgttcggcagcgatggtatcccgtttccaaccccgccgcagctgatcggtgtggtcgatctcggcatcggtttcttcccgcgctaccgtctgttcgttatcgtgctggtggcggtggtgctgctggcgctctggctgacgctggaaaagacccgcgtcggcctgatcgtgcgtgccggcgcccgcgaccccaccatcatgcaggtgctcggtgtcgatatcggccgggtctggctcgcgatctttgggctcggggtggggctcgccgcgcttggcggcgtgctcgccgggcccatgcgtagcgtcaatccggagatgggctcgctggttctggcggaagccttcgtggtcacggtaataggcgggctcggctcgattgtcggcgcggtcgtcgccggcctcatggtcggcatatccatcagcatggtagcgctgttcgcgcctgagatggcgaccatcgtcatgttcgcgctcatggctgtggtgctgctgatccgcccgcaaggcctgttcggcgtgagagggaggacggcgtgacgcacccttcgagcggcgaggcggtcgccaaaccctcacccggcgggctcggccgggttctcgaccagcgggtgctgctgtccatcgccgtgctcgccctgctaccctggctgctgccgtcaaaagcgctggccgtcaacgtcctgatctacggtgtcgtggtgatgggctacaatttgctgttcggctataccggattgctgtcgttcggccaggcggccttcttcggcgcgggcgcctacttcaccggaatcgcgatcggtcgctacggcgtgccctggttcgccgcggtgccggccgcggtcttgctcagcacctgcctcgccgccgcaatcggcctcgtctcgacgcgcacccgcggcatctacttttcgatggtcacgctcgcgctggcgcagctcgtctactacgtcgcactccaggcggcgtccttcaccggcggcgaaaacggcctgcgcggctttaccgtcgaccgcatcagcctgctcggctttcaggtgaatttcctcgaccccgtcaacaaatactacgtgctgatggccttcgcggcactggcgatgtggttccagtcgcgcatcctgaattcgccgttcggcgccgtcatcgaggcaatccgcgagaacgagcagcgggcgcgcgcctgcggctatgacgtcgaacgcagcaagctggtcgtgttcatgctatcgggcgcgatctcatcgctcggcggctgcatgctggcgttgcatctgtcgatcgtgccgctggacatcctgcactaccagacgtccggcatgatcgtgatgatggtgctgctcggtggcgcccgcagcttcttcgggccgttcgttggtgccgccagtttcctgatcctggaggacgtgatctcgctctggacgccgcattggcagatcttcgtcggcgcgatcttcgtgctgttcgtgctgtttctgcccaggggtatctggggcacgcttctcgatgccatgggcagcggaaaggcgcggcgatgagcggcgagctgcttcgcgccgaaggcatcggcaaacgtttcggcggcttcgtcgcgctggaaggcatcactctttcgttcgcagccggccagctcacctcgatcattgggccgaacggcgccggcaagagcaccttcttcaacatcctctcgggagtgttgacgccgagttcgggcaagctgcacttcagaggacgggagctgaatggcctgccgcagcatcgcttcgtccatcagggcatctcgcgctcctaccagatcacgaacatctttccggatctgtccgtgcatgagaatgtgcgcgtagcagcccaggcgctgatcgtgagctacgatatcttgcgaaaccgcgcgcagctggttgagctcggtgcgcgcgcagacgctgcgctcgacgctgtcgggctgctgaccaggcgcagcgaactcgcaagattcctgtcgcacggccagcagcgcgcgctggagatcgcgatcgcgctggtctcggagccggaattgctgttgctggacgagccgaccgccggcatgggcccggaagaaaccaaggacatggtcgctctgctcgaacgtctcgccgacaagcgcaccgtgctcctggtggagcacaagatgaagatggtgctggggctcagcaagcgcgtcgtggtgctgcatcacggccgtttgctggccgacggcgcgccggatgagatccggagcaatccggaagttcgccgggtctatctcggacagagtgagggctatggctgagaccgcgtttctccaagtcgacgatctccatgcctggtatggcgccagccatatccttcatggcatcaccctgcatgtggacccgggcgaagtggtcgccctggtcggccgcaacggcgccggaaagacgacgaccttgcgcgcgatgataggcctgatgccgaaggcgacggggcgcgtgcgcttcgcaggcagggaactgttgccgctccgcgcgcatcagcgcttccatctcggcctcgcctacgttcccgaagagcgccgcatcgtccccggcctgaccgtccgagagaacctccggctcggcctcgtcgcagtcggctccgatatcgaggagcgcgcggcgatcgacgagatcgccgaaacctttccgcgcctgaaggagcgcctcgatcaagagggcgtgacgctatcgggcggcgagcagcagatgctggcgattgcgcgcgcgctgatcgcaaagcccaagatgatcctgctggacgagccctccgagggcatcatgcccgtgctggtcgaggaaatgggcgttctgttccgtcgcttgcgcgacgagggcaagacgctgctgctagtggagcagaacgtcgaatgggcgctgcggctcgccgatcgcgcggtgatcatcgatcaaggcgaggtcgtgcatcaaagcagcgcagcggcactgctcgcggacagagatatccaggagcggtactgcgcggtgtgatctcaggcgacgacctttgctccgttggcttcaaggcgccggtcttctttcgcgagatacgcgccaattgcctcggccggcatgggcttcgcaaaatagtaaccttgaatgaagtcgcagcccaggcggcgcaggctgtcgagctgggcgcgggtttcgacgccctcgacgacgcaggcgatctccatgtcgtcgcagaggccggtgagcgacttgatgatcttgtggctcaccggattttcgttaatgtcggagacgaagctgcggtcgaccttgatcttgtcgagcggtagccggtgcacgtggctcagggacgaatagccggtgccgaaatcgtccagcgaaacgccgcagcccatcgccttcaacgacgcaatcgactgctgtgcgcgcacgaagtcgaaggtcacggcggtctcggtgatctcgaagtcgatccgatgtggcgctagcccgcttttctcgacgatggagatcagcggcaggatgccctctgcggcgcagacatcatgggcggagaggttgaacgatagacggatgtgatcgggccaagttctggcagtcgcgagcgcgcgtaccagtagcgcctgggtcaatggccggatcagaccgatacgctcggcggcgggaatgaagtcggccggggaaactaggccgagacgggcgctgcgccagcgcgcgaggacctcgaagccggcggtatgctcgctcatggcgtcgacgatcggctggaacacaagatccatctcgctactgaaatcggccgtgcgcagcaggttctcgatgacaccgcggctgcggatctcggcctcgagcgcgctcgagaagatcacggtgcggccgcgcaaatgtcgcttggcgtgatacagcgagtagtcggcgcactcataaagcgcctccgacgtcgtcgcggagtccgggaacgatgcgaagccgatcgagcaggacagcccggtatgggccgtgtcgagttggtaaggcagcctgacctggccgccgatgcgttcgccgagccgcatgaggtcggcgtcgtcgggatcgccgcacacgacgaggccgaattcatcgccgccaagccgggcgaactccacgcgctgtgggccgaagccctcgcagacctcacggatgcgctggcccgcctcgatcaggacgcgatcgccgaccgaatggccgtaattgtcgttgacgggcttgaagccgtcgaggtcgatgattccgaccgcaacgcgaactttcctgcgctcggcatcggcgaaggcgctcgacagctcggcgaagaagcggcggcggttcggcaactcggtgagcgaatcgagattggccaggcggaaattctcgtccgagagcgcctgcgtcgctgcctgctgcgcaagcagcgacttgcggctggcgacgagatcggcgaagtcgcgatagtagatgaacagcaccgtcaccatcgcgccggagaccaggaggttgttgacggcgatcgccttcaacgtcggctcgcccgttgcgaagaagaacagcacatagggcacgtcaacgatcagcgtcacgatcaaggccgccgagcgcagatgcatcagtgaaaagatgcagccgatcacggtgaccgccatgtagaatgcgacctggctcttggcgaaggggtcgccgtaggggtagagcgcaaaggaccaggcggtgaagcccgccccgatcggcaaggtcagccagttggtggtgcgcagattgcgcaggatgtcgccgtcgctgcgcacgaggtgacgctgacgcagccaccagaaggtccgcaagcctgcgagcacggtcagcacgctcggcacgatgatcgtcagccagtccggcgccacgttcacataggtgtaggcgaccgcgatcgtgttgctgatgaggatgaagtagagcagcgggatctgcttggagaacgcgtcgaactgcgcgcgcgtcagatccggattgtcggccggaacgcgaaacaaccgcatggcggcggcaagataagacttcaaatcaataatcggcatgaaatatgggccccgctcttctaaaaaacgccggcgatcttgcacggcgggggtaaagggcgggttagatcgggcctgcgcgggacgccagcgcaggttgcgcgctacctcaggattttccggcgccgtgcatgtggtgaggccgcgttaaggatatccggcgccatggccaagtgtttcgggcacaatttcgcctgccgcagctacggcctgctaaccatggctgccagcacggcgcaggggggaagtgcgcatgcgatcaccaaggcagggacatcagcctagtgtgtcgcgccgctggtcgcagaaaaaggatcaggcgagaacggcttggcgctcccgcgtcggctcgcggactcgctcggtgttcctgggttcgacgagccgcgtaaagctgcggttgcccggctgtgcgggtgcctcgacgatgacgccctcgcagacgatctgtccgccgagcatcttgaactccagcttgtcgtagcgcggcatagtctcgccggccgccggcggcagtagcccgatgcttccctggatgttcagcgcggcctcgcctgtgccgtgaagccgcggattccacatcctgattccggtctcggcccagcgctgccggatcagcgcggtgcgatccgtcggttccgcgggccgcgcgcgcactttcggtgcattgcgcatctccggggcaggaggctcgtgcgctggagccggttcgatctcgccaacgcgggctggctcgtttgtctccggcgcaatggctgtagtgagaggaacatcgctcgcggaggtctgcgcgatctcgacgatcagcactggttcgctgtcgggattggcttcgaccgcgacgctgtcggcctcgacgaggagcaccggcattgtctcgacgacaaccgattcgaaatcggtggaaacctcgggtgaggaaactgcctcgaggatgacgtcggggagaatagtcgaagcggtcgcgccgtccgctgatgaagccacaatctcttctgcgaggacggagtcaacctctgcgcagttgccagcgggcgcttcatcgtcggcagcgatggcgaggtcagagactgcagttggttcgttctccgcttcggccgacgaagctaacacctctgcggcgactggtgtcgtcgcgggtgtctcgatttccgtcgctcgatccgaagatgagacgtcgctgacgcagatatcggtgaacggtttctccgcgacgacggacgcagccgcatccttctctgggaccggagcctcggtggcgaagtcagcgtcacgcaccggagcgctgctgacctcggggattggagctgcatcagtggaagtggtgtcctcaatgatggccggcgaagcgtctctgtcggtcggcgcgacctcaatattgccgctgtgcggcgaaggccgaagtcgggcaaaggcccagtctaccgcagggatgcggcgcagcaacgatatcagtctcgaaagcactgggagttgtccaagaggtactcggcgtgaggcaatcgctgattcgtcagcaatgcgaaaacctgccccggccgtcacacccgtgtcaatgttgggaagaccaattgcagaacatcccccgcgcccggcgcgcggggtttatttcaactctgctttgcttcgcgatgccggcgattgacatgctgcttggcgtggaagggaacggacatccctccggctttcgatcgtcagatcatttgccggcgccggcgcctccagaacctgcgctgccgccagcctgactgcccatattgttcgcgttgctgccgccggccgagggcgattgggcgcccttgctgtcgctggcctcgttctgcatgttcgacgaacgtcccgtcgtcattcccttcgtcccggggccccgtgacgaaggaccaacatcgccctgagttccgggagcaggttgtgtctgcgcgaaagcaccacctgtcgccagcgccatgatgcatgcggatgccaggatgatctttttcatcggactctccttgattacgtccccagacaacccgcttgcaccaacgacgttcctgccgacgcgcgccagccctttgcatcaattgtcgttgctgcctaaggtcggggttccagtcctcaacgccagcggctattgaggacctcattgtcttgctgaggacgcgcatgagaaaacttgccaccgtcggagcggtcttgctctggtccaccatcgcattcgcacaggatcgcactatcaccgtagcctcgaccacctcgacggagcagtcggggctgttcggccatctgctgccgttgttcgctaaggctgagggcatcagcgtgaaggtcgtcgcggtcggcaccggccaggcgctggatatcggacggcgaggggatgccgacgtggtgttcgtccatgaccggcccgccgaggacaagttcatgtccgaaggacagggcgtgaagcgctttgacgtcatgtacaatgacttcgtcatcgtcgggccaaagagcgatcctgcgcggataacgggcagcaaggatgtggtcgatgcgctgcgcaagatcgcggcggccaaggcgccgttcatctcgcgcggcgacaagtccggcacgcacgcggccgaactgaggttatggaaagaggcgggtgtcgacctcaactccggcaaggacagctggtaccgggagattggtcagggcatggggccggcgttgaacatggcatcgtcgtcgaacgcctatgttctgtcggaccgcggcacctggctgtcgttcaagaaccgcggcgagctcgccatcctgaccgagggcgacaagcggctcttcaatcagtacggcgtcatgctggtgaatcctgaaaagcatccgaacgtgaaggcgaaggacggaaaggccttcatcgactggctggtttcgccgaaggggcaggacgcgatagccggctacaaggtcggcggcgagcagctatttttccctaacgcgtcccactagcacgaacgcgacggtcgacaccgcgacgctgagtgcaagcaggatcaatccgagacccagcgccagtggcaggtcgcccttactggtttcgagagcgatcgctgtcgtcatcgtgcgcgtgaagccgcggatgttgccgccgacgatgatgatggcgccgacttccgcaatggctcgcccgaacgccgcaagaaaggcggtcagcagcgaggtccggcccagcgcgaatagcagggccatgctgcggagggctgacagtccgtcgatccgcgccagatcgccgtactccgcccacagcaggctcgccggccggtgcaccagcgccaccacgattggcgtggccagcagcgtctgcgcgatcaccatggcggccggggtgaacaacaagcccgccgccccgagcgggccggaccgcgacagcagcagatagaggacgagcccgaccacgaccggcggaaggccgagcagcgcattggtcagcacgatgacgacttgccggccgcggaagtgcgtgatcgccagcagggcgccgaacggggcgccgatcagcagcgccacaatgctggccgtcaggctgacccgtaccgagagagcgacgatgcccagcagctcggcgtcggcgttgccgatcagcgtgaaggcggccccgatggatcgcgcgaaatcgttcatccggcctgacgctgttgcgccggctcgatgccggtgatcctggtcacgtccatcgcgaaatccttggtcctcggcagcccgccctgacagcttcggtccacctcggcggcaggccgggccgtccacgcacattcacggacggcaactgcaccggttctcgccgctgcggtcgccacaatcaagggggcgaaattcagtggagctcggggtgcgctattgtcccctgggcagggcgcccgaagcccggccatcatcagggtgctctgggggcccccgggccaagtcccggcagttttgggcagagagagcccgaatcctggcgcggcgcggccgtgagtggctttattctgccggtggatgcactaaggagaggacgggatcaggtcgcacccgcccgggggcggtgctagaccctgatgcaggaacatgggccgggccgctcctggctcgcccgcaaagatgaaggatgtgacgcaatgatccaaaccgttggcatcatcggggcagggaccatggggaacggcatcgcgcaggtctgcgcggcggccgggctttcggtcgtgatggtcgatatttccgatgcggcggtgaaccgcggactttcgaccgtcggtggcagcctcgagcgcctggtcaagaaggagaagatgtcggcggccgaacgcgaagcgacgctcaagcgcatcaccggcacgaccgatcgggcaaagctttcggattgcgatctcgtcatcgaagccgcgaccgagaacgaggagctcaaggtcaagatcctcaaggacctctgcgccacgctgtcgccgcgcaccctggtcgcgaccaacacctcgtcgatctcaatcaccaagctcgccgccgcaacggatcgtcccgaccgcttcatcggcatgcacttcttcaacccggtgccggtgatggcattgctcgagctcatccgcggcctgcagacctccgatgacacccatgccaaggcgctggacttcgccaagcgcgtcggcaaggtggcaatcactgccaagaacagcccgggtttcgctgtcaaccgcatcctctgcccgatgatcaatgaggcgatcttcgcgctccaggaagggatcgcgacggcagaggagatcgatgctggcatgaagctcggttgcaaccatccgatcggcccgctggcgctggccgatctcgtcgggctcgacaccatgctttcggtgatggaggtcttttataggggcttcaacgaccccaagtatcgaccggcgccgctgctgagggagatggtcgatgccggtcatctcggccgcaagaccgggcagggcttctacacctatagcgcctgatcaaggcatcggcggcgggcgtgccagtccgccgccagatcccgcaatttgcgctgcgacaaagacgccgtgcgcaattggcccgacaatgccgaacgggcgcgtgcgggaacaatgaacggatagcagaggacatgtcggatcgattgaaggccgaacgcgaggcggcggctgcgcggcggagcctgttaacccaggatgcgatcgagcgcaccgggatcaccgaggagatgatcggggaactcgtcacccgcttttatggacgcgtgcgcgaggacgcgcttctggggccggtgtttgccgtcgtccagaactgggacgaacatctggccaagctccgggatttctggtcgtcggtcgtgctgatgagcgggcgttatcatggctcgcctatgcgggcgcacctgccgctgagcctggccggcgatcatttcgaccgctggctcgatctgttcgagcagaccgcgcgcgaagtctgcccgccgacagcagctgcgctcttcatcgacaaggcgcggcgcatcgccgacagtttcgagatggcgtcagcaacggtcgcaggccgtatcgcatcgccgcgtcacgtgctcaggtcgtgaatacaaggagccctcctgacaagcgtgcggctcgcgccggccgatggcgcgttgcaccaattccagcagcagttggctgacctgcataatcatcatgctgctcgcgcgatcagatgtagaacttacgaaaacaggcctgaacgcgtgcagtatcattcaatcactgcgagcaaagccatattgatgcactgcggtgtcaattcttcgccttgttttcggcagagttccagcgcctgctagcgggcatgtcgagagcatcgtgcaacgtcaactcaccactacctgggaatattgcggaagctgacgccgacgcgcgaaccgggcaaacgcggcgcacgctgctgctcggggcgcttgcgaccagcgcgtgtctcggctgttccccccaagtgcgagcaggcgaagatccgcctggctccgacgaacgcccgcggaagggcgatctgctcgtcttctccgagggcgacaacgagggaaagctcataaccgcagcagacgtgccagctggtggacctcccgtgcatgcgtggccgaaagatccgaacacatcggtcgtgcggagcgcctcgcggctcaatgaaatcctgatcatccggctcgatccggccgagctcgatgagaagactcgcgcgcgcgccgtcgacggcatcatcgcctattcggcgatctgctcgcatgcgggctgccccgtcaccgcctgggtgaagagcgatgtcggcgacaaggaggtgttcaagtgcatgtgtcacaactccgaatatgatccacgctcgggcgcgcaggtcgtgttcggaccggcgccgcgacggctcgcggcgttgcctctggcgctggcagacggatcgctcagcgtcgccggcaatttcatgggaaaggtaggtggcgcgcagccaggatgaccgaccgttgcgggcgctgcccgcgtcacgagaggccacctccgccggcaggcggatgacggaaacgagcgacaagaattcagaacaagaattcaaacggatgaaaaaggggaacgtccatgaaaacttccatgaccaggaagcaatggttactgtccggcatcgttgccttcacctgcctcgcctcgaccgccgccatgtcaggcccgatcgagaactattctccggtcaccgcgcagcgcctggaaaatccggagccaagcaactggatgctctaccggcgcacctatgatgggcatggctacagtccgctcgaccagatcaacacctcgaacgtgaaaaacctcacgccggtctggacctttgccaccggtgtggtcgagggccaccaagcgccgccgatcgtcaataatggcgcgatgttcgtgacgaccccgatgggtcaggtgatagcgttgaacgcgaagactggcgacgaatattggcgctacaagcggcagcttcccgacgatcttttccagctgcatccgaccaaccgcggggtcggcctgtgggaggacaagcttttcctcgccaccacggatgatcacgtggtcgcgctcgaagcaaagaccggcaaggtggtgtgggacaccaaggtgcaggactacaggaagggtcagtacatgaccctgatgccgttgatcgtcgacggcaaagtcatcgtcggcggctccggcggcgagttcggcgtgcgcggctatatcgccgcttttgacgccaaggacggcaaggagctgtggcgaacctatacgatccccggcgaaggcgagcccggtcacgacacttggcagggcgacgactggaagaatggcggtgggtcggcctggatgaccggcaattatgacaaggagaccaggacgatctattggggtgtcggaaacgcggcgccatggcccggtgagacccatcctggcgacaatctctacaccgcatcggtgctggcgctcgatcccgacaccggcaagatcaaggcctatcaccagtaccaccagaacgattcctgggattgggacgaggtcgaggcgccgatgctgatcgatctgcagcgcaacggtcgcaccatcaagagcctggtccatccgggacgcgacgcgatcttctgggtgctcgagcggacgcccaccaagatcaactatgtcgccggctggccgttcgtcttcaccgatgtctggaagggcatcgacgagaccggcaagccgatcgtggatcctgcacacaagccggtcatcggtaagcgcgtcgagttctgtccatcattgtggggcgggaaggattggccgtcggccgcctatagccagagaaccgggctcgtgtacgtgcctgccaacgagaacttctgcggcggttttaccggcgagaaggtccccctcaagccgggcgagctctggctcggcaccaagccggaagatatcggcctgaaaacaaagccgggcgcggatcatttcggcgagctccaggcttgggatccttccacgggcaagaaggtgtggcagcacaacttccccaagtcgcagctgttcggatcagtcacggcgacggcgggcgatcttgtcttcgtcggtgggaccaacgaccgcaacttccgagccttccatgccaagacgggcgaattattgtgggagcagaagaccaactccggcatcgtcggcatgccggtgtcctatgagatcgacggtacgcagtacatcgcgatccagtcgggctggggcgtggacgcgcagcgcatccaggatgcgctcgtgacgaacaatatcggcatcgaagccaacgtgccgcagggcggcgtcgtctgggtattcgcgctgaagaaatagctccgcgggcggatcgaaagaagcggagcagccggggggtggcgaatgcggcggacggcaacgtccgccgcatttgtgtgagatgggatgcttccccggcgcaaacggcacgaggtgcgcaaagcctgagatcgctatttgcccatacgttcgaccttgtccttttccttctggttcatctcacgaatcttcggatcgggattgtgttgcccggtggtctggttggtcgaggcgggcggggcgttggcgtttggaagggagttctggtccggtccagtcggccgcggggccgtggcgggcggggctgtattgctctgggccaacgcgccggaggccgtcaaaagaaaggcgctcgccagcgagaccgcgagcgcctttgagatgttgatcatcgatctgctcctgtcagatcgatggaaacggtgtgaagccgcttgtgttccgaagcgcgatagacttctgccgcgctcctctcttttctgagcatgatcaatctggaaaagcggggtccactcttccgcatcatgctctatgcctccaattgcttgccaatcggaagcgcgcggatgcgttttcccgtcgcggcgaagatcgcattgatcagtgccggcgcgaacggcggaacgccgggctctccgacgccgctcggcggcgtgtccggatcggccggcacgatgtagacgttggtgacgacgggagagtcatccatcctgacgacctggaagtcgtcaaaattcttctgctggaccttgccgtccttgaaggtaatctcgccgaatttggcgaggctcaaccccatgatcgcggcaccctcgatctgcgaggcaatgcgctcggggttgacataggtgccgcagtcgatcgccgtgtcgacacgtggcaccgtcagtttccccttgtcgtcgacggcgacctcgacgatcgtggcgatgtagctgacgaagctgcggtgcaccgcgatgccgagaccgtggcccttcggcacctttcgcccccaatcgcccttctcggcaaccagctcgaccaccttgcgcagccgcgcggtatcgatcgggtagctgtcgtagggttcgccatagttccagaggtccttgacgttgggcttgaccatgcgggacgagccgatcagctcgagcagcatgtctttctgatcgcggccggtcgcctgcgcgatctcgcccaccatcgattgcaccgcgaaagcgcgcgggatgttcgagaccgaacggaaccagccgatgcgggtatgcgcggccgcttccggattctcacaggagatgtttgcaatctcgaacggcatatcgacgaggcccatgccgacctcgaacggcgcttgatgcaccgtgccggcggcaaaggtcgaagcgatgctcggagcgacgctgcggtgccgccaggcgaccaccttgccgctcttgtcgaggccggcttcgatgcgttcgactgagacagtgtgcaggaagccgttgtggatgtcgtcttcccgcgtccactgcaccttcaccggcgcgccgagctctttcgacagcaaggcggcttcgagcgcgaagtcgcatttcgacttgcggccgaaaccgccgccgagcagcgtcacgttgacggtgacattgcctacggggatgccgagcgtcttggcaacgtcctcgcgggtaccgccggggctttgcaccggcgcccagatctcggccttgtcgcccttgacgtcggcgacggccaccggcggctccatcgcgacatgggcgagatgcggaatgtagtactctccgacgatcaccttgtcggcgcccttcaaggtagcgtccgcatcgccctctttgcgcaggacgaggccgggcttgcgcgaggcttcctcgagctccttgcgataggcgacggagtcgtatttgccgttgggcccgtcgtcccagaccagcttcaaggcgtcgcggcccttgatcgcggcgccggtgttgcgcgcgataacggcgacgccgccaagcggttggaatttggagggccacggccagccgcgcacctgcatcaccttctcgacgccggggactttcagagccgcgtcaggctcgaacgaaaccagcttgccgcccgtcactggcgggcgggcgatcacggcatacttcataccgggcaagcggacgtccgcgccgtaaagcgccttgccggtggtgatgtcgtgaagatcgacgatgcccacctgtccctttccgagatagcggaagtccttgggattcttcagcttcaggccttcgatgctcggcaccgattccttggctgcgtccgcggcgagctcgccgaagccgagcttgcggccgctggcgctgtggacgacctcatggttgaccgccttgacctcggtggccggcacgccccagcgcttggccgcggcctgctccagcatggtgcgggcggaggcgccgatctggcgcatcggcatcagataatggcgcgtgctgcgcgagccgtcggtgtcctggttgccgaacttgacctcgtcgccatgggcctgctgcaccttgaccctggaccaatcggcttccatctcctcggccacgatcaagggtaggctggtgcgcacgccagtgcccatttccgaacggtgcccgatgatggtgacgatgccgtccggagcgaccgaaacgaacacgcgcggatcgaccacgacaccgtgcggcatcttgccggcgccggtctcataggcgagggcctggcgcgagatcacgggggcggcgagcacgaagccgccggtaacgccgagtcctttcaggatgctgcggcgcgagatcttctcgaccttgatttgcctttcgaagccgcgaagcttgcggggattgtcgatgaaattcatgtcacacccccgtcgatgccagatggacggcattctcgatgcgctgatagcagccgcagcggcagatgttgccggacatcgcctcgcggatctggtcatgcgagggttttggattttccatcaacagcgcggccgcctgcatgatctggccggcctggcagaagccgcattgtggcacgttgacctgacgccaggccttctgcaccggatgatcgccattcggatgcagtccctcgatcgtggtgacctcgcgtccggcaacgtcgttgaccgacgtgatgcaggcgcgcacggcctgcttgtcgacgatgaccgtgcaagagccgcacaaggcctggccgcagccgtacttggtgccggtcagcccggcttcgtcacgcaggaaccagagaagcgggagatccgggtcgccgtcccagctctgttcctggccgttgatcttcaccttgatcatgatcatccctcgctcttcataagcatgcccaattcaactttcaccgacgccgccgggcgacgggttcttgcgtcgtttcgcccacattccgccgtcgtcccgaacgggcaaatcccggagggaggcaggaacgccatggcgatgtctggatgtgctcgatacctcccgtttgttcttgattgattgaattcgcgcggcatcgtgaggcgcgatcgtaacagagatcgctccggcccggcgttcacagccgagtgttctcaccgggaaaagattgcatccacggtttgtcaaaagcagggcgcgtcatcccaggtgtgcttgcgagatgggcgccaaacaaaaaaggcttcgtccgccacaagaccgtgcggacgaagcaggatgcctcagtcgagggagggagaaacgcaggcaccgcgacttcaagcaggaagcaagcggccctgcgcagtcattcagagaccaggactgaggagccaatggtcctcaaatatgcgtggcgcagaagcggcggcatcgccgcggtggtccccgtgttggggaccactccggctcgctggcgtcatacatgccagcgagcg

SEQ ID NO: 141 - DNA, 3685 bp, Bradyrhizobium colbertium
ggcgctgcaccaaacttgcgtcagagccaaatttgcaagccgattgacatcgatccgctcgcctatctcaccgacgtcctgaccaagatcgtcaaaggtcatcccaaccgcgacatcgaccagctactgccctgggcctaccgcactcaatccctcaaagccgtggcctgaagacgacgcttaccaccaaacgcgcgcgccacgcccaggatcgtcgcacccggctgcaacgctgcagcgacgatgcgctccttgtcaacccgcgaccaatgccgccgtcgctgctccgaagtgattacttccacttccgctttggccataggactagctccaggactagtcctatggcttcgcgaagcctcactgctgacgcaaggcggccgtcaccgggggcttacagcgaaacgtcgaggccgacgtagatcatggcttgtcctccttgaatggaattggtccatgatcgtcagtcaaaacgtgctgcgcggcaaatagctcaggcgatcgggaccgaataccccatctcttccgtgaaccgacttggcttcatgatccatctcctcagagatgacggactctacccattcttggaggagtttgcggggctcagaccaaagcccgccttaaatcgtatggcttcgatcagcacaccatcggcatggaagtgtacgtccgcgcgcgaggagcaccgcttcaagcctgatgttgctgaaggagatcaacaacctttgccattcgatgatggtggatggtgcccgggttgccagatcgcgccgacagaccgcgtggcgatgaagaggtagacgagggatgactaaagatagatgctcttagtagaaaggagaatctcgcctctagtccctccttcgcatctccgagttttccaacggacattgcacggcccgccccagcaaaagaagtgcatcattcccggagtcccgcacgtacaagttcctgatgccacgtgggccacttcgtcatcaactgagtgaacttcgcgtgctccgcgcaccacaccggatcgtccggctgagggttggcgtgaagaatgctgcaaccaaacagcgatcgtgccgaagcgacccgcgcgatctcattggccgaaacctccgccggcaagcagccgtacccgtccaagaaagcgcatgccattttggcgcctagttccccttgcgctccagccatgcagaagcgctcaacacctgtagcaatatcgactagcggcgacgccactgtgctaacggcgtcgtcgaaatcgagaacagcagccacgccgctggccgccatcagcacgttaccgcgatgatagtcaccgtggatgagctgacaatttcgatcgagagtcgcggccagctgctgccaatggcgcaagagggctctcgcggaactcgacacgaattcgtcggtgtagcgcgcatgaaagagagtgcttatcgtacggtgccattgtccagaaatgcgatcagcgctgcatgggggcaataccttcttgagggccgtatgtattgaccgcagggcggctccgacactggttgcatcctgcaccttatcgcaggcaaatcgctcgactacataggcgtgggtcagtctagttgcgttctccgaaagcgtaagcggtgcgccccgcatgggctggactgggcagccttctgcggcaagcttcgtgaccaattgctggaccgccagaagacgcggtagacgcgcactgggtactaccttgacgaaaagagcaggctcagcgtcgacacggtagtagccgaacggagcggggtgcgcagtccttgccctagtgactaaggatccgcgtaactgccgtaggagggcatcagctacctcgccgcaagcgggctcgtacttgagcggctgcggccgtatgtcggagtgggcaggaagctcaatcgattgcatcgaaatcatcgatagcaaggggctgtccagcagcgacggacctaaccagttggcgtcccgcaacgaaatcccaagactcaacgcccaggccagctgcagggaacctgaactgtacctttgacagcgacaacgaagtgccagccggaagatcggtacgcgcgaacagacccatccgatcaggcggaggtagtcgatcagactgcatcttcctttctttggtgcctagtgaccgatagagtcgctcgacgcgcgccatcaagtcgggcagcaatgaaatcggtagggcatgcgccaaatctatgtcaccgcagctaccatcggcccgaatgcccttctcgagcgcgtgcgcgcctaaagccacagcggccaacaagctgtctatgccaacatcatggtcggatagcccaaaaagagcctcgtgcgcttcgcccagtgctggcatcatcctgagattgaacaaatccgcagcggctggtggacccggcgggctgtgctggatcagaagacatttcgcgcccgcctcgcgggcccaatccacagcccgtgcaatttcgtccatgctcgcacgtccggtatccataatcagcggaagaccggtggaggctatcgatcgaataagcggtgcatgcacgatgttactgctcgcgaccttgagtgcgtcaacctgtatgtcgcgcgcaaacgccaacccctcctcgtcatagacgcttacaactaaatccagtttggagtctcgtgcttgccggaagataacagccagatcgcgaagaggcacaatatgacgcgccagcacgttccgataattttcccgaaccatgccccggccgggtacatagtattgcgcatccccatatggtgcggccaactcaacatcgtgtagaatagcgcctttaagcacactggcccccgccgcagcaatcgcggtaaccagttctcgcgccaaaccaaggtctgatttgaagtaaacgtcaatgtcgggaaaaagcaccggcggatttccgggaccaatcacggtacggcctatcgcaaatgctttgctcaattgtcatccctcaagccaatgacgagacaatgcaaaggcagatgcattatgccgttccgcaatctgcgcacaccatgatcatccaattccgtccaggagcgcacggggtcggcctgaggcaaaagatcgaatggcaattcgaaaggcaaaaattcgacgctttcgacacgcggctggctcgataagaacaatctgacgctatccatcgatgccatgttatagccaggattccattgcgcatcccaatgtgcaggatagcgccaatgtatccgcgcatctagggggtatgggttgaagaggcccgtgactagcactgttcccccagccctagcgacccggaggcactcagctattgaagggcggaagtcttcaaaaatgctgtgcgttccggtcatcaagaccgcttcgaactgactcgttgcgattccggtgagatgattggcgtcaccttgcaccactggaactccatgctcattggccagcgccaccaagctagcatcaagttcgactccaagcatcttcgcttggggaaagcggcgtccggcgtacgcgagaaattcgcctgcagcagcccccacatccagcaagcttgctaggcggggatgacgtcccgcgactagatcccccaaccaaatgaacatatgtttaggttgagcgggctgccgatttgtgtagatcgaggtccgcttgtagcttgccgtcttggacggaaatctcgaaagtcggcgatccacttcg

SEQ ID NO: 142 - DNA, 1361 bp, Bradyrhizobium colbertium
gtccgctaatgggatggaccggctgcttcccccgcggggatagtctgtaaagactaccctacagcatccggagaagcagcccatgaccaccacacctttggcctcgatcggcatcgacatcggcaaggaagtcttccatgtcgtcggtttcggcactgacggcaagatcgctttccgtcgcaagatcaagagactggcgctacttgaggtcttcaagagactgcctcccagcatcgtcggcatggaggcttgtctcagcgcgcactttgtcagccgtgctctgcggcaacttggccatcagcccaggatcatccctgcgatctatgtaaagccgttcgtgaagggacagaagaacgactacaacgacgccgaggccattgcagaggccgccctgcggccgaacctgcgcgtcgtgcgcgagaagacacaggatcagctcgacctccaggctttgcatcgggttcgctcccgcctggtctcgcggcgaacggcgaccatcaaccagatccgtgcctttctgatcgagcaaggcatcgcggtcaggactggggcgatggctctgcgaaactcgctcctggcgatcctggagaaccggcaggacgaaatatcgccgcgaatgcgcgatctcatcgtgggtctctacgaagactggatacatctcgatgagcggatcgcgaccctcgccggcgagatcgatcagatcggcgagaaggaagccaactgtcagcgcctcatgagcgtccccggcatcggtccgctgatctcgaccgccgtcgtggcggccatcggcaccggtgaggcattcgagcgcggacgagactttggtgcatggcttggcctcgtgccacgtcagtacagcacgggtggccgatctattctgggacgcatctccaagcgcgggagcaagtatctcaggaccctgttcatccaggctgcgaacgtcatcctgatgcgcccgcacaattgggatcgcttcagcttcggagcatggctgcagaacgcagctccacggctacaccgcaacaagctggcaacggccctggccaacaagctggcgcggatagcatggagcatcttgcgcaacgagaagaccttcgacgcaacccattacgaagtgatcgcaatctgaattctacctcgagttcgcgacagagaaaatgcatggaacggatcgatgaacgcatccagagtctggtgacccaaatggttgcttgccaacctgtccgctaataagaccaacgatgcgtgcgtattcccatcaaggccacggcccgcgagccgatcagacaggccggatacatatcagcgacttccgaaacctacgcacgatctctattgcgaaacgcagccggtccatacat

SEQ ID NO: 143 - DNA, 40835 bp, Bradyrhizobium colbertium
  misc_feature (20946)..(20955): n is a, c, g, or t
gggctaggtgggtgcctcatgccgcttacgttcgacagggtgtggattgtgtgtttcgcggcaaatctcgcgcgcccgatgccaagcttgatgcagttgttaactccgctcgacgggcgactggcaacataggcgttaccgttggtggctgttccgaggtcaagcgatatgacgccggcggcattaagcgaaccgacagccacagaggtaataatggcgctgccgttagcccagccgaaaaaccaattttccccgattacgccctgcgcaaccgtgaaatcgatagccgcgtagaaccgatttctgagcgacccataaccaacgccgatacttgagcgggcggatacggtgtcagtcaagccagcaaggttgtcgtcaacaaccatttgtcgcttccaaacagcagcgcctagagtcgcgtcagtacacatccacacccgaccggccgatgtgttgaaccaccgcgatccgacgtgatagccatctccggtatcatcgccaacgccggggtccgttgtagccgagaggttatcgacaatgcgataatcggttgtgctgcctgcgcgaacagccggcgtcgaaatgagacccgtcccggtgaggacggtgcgcgctgagattttctgatttgccacttatgcggcctccagttggatgttgtcggtggtgccctcaagttcaatgaggtcggttgagccttccaattcgaccgcatgagatgcgaccgcgatcgttacgctgacattcgaactgttcgagctagagagagagccgcgcgtgatccggccgcggaagtagtaatctccgttcgacagcgaagagacgccggtcacagaaatcgtgtcatcggtaatgtcgccggcagacagggtacggtccagatactctgtccacgccccgccggcctggagttgatattcgatgatgaggtgatcgttttccgctgcgtcccggtagtcgccccagccgctcggcagatcgacaaggaagtcaggcgtggcgtctgtctcggcagagttccatgtcagggctggcggattggggttttccgcgctgcctgccgcactcccaaggtgtgagaggtccggaacgccgaccctgattccaatgaatggcatttgtacctctctaagctctgtacttgaggtctggaacgccgactctgtttgaagagcatgcagcgtagctctcttcgttttcagtatcgagttggcacgccgttgctctgtggattagtgcgtgtggctgctgcatcctagaaacttggctcacgcttcttgatctcgcgataggctttgcgcgcttgctcctgcacctcgcgcatctcttggcgcaggccggcgatggcttcggcgcgagccttgctgtccatcgtcttgtcctggcgggtggcctgttcgagcgcccgaaggcccttgagctgcttgtcggcgttccggaagatggtctcggcgtcggagccgacggtaccgcggcgcttgccctggcggaggccgtagcggttgccgccttcctcgatggtggctgcggcgtcatcgctcgcagccggtgccttcatggccttgcggacctgcgccatgcccctctgcacctcgtcccgggcctcatagtaggcttcgccagtcgcctgctcgacattggcgccgacgaagtggcggaggatcgggacctgattgggcggcgtcggaacgccttccagccagttcttgaacagcgtcgtggtccggttggtggtctggccgagaccgccggcagcgaagttccagatgtattgcaggtcgcctggatacatgtcgaccgcgccaggcttgaaagcgttgccgccggagaccttgttgaggaactgcgccacgtcgatcgcgtagggcgaggtggtcgagaaatattgctcgctgtgcggctcgcccttcttgccgaacttcgggtgtatcggcttgcgccgccaatcctcgttggtgcccagctcgagcagcggcatttccatcgacggcatgatgtagcgcagccacgtgcccgggtcggtggccgagccttccgcctggaccggcgagaacgcggagacgatggtggacagatagttcgccgcggcctgcgccggcgtgatcctgccttgcgacgccatggcgaggttttcgccgagcatccagaacacctgcagtccgtagcccatcgggatccggatcgggtccttcgcgcccgggaagtagaagatgaaataccgctcccgctcccaatatttgcggcgcatgtattcgggcttcttgtcctcgtcgtccggagagatcgcgaggttccagagcgtcgtcgcgaagccgccgaccacgagccagatcgccgcgcgccgtgccatcttcgagttgcgcagcaggcggatgatcttcgcgccgccctgcacgcgcgcattgaagaacgcatagaaggcgttgatgaaggggctgtagatgcccttgcggttgaagttggtggtcgactccttcgatagctcggccgccttgttcttggtcatgccggccttgaggccggcatcgtagacggcgaggcgggtaccggcctcgatcgcgccgttgaagaactcgatcgccttcaggatcgagcgcgccaggcgatagggcgccttggcgacggtggcggcataaccctcctcggtctcgtggaacgccgcctcgatctcgcgccgcgcgctgtcgaggtcgttgatgcccatgaaggcgatctgaccgccgtgcttcttccagtcctcgtaaagctgcgcgccgcgcttgtcggcgaacttgcgccgggcgagatcgccgagcgcgccgtccttctccatcagctcgcccatgaaggccgccacataggtccgcaaggtgccgatgttgagcgcgaagttcttcaccagcgaagtgcgctgctcggcgccgagcgtgtaggcggcgtcctgcacgtcacggaacaggttcgggacaaagaagtccgggttgcgcgcggtccggaacgccgagaactgccgcgtcagccagctatgggcttggatcagccaaggcaggcgctggatgccaacgttcttcagagcggtcagcaggccctgatgcttgatccggatgtagtaggtatgcccgccgaccttcaccgcgaagctgtcgttcgcccatccggaggcaacccgcgtcacggtctcgaccaggccggtgtcgcggttgatccgccgcaccgtcaccggccgctcgccttccagaaggtcgagctcgttctcggtcgttgtttcgatcctgccgtcggtcagcacgcgctcggagcgcgagacctcgtacagggacggctgcgggttcgactgcatgaaccgcatcgcggtgcggcccacccggttctgctcgccgcggatgatcgtccgctcgcccatcaggaacaggttcgtcaggatgtcgtcagccttggaggagcggccgagcgcctgcttggtctcaggcccgcgaacgtcgaagcccttgccggtgcgggacacctgcagatcctgcgccatgtcctcgtcgccggactcgaagccgcgcagcgggacgtaatgctggtaagcctgctcccactggccgatcgtctcctcgtgctcgagctgatcgtcgaccatcatgctgcggatcttgcggacgatgccgtcgatccgctgggcgacctgttcgagggcttcgagcttcccggccgcagcgaaggcgtccatgatctcctgcgcctcggcatcggtcatgcccgagccgccctccggcatcatcgggttgatgtcggcgatgtgggcgtttcgctccggcgcgtggcgggcatagaggtagcggtgcagatcctcgcgggtaatgccctggctgtaggcgaagtcgagcgccggcttccagagcttgatccaatagtccttcagccgcttctcggtccggccctcgaacagggtggccgcgagcgccatgttgacaccctcgttgacctgtcggccagtcagctcgacggcggcctgcagccggcgcatgtcgacgtagcggtcgccgagcgcccggttggcgcgcaggaaggctgcatcgagcatgccccaagcacggtcgcgccagttcaggtccggacgcttccaccagtcctgccagcgctccggcagcggctcgtagctctcgaaccggttcaggttgccttgcgggcggacgttggcctgcaccgtcacgttgtccgtaacggccgcgcgacggtcagcgtaggcgccttcataggccgcctcgaagatgtcgctggcattgcggtagccgagcccgttgagggcattcctgacgcgccggaagaggtccagcaggcgttcgaaggcgcggcggatgccgatgtggaggccctgcggttccaggcccttggcccggcgggaggcgtaatactcgaacgccatggcgcggatctcgaagcctgcgatctcgccgatctgctcgtccgtgaaaccataggcccgcttcacgatctcccgcaggcgcgcgtcctcgcgcttcaggacgtccatctcctgctcggtgaggatcttgtcctcaagggcgtggaatgcctcgtggaacgtggtgtcgagcacctgttccagcggataggcgggatcggccagcgcgaccgtgatgagcgcgcgcgccgggatgtaggagccggccgccgtgaccttgtcctggccgaaggagccccagcctgccggcatgttgatggggtgctcagcgacaaagcgcaccgccacggacggcccggtgatcttgcgaacgacgtccgtgagggcttgttcgagattggcccgacgctccggagagaggcgggcagtgcggccgacctcgctggtgacgcgcgcgacggaggctacttcctccggcaggccgcggccgctctcggcgtccttggtgcgctggtcgagcgtcttgatgacctcttccaggcggtcgcgcaggcccttcaactcctcggccttggggaacggcttgccgcgctcctcgcgcagcgaaggcaggcgggtctcggcctcgttgagcttgtcctgcagccgcttgccggtgaacgacgcctcgtagtcgatttcgccttccagcttgtcgatcagcgcgcggccggactgcggcacgaaacccttggcgtcgtgggaatacgcttgctcaacatcgacgatggttgcgccgttgtcggtcagcgcgagcgagatccggtgcgcgtccggatagacgcccagctcgaggttgtagccgagcatcttgccgatccggaccggcttcttggtgtcgcggctggtctggtgcagaagctcggtcgccttgcgcgcgacgatctggccgaagctggtgcgcgagcggaccacgtcgccgtcgataacggcctcgatcggtaccggatcgccgatggcttcattgagcagggcctgcgccatctcgcggttcgtgacgcgctggccgttgatgctgatggcgtagcgggcgttctcgtcgcctgccttcgccgcctcaatggcggcttcgacggcattgttggcgtccagcctggtcgaatagctcttgccctcgacctcgaccgtgcggctcgcagcatcgcgccggacggtatcgatcgcgctctggatcgccgcggccttggccttgccggcctcgatcatgcccgggtagttcttctgcgcccgctcaaggtcgtagatcgcatcgtcgatgccgaacatcttccggcggtgggcgcgttcgagcagttcgagcttgtcgatctcggcgattagcttcacgcgctccaacaggagcgggtctccggaggcgagcgccgcgatctccgccatgccgacggagtcctcgtcctcgaactccatgttgaaggcaccgtcgtacttgcggatgccgttgatcatcttcagcttggtggcgttcaggtcccacatctttgcgtcaacggtgcgctccgtgacgtaggcgaggatgtccacctcgaagttgtcagccccgtacttctccaagagcttgttgccctggcggatgatgcggccctcgcgctgctcgatgtcggagggcttccacgtcacatcgccatggtggagcgcgacaagccgctcctgcacgtttgtgccggcgcccatgcgcggggtcgagccgatcagcacgcggaccgtaccgtcattcacggcgtcgaacagggccttcttctcggcgtcgttgttggcctcctgcacgaagcggatttcgtcggcagggatgccgcgggcggtcaggttggccttgagctggtcgtaggcgttccagccgcccctctgggccgcgcgcagggtctcgatctcgttggcgtcgaacttctccaactgctcgacgaggtcgcggtaccgggcctcgtcgccggcggccagcgccgcatcgcgccgggcgatcaggtcgtcatagtccttgatgaccttcttgtcgctcttggccgctgggacgctgcggtcgatgaacacaagctgcgttccggcatctgcctgggtgcggtcgtagatgtccgagatcttgtcggcgatctgatcgagtttgccgccggcctcgtcgctctgcacggtggggtcggccgcacgcgcgtcgagcgagaccttgcgggcgcgatccatcagcttcaggcgctcggcattgcgctcgtaggggtcgctgatgttcggcaggccgttgaaccctgccacgatgccccgcagcatcgccgactgcgcttcggtcggcttgaccaccacctccttgcgaccgccggtcttgaccttcggcacggggaagcgggcgccgttattgtcctcggcgtaccacttgttgatgtcttcctgcgagaccgcgtcggtgaaggagtaatagagctccatcagggcgcgcatgttcgaccagttgcggccgagccgggtgacttccttcaacccgccggcctcggtcggctcgaactttgcggtggccgagacatactgcgagcgccaggcgtcgaagtgctcgatgccgagatccttcagatcctgcgccgagaggtagcgcatcatcgtgtacatctcgacggcgctgttcgagatcggcgtgcccgtcatgaaggtgacggttccgttcgggctatcccgtagcacgcgcaccttgttgtagaggtcgaacgccttctgcgatccgctcttgtcgcccatgccgcgcacgcccgtcaggcgcgacgaatagaacaggttcttgaactcgtgggcctcgtccacggtcaggtcgtcgacgcccatctgctcgaaggtgagcatgttgtcgcgaccggccttcttcagggaatcgagccggctctcgatggttgtcaccagccgctcggcctccttgaccgtgaacggtttggaccgtccgccgatgccgtcggccgcggcctggtcctgcgcctcctgaaccgcctcctgggcgaggcgcagctcctcctcgaggaaccggctttcggtctccggagagatgccaatgaagccgaacgaggagtgggggacgatcacgacgtcccaatcgccggtggcgatcttggcgaacagccggcgccggcctttcttctcgaactggtttttgccggccgcgagcaccttggcgcccgggtataggcggtagacgtccgcggtccactgatcgacgagatggttcggcaccacgatcatgggcttgcgggacaggcccatccgccgccgctccatcactcgcgcgatcgcggtgaaggtcttgccggcgccgacgacgtggtcgagcagcatgaagcgctcgtagatgccgcgccacaccgcgttcttctggtggcggcgcagcttgatgacctcatccggaaccttgccggggagggcgaggtgggagccgtcgtgctggcgattgacgcgggtgttgaacttttcgttgtagatgtccgtcagcagattgcgccgcgcgctgtcggcgaacacccaatcagcaaactcgttctcgatttcctttgccttcagcgagacaagggcggtcgcctcctgatcgacatacttccgcccttcgccatcttcgcggatgaccttgggcacgcgcgagttgaggatgccgcgcaggatcgcatccgccggaacatcggcggtgccccactggtccgccttctcgcggctatagtcgtcgacatacaggttgaaggagttcgtgacctgcgaatagtggaccttggccgggacgccgagcatgtgggttgcgaagtcggcatagacctgcggcggaatccagttggcgcctggcatggcggagatgttctccgcgctccaccgctcgggctggaccttctgcagggcctcgacgttcttcgtcagcccggcggcttcggccgccttcagcttccgcaccacgttgcccgagagatagccgttcgcagtttcgtacgcgccggtctccgggtccttgtagagcaggggcttgtcgccggcggtcagctcctcgatcgcctcctcacgggtcttgccgagcagctcggcaatccggtccatgtcggcatggccgacttccgagagcgagatcgagagcgcgtcctgcggagtgtcggcccgggtggcgggctcgtatttcggcacgacgcggcgcgacatgatcggcgcgggcttggcggaggcgggcttggccgcctctccggtgcgagccgccttcgcgtgcgtgacgggagcgcggtagccggtctccaaggccagcaccagcgcgccgtccggaaggtcgttcaggaggcggaggttgccctggtcgttgagatagccgttcgagccgacgaatgcctggtaggcgtccgccagcttcttgcggttgccctccatctccgcggccggcgcatcctccgcctcaagggtgagctgacgcttcgtgagatcgcgcaggttcaccagggctttgagcttatcatacttcgccttgccgagccgcatcgcggccgggacgacgttgccctcgaaatagctgcgctcatagacgttgcgggcgccagatttgaccttggcgcccttcgcatcgaccttcggttcgagggtgtaccagcgcccctcgctgtccatcagcaactgccgggaccacgggctatccggcgtgacctcccgcttgaccggctcatagccgccggtcggggtctcgcgctcgctgatctggtagagcttgccgtcggtctgctcgacgtggccgatctcgtgaccggccagcgcgatctcaagggactcgcccatggtctggtagcgcttgagcgtggcatccatcacctcctgatggaggtcgagcacattgcgcggcagggtctggatcgccttgcggagcatcgcgccgagatccgcgcccttggcgagggtgacgttgacctcgcccttctcgcgcatcgtgccggagcgttccagcttgcccatgaccatgttgggcttcttcgcgaaatacgagttcaccaccatcggctcgccgccgagcggatcgcggacggtcgtcgtcttcacccaatccgggatgtcggagaccttgcgctcgtccttggcgttctcgaactgctcggccgcatattcctcctcggcggccgtgtgccgctgaaggaacaggatgtcggtcacgacctccgtgcgggcgttctccttgaaggcggtgtcgggcaggcggatcgcgcccagcagcttcgccttcttcgcaagcatctccctcgcgcgggtgtcctgcgcatccatcaggtagcgcgagacgacgaggatctgcaggccccccggctgcagcgcgtccaacccggcgaggaagaactgattgtggatggaaagcccgttcagctcgggcttgtactggaagcgcagcgactccgagccgaacggcggattgccgatgttcagcaccgcctcgccctcgggcagcggcagcttgtggaggccggagtgcagaacggtgtcctgcggatagagcgccttcgcgatgcgcgcggtgatgctgtcgaactcgacggcgacaaagcgcgtgttgccggcgatctcatccggcaccaggccaaggaagttgccggtaccggaggacaattccagggcgaggccgcccttgaagccgagatggcgcgcggcctcccacatggcatcgacgaccgtgcgcgaggtgtagtgcgcgttgcgggtcgagcggcgcgcggccgcgagctcgtccttggtcagcagggactcgagctgttcgccgcggtccttccagtccgccttcaggttgccctcggtgtcgcggaaggcgttggcgaggccgccccagcccacatagcgggcaagcgtgcgctgctcggcgggggtcgcccgccggttctcgcgctcgatggtcttcagggtctcgattgccgcgatgttgtcgcggaacttcacgccctccgagccctgtccaagctcggtctcgtcggtgatgcggtagttgagggcagggaggttcggggcctcggccggcgttaccggaccggcaggttctcctccggatcggtcggcaccggcggatgcttctgatactcggcctcttttgccgccagctcgcgcgcctgctcgtcctcgaccggctccggcgtcagcaggatgaacttcggcagcgccacttcccgcgcctcgctctcctgatacccgcggctcttcagctgctcgatctccgcctgcgccaaggtcgctgctccctgcagttcctcgtccaacgtcccctgcgctcgcagctccgctaccttcttcggcaggaactccgtccagtgcttcctggccagcgctttcagttctggaacgctcatcggctgactccgccgcgccattatcagtctcctgttgtgagaggtcaattgcgcccgacgcaacgtcctgggcgaactgcttcaggtacgggcgcatcgcgacaatcgcctcgcggcccatgccggcggtctgcacgagatgcttcaccagttcgtcgatcattgccttgatgtcgcgaccggcctccgcgaaatgcgccacgcccgccatgaagaagggcttggcctcgcataggtctcctcgtcgaaggaggggcctgcgccgagcttgcccttcgggctgaacagcgcatcgagccccttcgccacctcggcgaggcccatggcggtgttcttggccgcggacttcgcggccttgctggccgtgcgcttcttcggggcaggcttctcctccggcgcatacttgtcgatcgcctgatcgatgatgctgtcgaggtcgaggtcgtcagaagcagaaggcccgctttcgcgggcctgttgggtgggcttgaggtcgaggagatcggtctgcctgctatcgtcgccgaacaggccctcgtcggcgggtttctgcgccgccttcggcttgagcggctgatcggccttgcgctgcgcctgcttgccctggctctccttctcggcgcccggcaggacggtctgctcgccggcctcggtgcgctcggtgaccggcgctacacgttccggaacttcttcgccgggttgcgcggctcgctcggcttcttcacgcgcttcaccttggccgggtccttcgcgatcttcgcgagcgccagaaacgtgttcgaccggctcatcagctcggccttcttctccgggtcggactcctgctgcgctttctgcttcagcgccgcgctcatcttccggtgttggctcgggttgaacagcatcgaaggctccgaagtcgaaggcatcatagacggtttcctgtgggatgtcgggatcattttcgaggttgcggattgctgcccgctcaagcgcggcgtccgggtccaggccctcgtcggccatgatctcggccgcaaggcgcaggtcggcctcattggtcatgccggcaggcacgccataggcttccagcatcgcctcgatctcggcccggttctgggtgagcagggcgtcacggttggcgttttcctcctcgaggcgctcggtctcgcgcttggacggctcggcctcctggccctcgggcaggcggcgctggccgcgcagctcgttgtcgatggcatcgaggaactcgcgcggggtgctggtggcctcgccggtgccgcggaaatagccggcctcctccgccgcctcgcgcatcaggtcgaggctttcgcccatggcacgcaccacggggaaacgaccgttccggccggggacgttgacgcggtgcgagccggacaggccgatcgcggtcagttcggggtcggggcggagcccacctttggaagcgatgaattggaggaggcttgcaggctgcgaggtggccgaccgtgagggcgccttcttgtcgacagcgcttcttccacgctcagtccttgatccagccttcgcatcactgtcttgggatgcaacccgatctcgcgcgcccatgcgcgagccgactgcgtcttgccctgaaacgtcagccgccgagtcttgcgcatgttctgcgcctgctccagcctggtcgcccagcggacgttgcccggctcgtagcccttgtcgttctccttccgatccagcgtatgctgcgggctcggccgcggccctaccgcttccagaaacgccgggaagctgttcgcccactccggatggagcgtgatcccccgtcccccgtagttgtgatagtacgggttcttggggttgagacaccgatccttcacgttgagccaaagcttgtacatcggcgttctggcctgaccgtgaaacgtcttcggaataggctttcttcttttcgccatttcgcaaccagtctttgagttgatcgacggacaactctgaaacagccttgcgccgctgcggtccgctgccatcggagaacgatagatcgtaggcggccgtcgcgctttcaagatcgggataaccgacaaacagcttatgctcatcgaaccttcccgttgccgggttgaactgatcgatgacgaatgcgcgcgtggacttcgggtcattcccgaaggtgacgtcgacctgatcgccatccttgccaacggtccggcggacatagccgtagtgccccggcatcgtgacagaccaaggctggccgtctgctcccttgccgctgcgctccgcgcctttcggcgtctcgattgtgatgtcgagaccattccacttcacgtgccccttggcgtaggtgccagcctccttctgcgcctccgtggggctggtgttgacatggcccgctgcgcgctcgagatcgtcaggggtctcgaccttgactggctcggcgcgcgatcccacgacggcatcgccttcgccgaacacgggctcggtaccggcttccttcgcggccgcgacctcggccgcgatctgggccgggctcatatccgcgatctgctgtgaatcgtagccgtagccgcggagcagggcggcgtcctcgtcggaggcggttttcgccggggcgaccgtcgcaggaggggtgatttcctctggcgccgtttcagcctgtaaggcactgacattgcttggctgagggttgatttcctcagccggcgactgcgccgtctgtgacggcgcagtcacactcgcgggctggtccggctgcaacgaacctgcaatttcttcctgcgttttggcgttgacagccggcgccgcggtcggcggcggtaccggggattcgccaaggatctgccggatgatctcctcgggcgtgatgggcgcctgctccggggtgggcacgccctcgcgcgcggcgcgatcgcggcccgccgtgaggttgccgagaccaagggtaccggccatgccgccgcccaggatcatgcccacaagcgcgccctgcgccacgcctgcggtgatgtcgcccgggtccttgccgtacaggccgaacttggcgaggttgtcgagcagctgctggcctgcctcctgcaagccttcctcgcccatctccttcatcacgaggccgaagtagcgcttcaggccgccgccggttttcttgtcgagctcgtccgcaatccggccgagaccgatagcctcggttccgccgatgccggcgccgacggcgtaggccagcgccttcttgtaggcgggcgcgcccatgtcgtcggcttcgcggtaatactgctcggcgttctgcgcagcgccggcgccgccggaagcgaaggcagccgggatcttcatggccttgccgattgcaccggtcacgatgaagccgatggcggagccgccgccctggccgagcgcagcgctcaactcctcctcgcgcacaggatcgggctggttctcgcgcccgaccttgcgcgaaatctcgcgcatcttctcggcgatgccggtaccgccatcgagcccaacggcgtcgaggccggcgtcgatcgggcgggcgatgccgccgacgacgtcggggatggcggtgcccacggctccggcaaagcgggaggcggcatcgcgaagcttggtctgggtggggggagcggcgcgctcggccgcggatagagcctgctgggcttgcgcgaggttctcggtcgcagcatcgatctcggcctggatctgctgccgctgcaggtcgcccgtggtgccgcgccggagcgcgcgggtcgatccgtcggcaatgctggccgagcgggccttggcggcgtctaggcgcgcctgcgcctcggcaacgccggcctcggcgcccgcgatggaggcttgccgctcggcgtatgcctcttcgccggtcagcatattcgtgtccatgccgctgctcggcgcgcggaatggcgcgttgtcgagcggctgcacgtccggcatcggctgggttggctggatcaggccgggcgcctcagccgggcgcgcacgcggcatcggcgggttcttgatcggcgcggagccgatcacctcgtcgtcggcaccaaagtcggtctgcttgctggctttcgcgcggggtgcgggaccgatcacttcatcgtccgtcccgaaatcgaccggctggcgggcgcgggcgctgacgtcagtcagtcccttgcgctcgttgcgggtggcgatgaggtccggcgagacaatagcggtcggctcgtcggcgccatcgccgccgacgatcaggtcttcaaatgccatgtggggggttacttcttcctgcgaagttgaccgttgacgatgtagtaggagccggactcgatctggtcgtaatcgtccttggtccggggctcgtagggcgcggcttgcgtgccgtctccgttgaatgcgatctcgcccggattgccggccttcttcgaggccggagcgctgggtgcgggagcggacgagccggccggcatcgtgccatcagggttgagcccgaagcccttgtagatgcgcgcggcctcctgggccttcttctgcgcgcgctcctccggcttgaggcggaaatcgccgtcaatggctcggttggagttctggatcgcgcgctcggccttgtcgaagatcaggcggccgtcgatcgcgcgcggcggcttggggcctgcggcggcgacgttctcctgctcgttcttctgcttcgtgagcacctgataatagctggtcagggccttggtgtaggcttgcttgtcgccgagctgctgtgcctcgatagccgccttgaggtgtttgaccgcgtcgtccgagttggtcttgtcggcctcgttaccagctttcaggccgccgcccatcgcgcgagcgaaggctccaccggctgtattgccggtcacggtcgagagaccgccgccgagcgaggcgagaagtttgttgaccgtcggtccctgctgcgtgcggccggtgatcgccgatacgagatcggcggtagtctgcgggatcggcggacggcccatctgcgcgcgctggatgtcggttggcgcgaatgccgtgatgtccgccggcgaggcgagcatgccctgcggggcatcggctgggcgcggcgtcggcagcgggacagagagcggctgtcgcgtgcgagcgctgatgtcggtcggggcctcatccggaggaagcatgcccctcgtgggctgctcgttcacgggcagagcgccattgtcgctcataccgccgagaagctcccgcagcttggcgagcggatcgtcgccgccgtcggccgactccatgccgagcgggaaattctgcccgacgtagttgttgggtgagatcaggtctgtcaggtccatcagacgtcagctcccatgtccgccgcggcctgcgtggcaaggcgcaaatcgatcgccttgacaccattcacctcgatcacggccgcaggattcacctcctcaacgtcctgcgccatcaggccgatttgccattcgtcgctgccgatatacttgaaccgatagatcggcaggccatccagcgtcgcgccgatcacggaaatgtcggtcttgagcctgcgatcggagatgatcgccgagagcagagtgcttccgatcgagccgagcgcgccccagccggagttgttcggctccgagacggtcgtagtggtctcgcgcggcgtgccggcgagcacggacgtcagccacgaaatctgctgctgatcccagccttggcctcgcaggaactcggccatcttcgccgtgtcggccgcctggttggtctgctgctcgaccttgccggcgtcggccaaagcacccgcagtcttgagcccgcggtcgacggtggcggcatcgagatcggagagggcctttcctccggaaatcgcccgttgcagcatcagattaaggttcgtcttttgcgcgtcggtgtcggccgcgatgtcgctctgccgcaggctcgcggcgcggtcaaatgcgctctgatagccttggccgacgacgccggtccgcgtcttggcttcgtcgcggagctggttcgccagcgcgacaccactgcgcgcatcgccgaatgcgccgtccattgtcgcggaggcatcgagcgacttgcgctgcgcagtgccggtgcgcgcgaggtcatcgagcgcgggctgaagcgccgccgcgatatagggcgacatgtagtcctgaatggtggtgttgccgacgttcttgtcgccgccgagaatgctcgcaggcgtgacacccgtggtgctggaaaacgtcttgtagaggttctcgatgtcggacaggtacgggttcgaggtccctgcgatcgacttgatcaggccaaacgcatcctgctggttctgggtcagaggggccgtcatctccccggtgtaagcctggaaggggcggctcgcgacgttggtcgcattgctcacgttcgtctgtgcggcggtctgcagataaccaggcagcgacgtcgtctgctgcttggtggcttccatgtcgccgaagcaacccatggttcagttcctcggatgcattgcgtagattgagccaacaggctggtagcgcaggagggctgccactttctccgtcttgcctctgcgccggttcgggtttgcgatggtgacgtacagttccttgtcgaccatgtcggcgatcgcgcgggcctcgttgaggagcgcgccgagcacatcgccgttgcgatggtccggatgcacgaaaagatagacttcgcggatgcagtattcgcgcgagtagcggtaccgcgtattctcaaggcccatgacgccaacgagctcggtaccctttaccgccatcaggaacgcgcctttgccctcggtgttgatgagggcatagatgtcttccatcacgacgatcggatcgactggcgcaacggcgacctcttggcccatcatcatcaggagcttgtggatctcgatcgcgtcctgatcagacatcgcgcctcgaacgatcagggtttctgagggggccagcataggtgtccttgggttggagtgatcacatgccgagcatcggcatgttgaagcctagagatttgatcggcgtgtaggtgatcacgatcagaccttgacgtcctgcaccgctggtcgctgacgctgcggcgccaccgttgaacgtgcctgccgcgccgcctccagcgccgtaaaaaccaccgtgatttgcagagatgccggcagaggccccactgaaagctgcgctgcctccgccgcctgagcctgcggagccgtactcggtgccgttactgttagcagcgcctccaaagcctgcatcgccggcaccgccggctgtggccgagctgcttccagcattggcgctcgcaacaccatttccgttcggtccggcagctccgccaccgcctgtcgtcccaccggtaacagctccggtagagcctgccgaaccgccgctatatctggaagcgcccacgccgctggcagcttgaccgcccgcggcgcctgtgtttgcagagcctgcggtgttcgacgttccgcctgcaccacccttggcgaggcagacagcggtgctctgaaaccaagtgtccccgccagcattcccgttggtgcgggtagcgacgcctgccgtcactgccgaaacagccgcgcctccagcaccaatcgaatatgagatcgaagcgccaggcgttaccgtgatatttgtctgtcggctccagcctccgccgccgccgccgctggtgttgaagaagccgacttgagcagcgccgctgccgccgccaccgatgcaatcgacagtatcgatcttgttgcagtcggccgggaccgtccagcttgagcccgatgtcaggatgatcgttggcactattgcagcgccttattgacataggtcgagacgccgttgatgcggcggatcgagagaatgaacttgtgtccattcgttgtcgtgaacggctcgccgatgttggagttcaccgtgaagcctgctgcgaaggtgatcgcgccagccgacgctccattggtgatcaggatgtccatggcgcagtcgctcgccggcacctgtatctgcactgcgccgttgttcccggcgtattggtagttgccgttcactggattgaatgtgaacgtgccggagcccatgttgccggcgtcgtagggcgtcagcgtaaagccgcctgtgacgttctgcccgccagcggttgcaagccgcgacgtgtcgctcggatgaacgtggtcctcgcgggagagcttggtggtgctggcgccgggggaggcggtcccatccatcaaaggatcagccgtaccgagcgccgcagcgatggccgccgccgcaccctcggccgccgtatcggtgtcgaccgggtgaacgtgatcctcatgcgcccaccgtgcgctggtgccgacggcgccagagccgctatcgacaagcggcactgcggtcccagccgagttggagaccgcctcgtctccttcaccgccgtgctcgttggaggctcgctcgatctcccgcagggcctcctgcacccagcgtttgaactcctccggagagtcgttgagtggctggccgagcgcaagaactctcatcggcgtgttccgttggaggagatcaggacgtcaggcttgccgaagcggaaatatccgccgaccgcgtccgtcgtcatctcaagcgagatgtagcggccttcaaggcgcagatcgacgaggtcatcatcctctgtgatcgtgattgtctggctgtctacggtcggctttcgcaagcgatcccaaccctcgaaggtcacggtgatgtcgcctgattgatcctcgaaatccgccaccatgccgtcgatgttgaatatctgtgcccccttcatcaggctcgacggggcgaggcggatcgaagccagcacggcttcgccgtcaccgtcgacgccttcctcgtgcagatagatgtggccgtcgtcgccggccatatagggccgggtgtcgccatggctgaacgcggtaccggatgtccggaccatcgcgccggcggcccaggaatagtcgttgaggcagagcagagcgtaatagctcggctgcgtgtcgccgagggcgatatagaaccagatcacctcgttgtatttggcgacgtactgagcccagcacagataggcttgctccgcattgagccggtcgaacacataggctcggatgtcctcgacgttcgggatgaacgccactgcgccgttgtagagatagaagttggtttgtcccatccagtaggcgattccgttcaccgtgaccttggccgacggcgagacgaggccgcaattgcgaccagcgagccgcgaggagaagatcgcgttggtgccggtgtactggaagatgtagagcgcgaagtccgaccagacgcacgagacatgattgccgagcgatgcgcccgcgatcagttttgtcccctccgcgagggtgcgggtgttggccgtgttgtcgttggcgggcgtccagagtgtgtagtcgttctggctggcccaatcgacccgcatgccatcgcacaacgcgaagacgaaccgctcctcggtgacgaacatatagcggatgtcggtcggggcatcagccacgacggtcgcgcggccgaacgccggaacgtcggctggatcgaatttgtagaggcttccaccgttgtaggcggcgagcaggatgcggccgaagtggtccatcgaccagatgcgcggctcgatgaagatagtcgagaaagcgcgctcggtcccataggttccagttccataggggccggcgccgtagccaaggccgtagatgccgagttcaacaccgatcgggatctcatagtcgtagtctacggacccaccgccgggtccggcggtcgaagaggcgttggtgccagcgttgatggtgtaggaaccagatacagcggtgataacctcgtactggccgtcgatggtcactccaccgaccgcgcttgcgccggaaaagttgacgacgtcgctggtgtttcggccatgggcggcatgcgtcacggtgacgatgctgctgccgtcagtggtgctgaatgggtccgtcaacgtgcccgaagcgtcgagcggcgtgatgtcgtgctgggtccagtcgcgctcgtaaacatagagcttgcgatatgtcccgccggccacatactcaatcgaggagagatcgcgccaggcgtgcatggtgcgcagcgtccctgatgcgatcgccgtggtctgtttcagccaaccgcccatcttctgcggacgacccttcacgaagcgcatccactgcgtatcgacccagcggccttcctcgacgcgatcggactctgtcttaacgatgccgggcggcggcgtcagcggtaccggttcgaactctccatcagccatgggaagcaccctgccttcccnnnnnnnnnnccgctccctgcgctttcgcgcagctcagttgtctgtcggactccgtcccgattgacacaatcatggattgctgattgtgcttgtggcctgcattgtcatggaggatcgtcgtgcgcatttttttcggaatcaccggagtagggctgttgatctggcttggcgcggtgtatttgctgccggagccgaagatggaatgcctgaactggctcgaaggaaagtgcatcaagatgcggtcagcgaagtgacccgcgcccgtcaaatcttgatgcaaacaagaaccgctgcgctctcgggccgagtctctgccccaacgtttgcatctaccgtaacggtcgttgtcgcggtgccaccggcaaggctgtgtgtatgagcaccgcctgaagttaccgtcgtcgtgatgctcgcgaatccagttccggttacggacaccgttccgacgacggcaccgaacgcaccgccacctccgccattattattgttgcttcccgccagcgaagccgcaccgttggtgtgactgtggcccgcgtcggtcgatgttgcggtatgcgtgtggctgccatcgctggcggtcgatccgccaagtgtggtggttgccgacgccgtatgtgtgtgcgcgccgacgagactggcctgatatgtaccgactgccaagctgccgcccgcggcgcgaaggaagcggttggtgtcggtcaggttcggcaggccggccgtcgtcacgccattgccggcgccccatgtggtgccgatcttgtcgtagaggttagggtggtcagcccgaacgaaggtgccgccggagcaggccagcgttcccggaggtgcggtggtcccgccgtgcagaacgaagtttccgacctcgttctcatcctcgcggtagaggatgtcgttgccgtcgcagacaacgtccttgtgggtgccctgaggtatctctatcgcggtgccggaggccgttttcattaacagcacataggcgccgtccgtgttgttgaagatgcgccaccgcttcgagatgttgtcgaccgtaacggttgaatttgaggtcagggtgccggtgaactcgatcatgccggcgcggtgctgggcagccgtcagcgtcgccgcaccgccagtgaccgtcttggtcacatagccggcaatcgcttgctcgaggtaggcgaagacgaaattattgaggttatcgccccaggtgttgttgttactgcccgtggcctgcatcagcaggccgagcagagccgaattggtatcaaacggcattctatccgatctccacctcgaacgtgacgtcgcggtacgacaggtcgctctccgcgttcgtcttgtcgatcaaggcgctcaacatcgtcaggttgttctggtacttcgtctggttcgacatgaagtcgtaagcctgcgcgaggcaggcaacccgaagcaggtgaggtaggcgattggtcagaaagttcgtggtgttcgatccagatagaagggccggcttctcgaacccgaccaaattgagcgtcgctgcgctttcgtatgcacactcgaattgcagcttctcgtcatagatcgcataacgctggggaatgctctcgatcagcgatcctgcgtcataagtgcgggcgctgacaatgttggactcgggacgtagcttgaggtcgagattgttggtgacgtccttgagggcgatcggatcgaggaatccgtcaggcagaggcgcgtagaaatccccaggggacatcgcaatgttgtcgaactcgacccgcatttcgcgcacgcgcaaggtctggaagatcaacgcctgagcctcttcgaggatctgctcggcatcaagctgcgagtaattgacgaaccttttgattgacccaggtgtcgtcttgtccgctaccagcgtggtgtaattcatgctgccctcgcgaactcttcgaagtgcatcttggccaatcgcacataggcggcggaagcctcctcgaccgtatcgaagaaaccgccgtgcagttggcggccgttcaccaccagcctcgcgacccacttcccgctctgcttggaccagaggacgccctttgcaccggaggtgttgtccttcgggcgcttcatgttgatcgcgttctgttggttcgtggcgaggcgtagattgccccacctattgttggcgcgattggtgtctcggtgatcaatctgctcgtctggccattcgccagtcatatagagccaggcgaggcggtgcgcgtagtacttcgtgccatcaattccgatgcgcacgtatccagtcttccggtgcacggttccggcgatgtccccgggcgagtgtcgtcgcccgggggttcgtggtgtgtcgcgccatgaaaaaagacccgtctccgggtcgtagtgaagaagctccttcaggcgctgttgggtgagcatcaggcgctccgcgggccaagcttggtcggcacttcgtccgggccgagaacctgttcgtcgtagacgaggaactcggccagtgccttgtagttggtgaacaccttgttgaagcggcggcgggcctctttgaagacctcgtgctgcgggtattgcacctcgtccttcagccacgcctcgaagttcatcgcggtgtcgtcgccgccctcgtcgtcatccgcttccgggggcgtcgggggctcctgaaggtcaggatcgctgctcggtgcaccggcttccaacttggtcagccggcgcaacttcttctccaccagcgccttctgcgcaggggttttcaccatggacatagcgagctcgccctggtggtcgaacggcaaaccgtcctgttcgaaggcatgggtcaagccttcgccgtgacaggtcgcgaaggctcgcgacctgtcgagtttgagtttcggtccagtcaatgccggctccctacttgacgtcctgaacggcggacgcgccggaaagggagtgcgcgaggttgttcacgccgcccttcgcttccttggccttggggacgctcatgctcgagtcgtcccggccgtggccggtaacgatcgtgccgcgcgccaccttcgaccgctcgatggtggagttgctttcgttcttcatcgtcggatcagtcctcgacgtagcggggccaggcggttgcctgctccccaacgggtgggcgatagccggtctcgcgatcggcggtggaaagccgcgtaaagccgtcaacgccggcattgccggtcatgtcgtcattgacgcggtcgacgggacgcagcggcttgagctgcgtcgggtacttgttgccgtacatctgatctcccttcaggagaaaggccccggattgcgccggggccttcgcccttagaaccagtcgatctcgacttcggtgatgccggtgccggccggcacgccgccaacgcccgcgacgcgggtgatgacgaacgccgtatcggccgggatgaagtccgtctccaacttgatgtggttggtgaagtcggacagcgtcagggcggccccgccacggttgttggccccggcctcgcacagcgcgcgagcgcggtacgggctgccggatgccgtgttaccggcagtggcggaggtcccgagacgatggcgggcatactcggtatagagcgtgccgccagcggtcgaggccgccgagccgacgttgatctccggcaccgaggtggtgcccacggcgtcggccgtcaggtaggtgcggatgtcccgcaccaaccccttcttgcccttcggacctttgaaggtgcgcgactcggtggtggcaccgaacgcggaggacggaaacacgtaggtttccttcttggggttgtcgtaggtgatcatgtgctcctccgttaagccgccgagtcccacatgacgatgcgcgagttggtcgcgtcgtcatgcacgatcccgaagccgccaaggtagtaccaggcgatcgccttcgaacgaccgaagtcgctcgggatgctcgctcggatttcctcggggatgcactgcgcttctgcgacgcgatcggcgccgaagaagaacgcccagctcgacaggccgttgttccatgcatcagcggtgctgctccacggatcgaaggtcgtcgagtcggcagcaccacccttcgggatgaagttctgctcgatgaagcgggtgccttcatagcgcccgacctcgccggagtagatgtggctcaagccagtctcggtgtactggttgatcgactccagcgagttcttgaaggtgcgcagcgtggtgacgtgggtgatgcacccgtagtcatcgccccgagcggtggggatgttgcgctccttcatggtgtccacgatcgccttcacgtggccggtgccgagcgcgacgttgttggtcgtcgagcaggtgccgttggtgtccagcgtgatggcggtggtggagttgccgctctgcgggccggcgcggagcatggtgttcttgaactgcaagaacgcctcgatgtcgaaatacttcttcgcatcgtccttcagcgtcttgtcgatgatcgacacgacgtcgtgcttggccatcgcctgcaggaggccggtgtacgggacgctgttgccagcttccgtgaccgtgaggctcttctgcgagacggtgaatccggtctgcgggatcggaccggtttcggagaggcggcggccctgagtggagacgttggagaacacgtcccaatagaaccgggaaccgcgatgcagtcccttgtcgaccgcgtcctgtgcgtcgcacagttggcggaatttgcagagcggctgaagctgctggcggatcgtgtccgacaattcgtcggagtacagatagccaccttcagcagcaacgctccaaagctgaccagccatggtctttgcgtccttctaagagggcgcgcgttcggtgttcctttgcttcgacgggttgcggaaaggggaggtggataaggtcacacttgcccgcgtgccgctttggcacgctcgaccgccgccttccggctgtccatctgggacgccggagcggagttggtctgagcaggctgcacgttggcgcgctggggttgttgagggattgcccgccgccgatcgtcacggttcaggttgacctgaacgcgctccgggttcggattggtgggcctttggggtgcggtctcctggcgaggagccccgatcttggcgaactcgcgcacgctgttgccggcatcttccagcaacttcgcgaccgagcgaacctgtgccccgcgcagcttgtgcccccggtgaaggttggcgagctgagtggagtccgtggggatcttgtcgtcaggcactccgatcttgcgaaggtcctcggcgtagccgtcgaggagctcggctcggatgagcttcgctgcacgagggtcttgggcaagatcctcgttcttcttcacaaagtcgttgtgggcggccaagtcggtctcgacgtcctgacggacgcgatcctcccagctcacctgtttgactgcagccgtggctacctcggctatggttttgccgagaacttccttggccttgtcggggtcgccatactgaatctgctcgatggcttccttgagcggatcagcggggttttgctgtccgtcattgccgtcgtcagtctcagtggcagtgggtgcgggttcttcggcggggttttgccgggagacgtggacccgcgtcgtctccaaaactcgtttgctctccgcgaggcgttccttcgcctgctcgagatagtcgtcggcggcggcagccttctgcgccagcgcggtgacttcttcgtcggtgtattcgcgctcctcgccgttcaccttcagcctgcgcttggcaggctgggcaggaggcggctcgggagccggcgccggcggcggctcctcgaccttgccggcctggccgtagacctgcgatgggtcgacgaagtcgcccgtggtctcgaccggcggctccttgtcctcgcgcagcttcttgaaccgcgccgcgatcgccgcgcgcggatcctgatcgaggatttcgggcttcggcggttcgggcggacgggggttgtcgtcgacgggcgccgggttgagcgaatgatccgcgcccgtcgtgtcgatgtcctgattgatgacctcgatatgatcttcgggcttcgggggctggttcgtgtcagtcgtcatcggttgcaccgttggttgggagtccaagttgggccgcggtttcctcgtcgatcacgagtccgcgggcttcctgcatctgcaggtcattcaactgccgctcggcctcggggccggcgatcagcaattcgtagagccacttcacgagatcgtcgaagcggcggacctcgttctgcagccggcggacctccgcctgatcggcagcgtccacccagacgagagccgcgagcgcttccgctgcgctctccttggcggcgttcagcaccaccagaagcggctcgctgcgcagcctggacgtcagctcgacctcgaccttcgcggagagctcgacgtcgcgccgcagggccagcttgtagagggcggactgatccatcagcggacctcgacgcgggcggtaccgcccatgcccagcgcgcgggccgcgccctgggcgagatcgatgcagcgtccgcggacgaacgggccgcggtcgttgatccggcactggatcgagcggccggtaccgagatgcgtgaccgtcaccaccgatccgaaggggcgggtcttgtgcgcgcaggtcatgccgtccgggttgaagcgctctccggaggcggtgcgcggcccgctctcgcggccgtaccacgaggcgatgcaggtctcggcataggcggtcgaaacggaggcgcagagcagcgccgccgccagaagcaggcgatacatgaatttccttgggttagagggcgctacttcgccgcggctgcgcgcggctcgagcacgcgatcgagccgctcggtgaggcgatcgatcgctgcagtcagacggtcctcgacctcgcgcatcgcctcgcggtggatgtattcgcgggcgatctgctcgcggtacagcgagaacgcggattgcagaatagcgaccttgtcggtcgcgtccttggcaatgagttcggcattggccgccttggtctcggcggtggcgatcctgctgccgaaagtgagccagaatgttgcgaaggcgagaccgaagccggcgacaccggcaacggcactgattgcggcaaattcgatggtcacttcgccgatcccttcgcgacgcgagcgcgctgaccctgctggcaggttcgggttgccgcgagattgtcgttggcggtaccgagcgcgacgcgatactcgccgacggcaagcttcgggtcggtctgctgcgtgatcctgccatcgtcgagcggatcagccacgttcgcggcaaggtgctcgcattcccgcgacaattggaaaccgttgctcttagcgggaggggctgcgaagtgcccgcagccactcaagatcgtcaggagtaaaggcgcagatagccgccggattgtcgccatacttgctgcggaaaccatcaagctttcccttcgcctctgctgccttttgctctgcctcggccttgagccgctgcgcgtgctctgcggtggcctcggcggtttcgatctggctgttcttccaggcgagctcgttcttcatcgcctcgcgctcggcgcgctcatcggcgacgcggaagccgatcaggaagaagagcagggcagcggcgatcgtatgaatcagcgcggcagccttggcataggcgtaagcctggggccagatgcgctcgatgaacttcaacggccgcgagaccacgaacgctgagacgacaatccacgcgatcacgccgagcgccgggcccgacgtggcgatgtcccagaagaggtctgtcacgcgatattcctcgcgacccaatcggcgacgttctgcttgccgaacagccacagcgccacacagaaggcgacgccaacgcagagcagggcgaagccgagcaacagggcggcgaactgccaatctgtcagcatgccgagaccgccaagcccaaacgtggaagccgcgcccgtcacccaattgcgcacgcgacgaaagaagccggggctcgccggggcggtcgcgggcggcgagaccggctcctccgctggaggcggctcctgctcgccgccggcgtgcggcggttcgatcggctcggcctttggcggctgcggcttgggcttcacgggcggcggcaccggctgcgcggcgccgtcgcgtgagcagaactcgaaatgcatcggatcggtgcggcccttgtagtcgccaccccagagcgcgccctggcgcttgaaggcgtcgaccacaaactgaggcatcgtgcctttgccggcgccgaaaccattgtgggcggcgtcgaggtcgatggccgcgccgtaagcgtggttcgaccagcgcggcggacggccctgcgggttgcccggctcatagccgcggacgtagcgcgggttgtaggcgcccgaatagtgcgagatgcgcaggcggtcgacggtggcctggtcgcgaccacaggcttcccagatctcgtcgagagcagccttgagggcgtccgcggcctttcgatgaaaccggatcgccttgatgggcttgccatcgtaatacatctggaagggcgggacgacgggaacgagctgcttgccgggttcatcgttcgccggatcaccgtagaacgcggcgagggaagccggatcatcgtgcggccatcgagccattgttcgctccgtagcgctgaagcagcgcagtcaattcagagatgagatcgccggacggctgctcggctggcttgttcttgagctcggcttcgcgctggcgcatctcgcggtctgcctcggtattgcgctgttgccgatcgtcgttgacgcggtcgcgctgcatgttctcgcgctcggtgcggacctgattgacgagttgggcgcggtccatgcgctggccgtgcaccagttcggcgaagtccatcttcatgcgcgcgtcgatctcctgcgccttcgcctggttgaccacagccgtggaacggttcttctccgcttccgacttgagcttgtcggcctcggctgcgaccgccggattgggctgctgcggggtgccatccttgatgaagcgcttgccgccgtcgcggtagccggagaggctgaacgcctcgttggtgagctcctcgaggttcggcaccttgcggcccgcgaccacgtcagggtggttctgccacaccggggcaatgaccttgagggcggtcgcgaagttgccgagcttggtctgcgggttcgaggcgcccatgccggcgtcgatgcgcagcgtgacttgctccatcaggagttcgtcggtgatctcgctgacgccgtacttctggaagagctgcgccttgtcggcgcacaggcccagaatggtcttgtcggactcgtaatactgttcgagccgaacgagctggcccatgacgggttcaacccacgtctccacccaggtccgcaggtcgaactcctgcaccgaattggccgatgcggagatcaggttcatgccgccgacggtttcgttcaggctgcggttggtctgcacggtgcccgaattgaactgccccgcctggtcgtcgaagtcgacgttcagccgctccatctccgcataagcggaagagggcacctccggggtctgagcgaactcgatgtcgtcggcgtcggtgcgcaggatgacgctgttgggcccgcgccgctgcaatgcgctcagatcgacctgccggccgcgcttgacgaacgtgatcggcgagacgttctgcttgacctgatcgaggcgcaagttggcgaggtcgttgatctcctgctgcaggggctgccaagcctccacatgcgacatcgggaagatgcgatgggattccagcgcgccggtaccgagcacataggggcgctcgccgtcctgctcgggatacacttcctcgaccggcttggggtcggtcaggtacgcgcgagagcctgcggagtagaagcagatgtcctgcccctggtaccgcatgaagacttcgtagacccagatcaccctgaaatcgccgccgccggtcgcggcctgatccatgcgatcctggccgccttcgcgcgaggctcgcgtgcccgatgcctgaagcttctggtcggtgacggcgctgaggagggtagcctcgggcacctcgttccaaggattgcgcgggtcctgctgcatcttgcggatctcgtcgatccgcatcgggtacttcacgatgaaataggccgcgctctgcaccggatcggtccagtccgccgccgggtcgatgatgacgttttcgagcgcgatcagcttgacgtcgggccggtcgactgacgggctgaaggtgcggaccgtctgcatgagcggctggccgtcctcgccgagcatgggctcgccggtcgcctcgtcgcgcagcggctgctgcgtcaccttctccttcagctcgagcttccaatactgcttggacaggcacgccgacatgatgagcgtgtcctgatgggcgccgatcgcgatccggaaccacgggatcgccgccttgccggacgtgcggtcggtccggtagttgatcagatgctgcatcaggtccgcgttggccttctgcaccggatcgttctcgttgcccgccgagcagttgatcgtgttgacggtcgagaacagcgcggccgcggcggctgcgtttgccttacggacggcaccgcgcgtcttgggtcggaacagcttcgaacggcccttgtagctggccgagaggtatttcgagccgctgaagtgctggttgtggaacgccttgtaggagcggtcccacgcatccttgatctggttgagcatgaactggccgccctgcgtctcggcctgcgagacgagattgagccagtcgacgtctttcttctgctcctcctgagcggcgggcgcgccgccagccggtgacagtgccgccttctccgcgcgcgcgaacaggttgtcgggcttctcgaagccgtcttcgcctggcggtgtctcgatgacagtggtcatgccggaggcgtgcccccattctttaccgccatcttccgcgctgcgatgaaggaggcgacgtcgaggttggagcgggggaggttgaaccgctcaaggatctcgccgccggcgcggatgatcatggccggcgtgatgtcctctgaaaggtggaagacgtacttccattgtccgagcagcaccgggatcgagatccaagcgatgccctgggcgctgtcgcactcgaccacccagaagtggccccgatactgcgagagcaggacgcgcgtgatcgccttggccaccatcagatcccactgcgcgtgggtgtcctcttcctccgggagcaggcccttgcgctcgtagcgcgcctgcagctcgacattgtgctgtccgtgagtgcgatcggcgagctcacggcggaggaggatgttgtcggtgtccatggttccgttcaggctgctcaatacccggcaagaatgtctgtcgcggtggtgccggtcctgacgaccttctgcacctgcaccgggtgccagactccggcaacgagacctttcagcgtcaccgtggcgttgtcggcatcgttggcgaactgcactacaacgtcgccagtaacgccgacatagaggccgcgggtgacgttcgtgaacgtcgcgtcagtggacgagatgtcgacctcttctgccgagcggatgccggtcgtatcgccttgcagtgaagcgccttgacgaggtggcatgtgggtctccttacagcgtggtcgggatcgtgcggtaatagacccgcagtttcaggtctgaattgccggtggtgatctcgctcgtgagcagcatcatgacgaggacggcgttcgcgaccggcgtgatcgaggaaatgcccgacgcggcattgaacgctttcgcgtagcgcgtctgggcggtcgcctggtcgagaaagccggtggtctcgatctgcgccacttcgagaccggacgagtccgtgtacttgatggacagatcctcgcccgcggcgatgccggcataggcggtaccagccgccttgtaggcgacgacgtcgaccagcacgttggcgaggccggcgcccggcgcggcgaggatcgtcttcggcgtggcgttcagcgcgagcagttccgccgacgtgatcgtgacgtccacgaacttgatggtggtctctgcagcctccgccgcggcacgggtggtctcgttgccatagagctccgtgaacatggcatcgatcgcctcgacggtgcgcttgtagctgttgccagcctccgcgttctcgtcgcgggtggtcggcagcttggtgtggctgtcaggagcaacaagggtcgtctgcgccatgtgattgctcctttagccctgatcgcccgcgcgctcgttgccgagcacggcgttcaattcgttcatcgcctcctgatggattgcgtccatcttgcggagcgcgagggcgccgttggtctcgatgtcggcgcgcatctgctcggccttggcgagcgcctggctgcgcacggtgtcggcagccgccttgatggcctgcatcgcgtcggcgaggctggtgggtttgccttcgggcatcttcttcgctccaagatcgtcgatcgcttccgtgagaaagcggtcgagcttctgtccggccgcggtgctcgcgggccgctgataggggtaaggccgtccggatcggggcgtcccggcggtcatgactcagtcctcggcgtaagggccgcggttcgccgggttgtggcgaaactcgcggccgttcgaaaaccggaactcgacctgatcgcgcgcctcgcgctcatagtcgggatcgcgcttcaggaccgcgaccttccagggcacgttgatgttggtcggcggagagtagcgggtcatggtcaagcgtccgggtaagccaccggctcaagcgaagcggtctcgtattggatcgcaggcttgggcgagaggtcgtagatgcgcgacgccgcgtcgatcaggtcgtccttcggcgagaacgggaagaacatcgcctcttccatgaaggcgcgcgtcaggtcgtagatgttgcggtcctcatcgatcagcttgatgggctgcacgatgcggtagttctggcccgtcgcttccatggcgcggtgctcgcggagcgcgccgagcaggggccgatagacgatctggccgatgttgtagccgggcgtttcgcccttggcctcggccttcttggcgtcctcctcggtccacacggaccagagggccttgccgtcgatgccgccgatctccgggtggtagacgatcccgggcagatagaagcggccgacgcgcatatcgggctcaagccgctcgacgcgatcgcgcttggagtggccgccttcgcggggccagttcagctcgacgagctcgaacgcgacgccgtcgcgctcctgccagtccttgatgacctcgtcctcggtctgggcgccgtagcgctcatagccgacgatgatgacctgggtgccaatggcgtcgcgccatttcgtgtagagcttcttcagcgtcgcccagcgctcggacaggttcatgcggtgccgcacgccgtcgagcagatacttgttgccggcgacgtccacgccgatcaccgccatggcggtgcggtccgatgtcttggtccgccccttcgaggggtccaccatgatgtagatgttcatgatggtcggccgcacggtgtagggccggaacatttcggatttgaacatcgcctcgttgcccgcgaccgggttctgaagcatctgcgccgaaacagtcgagcgctgggtgttcttgatctcctcccagcgggcctgcgagaggaacaccggctgccccttcagcgtgccatcgatcgtggccggatgcttccgggccttgagcacgcggcgctcgagcacgacgccataggtgtcggcgaacgaatagcgggtgcctggcatccatttccggacgccttcatggctgccgagattgtccgccagctcccacgcttcggtggtcttgcggatcatctccgggttagtcacgctctcgcgcgtcaccatgtcgtcgtagatgtgcaggtcgtagtgccgcgacgtcggctggccgtcgaccaggccgtgggcctcgaccgtcgactccttcgggttcgacctgcgcttgacgacgatgccgcggtcgagaccccagatcggggcttccttgcgcggatcgtcccaaagcacgtccggatagacctgcttcaggtagtcgttgcgctcgaactcctgcatgatctgcgtcaggaaggcccgcgcgatcggtttggagtgcgagaagatcgcaatcttgatgttcgggtcggtcaggatctcctgaattccgcccgcgaacgtgatgatcgtggacttgtagtggaagcgggcccacagatcgatatagccgtccggagccgcttcgacctcacggcatcgctcgaacagccacgggtgcagcgcgtcgacgcgccggcaaagccccgtcagaaggaaatagcggtcgttgacgccgagaagcgctcgccccttgagatcgagtttcgggacgatcgtcgaataccagcggaccgtctcgtcgtagtcgaaatagggcaggtcctcgaggatcgcccgggcaagcgcgtcattggcggctgtgagatacctcgtgccgcgcagctcacgccgcatttctcttgaacgctgccagcgcgtcggccagcggatcggcgctgccctgcggcgggatcacctcggcctggccgccgcccgatgagatcgtcttcatggcgagttcgcgcgcgcggccgatgcgatcgtacggctcgccagcggctgcaaggctctcggcgactgcgagctgcagtttgccgacggcttcgggctgggtcgcgatcagcgaaggcgccatttcgcccaggaccgcctcgatgatgatcgcggtcttgagcgtctgcttggctgccatggacagcaactgctcgtccgtcggatcgcccgcgatcgcgtcgcggatggccttcaggcgctcccgagcgccgtccatttcaggatccggcttctcggcctccgcgcgcggcgcctcctcgtcaggcggcggcagggccttgaacgcggcgttgacgacgtcctcggccttcgaccgcggatcgccggtcagggccggcgtggcgtcgtcgagggccttacggaccttcttcatcttgtccttggcggacgcagcggccttcgtcgtcttccacggcctgccggcggcttccgcctcctgctgccacttgttgatggtgcgatagctgggcgtggcatagcctgccgccttcagcttcgcctcgaccctgcgaacggaagggtcgatcatttcttcccaggtcgctctcgcgatgtccggggtagcgatcttcttctcgctcacgtctggtctccgaaaaggattgggcccgcaaggccgatccgggggcggatgttgatgccctgcgggcccgggacagcgtgtggacgctgaactaaagggcggtgctgatgcggccgagttcgcgactgaagccgctgttgaggtctctcaaccgctccaagcgcatgcgcagcttgccgagcagtccgtccggatcgctcggcacggcggtcagaccgagcgcgttctcgggcgctggcggaggcgaaccgtgcaggtggtcggcaatgccgatggcctgatcgagatgcttgtcgagggttgtcagctcgttgctgatctgctcgatcagctcaggcagactatcgctcagacgcgcgttgatgctcgcgtcggcgttggcgggtctgttcacttcaaggctcctagcacctgcggcgggggcggcctcagagagaccttgatctcaccggcgcaaacccgcaggccaaccttgcgcgagatgagggtgtttgcctcgtccatgtcgccggcgcgcagcgcagccttgatgccgacgttggcgaccgcgatctcgcgagcgatgcgctccggcgtccaggcgcggatcagcgtcccgccgaccgggaaggggaacggcttgcgaatcacgactttgcagcttcggctttcgcggcctggcccttctgatagggcatccactgcgcgaagccgccgtactcgttgccgacatcgtcgtcctgcagcagcgtgcgcgaggtggcggcgaactgcttgccgttcgcgtcggtcacgagcaggttgaccatgcgagggccccacacggcgcaaatctgcgcggcgagcgggatgacgttgccatccttgtcgcgctgaaccaccatcccataggggctcagaagctcgttcttgtacggcgtgtaccagacgatgcggccgttggtcggctcgatcatgtcttgctccaacaaaaatggccccgccgggatggcagggccggggaatggtgcctcgggtgggattcgaacccacgcactgccgcctacaatgcggctgctctaccagcctgagctacctcggcttactcgaactcgaacggctcaccctctcgaccgccagcgcgggagaaggcgagcaggaacaggccgaagcccgtcaggatgcaggcgacgccgatgatctcctcgatgctcggcatggcgctactcgttcaccgggcgaagctcgatctcttcccactcggtcacgcggtagggccgcatcttcacttcttggccgttgacggcagacatcgcctgcgtagcgccgcgctcccacgtctttgggaacagcgcgatgatgcgcgtcttgccgtcctcgcccgtgacccggtggatcttgccttcggtcagatcgaaggtgacgtggccggtgtagttgtgggtcggcttcatagtttcaccgtgagtggtcgggacggccgcgttgccgctgcagccgccccttctgtgtcgcgcctgtcggcaaccgcgctcgggtattggtgggcccgccccttgccgggcaggacgacggacgggccctggcgatcccagctccaccttcgggttggctgcggaccaaacaaaaaaccggcgcgctggtgcggccggttttccaaattttgggcgaatcgcgccgccctgacaatttccaaattgcaggttttggcaaaacccacaatccccctgatctgcaagggtttagttcttcacagccgatttcacaaaatcgcggcactcggaatcagtccgcaaacaaaatcccgaacctctcgtatgcccacaagaacccaaaccacacgaccagcgcgatcgcgatcatgccaatgaactccccccacttccccattctcctcccctgcagcgatccgctcaaccagtatgaataaattgtcactggaatactaagtagatagaaccagatcacccactgagaattcgccatctcgcccccatgttgtccattcaacaatggtctggtgccgacgtcaattgatctcggcgcaacctatcccacccagagccatgccttgccggaccagcggtactcgccgaactcgacctccggatcgtcgctgtcgacgagggcagggagcgggcgcccgctgttgcggtagaaggcgatgcggcggacatcgccatggtgggcgatgttccgcttgtcgtaggggccgccgtggcaggggccgtagcgcagggtcatgcccgcagccaccccttcggcacgctgaagaacggcttgcgctggtgctcgccgcaaccgggcttatcgagcccgacgatcgggtacatcgagcgcagcgtgtcgccctccgatctatcgaccggagggacgcggtggcaaaagccgctcgaggcgtcgccttccatcgggagcatgaagcggcaggttctgcaggtcggcagggtcatggcgttcctcgtcatgcgacttctcctgtctctgcgtcagcaatctcgagcattccggccacggcgcaggcgaggcggagcttggcgtccatctgctcggcggtgaggccgcgcagcgggaccgggatggtgtggtgatagcggccgtccgagccggtgatgccgcgcgatgccttccagtccgggttcgagaccaggctgaaatgcgtgggcttgctggccgcggtgttgaagaaccattgcaccagcgcgtcgacggcggcctcggcgagcagcgcgccgtcgtccttggtcggtgcctttggcttcggcgtggccttggtctcgctgatgaggcccatctggatcgcgacctcgtgcagcacggccgcgagcatgcccttgttgaccgggccgggctcctcgttgagcacgcacacgcgctcgatgagcgcatactggttgccgatccagttctggacctgatcgaacgccttctcggcgcggcgcacggccttcttgtgccgcttgagctcgtccggtgagagacggtcgagcatcaggtccttggcgccgaagccgcgctcgtaggacggcgaggccgcggtccgccgcggaatccccttcaggtgctcgtagcggccgtagacctcggcgatgcggaagcctgcatcaacctcggcctcggacaactccctgaagcagcccatgcggccgagcacggtgctcagtcgcgggtcgatgccgagccggccgccgtactccctgatgcggaagaacacagtcggtgccatgccgggctttttgtcgcccgacgggtaacgatcagcgggagccttcgccccgcgcggtttcttgacgattgccaacattccctgtccctttaatccgcccccggatcgttgggttggtgtgatgcttgtggttactcctctggtgaaaactcgcacttcggcggcggcgcgggcgcacgcttggtcagctgcatgccgatcgcccgcgccagcgcgatcgacatagtcttgccgttcttggtcggaggctcgaagccctggacgatgtattccatgcggcgcgtgtgctcctcgcgctgcgcgcgctccacgtcgatctcgttctgcctcgccttgcgcgcggcctcctgggccgcgttgatggggttcacggcgtccttgaacgtctgcaccgaaagcttcacgcgctcgcgctccgcctcggtgggcggcggagggtcgacctccttcggcttcgtgggccgcgacggcgccattgcgcgcgctgcggcggccgcctcgtctcgcatcctgctcatgctgctccctttcgcttgaccatgccggtggctggatcgatgccgtgcttctcgaggatctcgggcgggcagcggcaaccgcccatgccgggctcaggaccgtggccgcgctgccagcggccggtgcgcacccagaacgaggcgatgttgtcccaatccggcggcactgccggcgtctggctgtcgacgctcgcgggcttctccgcgggcttggcgagcagcacccacgcagcccacgcctcgtcgagatcggtgaacttggtgccgcgggcccgattgtatttccggaagcgggcggcctgcgcctccgcctcctcatcgctcaggccggcgtcgcgagctgcctgcaggttggcctggctcggctgccagtcgatggggaccatcctcgcaatcccttcacgcgctgccgggcgcgcgtcagactctcccgcagggagagtctcttgtgattgtgactgtgactgtgcattccggggcatatcatcgggaatgcttggagcatcgtcggaggatgcctcgcgcttgctccgcttcttgccccaacgagcctccgcagcggccttagccttgttactgctagactttccgacttcggccgagtgcgcaatctcctcctcaatccgcttgtgacgccacacgccgttttcgatctcgaaaaagcacacgagcgcggggcggattttgctcgcccagcgcttcacaggcatgcgcgcgatcgtcgccagaacctcgtcgtcgtccggcggagcgcccgtcgtccagtagtcgagcatcagcaacaggtacgcgccgtgcgcctcagtggtcaggcgcgcggtgtccttgatgtagtcgccgacatagaagggaaaccaaggtcgagacatttcacagcttcacagttcgggcttcacaacgggcgatttcacgtttcacaggttttgccgctgtgaagcgggcggaggctcaggg

SEQ ID NO: 144 - DNA, 1613 bp, Bradyrhizobium colbertium
cagcgtcccgagcaggctgtcgcggccgatcatggcgacctgcacacgctcacccttcgccagttccaccaccagcgagatgacgccgcggtggggaaaataagcgcgcttgagcgtctcgccggttccgaccagcactgcgtcatggggcagatcgaccgtccgcaaatgcgggcggatcaatccataatcatctgccgacagtgcggacaggaaaccgttggacggacgcaccatcgtttccaaagttgcctccccgcttccctgcaccttcgatcgcgacacgtgaaatcacgtcctgcgcgggcaagctccatcatctttgcttcgggatataatggcaattgggacaagttgtccggagtgcagcgccgccgtcgcccaggacagattcactgactattcgatcgtcgggagatgcggacgtggcagatcgaagtccgctgcatcgacttgttgcagcagacgattgggcgggtggccgctcgcggtgatcccggtcactacggcgagctcgatggaacgatcggcgcggcgcaggttgtcggctaggctttcgatgatatgaattcgcgcgtccgatgtgttccgctcggcgcttgagctcggcgtcacacggtctgtgcaagccgttcaggcggcagcgctgccggtcgccgtcgacgatgtctggcatagcatcgaccgatgccgatcattgcctcgcccgcggctcggttagcgcggcacgagtcgctatggtcatacggtaaccgtgcgtttaccgcccgtgcgaaccgcggacgcggcggcaacaccacaaagcgcgcccaggagcgcgccgttggtcgtagtcggatcggtccaacggcctgcaggccgtctctatcgctcttcacgagcaggactttcctgaacgctgtgcctcgctgttatcggggtgtttacctcgcgcgtcgcattcgtgcggcgccgagccggatttgccgaaaagcgctgcagcatgcggcgaaaccgcgaacttctcttcaatatccgtagtagcacggaggatgaaattaacgggaccgtgaaacgggatgtctaacgatccaggataggcgtcgtccgtgccaaggtggcttgggcgtcgagtttagatccaggtcagtaaggcgtagctcatggatgatctgttgcgggagtttttgacggagaccagcgagagcctggacaccgtggacaatcagctggtgaagttcgagcaggagccgaacaacgccaagatcctggataacatcttccgcctggtccacaccatcaagggcacctgcggcttcctgggtttgccgcggctggaagcgctggcgcatgccggcgagaccttgatgggcaaattccgtgacggcatgccggtgaccgggcaggcggtgacggtgatcctgtcctcgatcgaccgcatcaaggagatcctggcaggcctggaggcgaccgaagcggagcccgagggtaacgaccgcgacctcatcgacaagctggaagcgatggtcgagcagggcatggcggccatggctgccggttcaacggctgcaggttcagcggctgccggtgccgttacgccggtcgccgatgccccgccgctggcgccggaaccg

SEQ ID NO: 145 - DNA, 4350 bp, Bradyrhizobium colbertium
acacccgggcgacttcgtcggaatccgcacacaatgaagatgctggcgtcgcgcttgaacgcaaatctggccaactcactcgatgagcgcgtcagtgctgagttgaagtttatcgacggacaatcgttctttcgaaagtcgatcggtgtcggactagcgggattgggcgcgggttcggctgtcgcggccgcgttcgtcggctattcatatatcacggatgctcgcacgaccgccgacaagattgcagcggcaatttcaaagtcgatgtcccaagttgagttgcgcggacaagccgtaggcaatgtcgatatacacccttcggagatccgcctcgcccctgaccaaaagatttcgctgtctcaggattcgcggctgaagctcgacccgtctgccaaggtcaaggcagaaggcagtatgcggattcaattgcctacaatttctgcgattcaggcacaatctacgccgaagaccgcccctaaagcgcagccggttacgaactacaccatcttcaaatcggtacccttccaaaccggaaccgtatttacaggttggcgattcctcacaagcacgcagaaagagccgaccaaccagtattgctattttgctgaacgcggtgacagctctgacgtgtctttcaaggtcgacgtcggtgacgatggcgtaattacaaaggataaagtgcctcccaagtttgacttgaccggcgcatttgctaggtgtgtctggttccgcaaggacgcttaatatgagcgacgcttctgggccatttgacttcgctggcttttccgctgcgctcaatgcccggatgggcgctgaggcacgcgtaactcgtgccaaagcgttcggcttcaatgccgccgggctcggcttgtgtgctgcgctttgggggattggtctcggcattgctttctttggatatagcaagactacatcttccgaggccgcggcgaacacgattgcggctgccgtgacggagggcctatcgagagcgcaaattaaaaccatcgttggtggaacgatggcgctcgcgccaacagccgagcttcgtctcgcggatgagcagattgttaggttggattcctccacgacggtgagcctcgaccccgacacgactgtcaaagttgtgggagatttcaaagttgatgttcctcaaccgagcaaggaacaactgcaagtcgacgcaaccagtagcagtaaggaattgccgtcaacgcgctatacggtctttcgctctgtcaggtttggctctggcagcgtggtcacggcttggagtttcgagctaacagacacggctacgccgaattatcagcgctgctattatgaagaaacactttcgggcggtgtctcagcgatccaaagcattgcgttcaatggcctgccgaagcccccaaatgcccttagtaagctaagctttgacttcgacggcgcgatagcaaattgcatctggtttgcaagttaaaggcagctcaaatgcgccgcggcactattttaggcctttcgatggaggcctgccgatctttgccgttagttcggctatgcgcttgttgtccttcgccttgatcgcctttcgaagttccttcagatcgtcttcgtcgaactctgcccgtcggcgcgtcgacctttggacggaggccttgggcgctgaccccagccgttccccaaacctgcgcttgggtttcgctgcgcttgcatccagatgaagatcatcccagctgcctgccaggttctttgtctgcctcgatcgtggtcgggctgggggcggagggcgccttagctcctcgagcgtctttatgccccgctcgattactctctcggaatgcatcccaccgaaggccggatcctcgccaaggagcttatgtgccgccaggcggagcgcgcccttcacgatatcgtcgaagccgtcctcgcggcgccagcgacgagagcgccaatcatcgtccgccgcataatccatctcggcttgcggcaagcacagtgcctcctgcaactccgcggcggacatcccccgatccgcctgtttctcgaatttgttgatcgcctccacgacgagagccagacggcggatgagatagaccgcttccgtgtcgttgcccgcaatcgtacgaagcaacgcggcggcgaattgagccagtgcgttctggacttcgcttttggccagttcaatctgtcgatcggcgcgagcattcgggttggtgctgacgagcctcaacttgggagacctatcctcctcgttgtcatcctcggcgcttgccacggagcatctccttcttccgggtcccagatgcagcttatgatctaggctaactacttgccagaccttcgcgctgagatgaaaacatgtctttgaatttgcttatgaaagcgaatttacccccctgcggacgaacagctcgccattgcgaggacgcggctgttgctttcgctcgcccgttccggttgaatcccgtctagggggagctttgccatgaaccgattatatttggtctattgccctgtactgcgcgtttccgctctgctcgccgcagtggtcctgtcgggctgcggcgcggtccgaaacgttcaggccaacaattcgtacgacgcttcagtggctgcctataaggactgcctggctcgctcaggagccacgggctgcgaagctcagaggctcgcaatggaggccgacaggcagcgggccgaggtcgcaagcctgagaggcggaggaggaggcaatgcgcactatgtcccgccagtcgcagcgacaagagcggaccctgtggtgtgcaacactatgcgtaccggcatcatgactacgacaacttgcaattaacgggagttgaggggcggcctaagcttttcccgctcctgatgactctcttaaaacattgattgctgccggatgtcgtcctgccgtaccactccattgatcagccatgtatctggatgcagcgagtgagtgcccatcgcgagcagcattcccttcttcggcaactcttcaccgaatactcgctgcatttcacttagagctttgctttcgccatagagccgcgaccacttatggaatgtggcttcaatctcccagtcctggcaggtgccctcgcgaaggccgtcatccgttcgatatcggtatttgaatagatatgggcagggaatgtagctgcgaacgacctgcttcgagaacagatcgctttgagcgcgtatcgcgtcgaacgtctctttctcgtcatcgacgtcctgctggctctttttctcatagcggaatgacatcacctcgagcggcttgagtagagcgaaactcttcccggcctgacgctcgcgattgaggctggtcacgacggctttggcaagaaaccggctgcgctctgaccgcttaagatctccaatgatctcaatcgaatcttgatcaattcggcggctttccgaacgacggtcatcctttgggagccgccacttgaaacggataagatcccacctgccaaatctgcgcgagtgatccagggtcctaaaagctaccgggtagagcctgagccaattgccatagatatcgatgccagcacagcagacggtctccccgtgtctgcggccgacctgcggcgccgccttcacgatgacgactgcttccgcctcacccgatgtgggcaactgctccggcacgagggaaaacgcgctccttcgccatgatagatctggatggagcgttgggcgtcaaatgcactactgaaaaggacttaaggccaatcattgattcggccacaatgctccgatggcaatttgtatgatcacgctcgaagcaaagtaaacaggcatgattgagcgcagccttcgatacagctgtagctagtgcttgctgcgccgcactcgtgcgcatgtgagcgccgaagattttgcgaaaatctgcgtaacggccttcgcgagcggcgacccggccgggtttcggatcgcctaaccccttcaggtgcagatagtcgatcccaacggatgccaaacctgccgccagcgacgtcttcgagaagccgcgtttccttgaaatggggacatcccgaacatcgatcagcagttttacaccgctttgtcgcaggcaatcgaatagttcgctcggcgaactgccctcgtatccagcagtaaacagcttcatttcttgccctcagaggagagtctcgaatcatattttccagtcattgacaaccggttcacgaggcaaggtccgccgcagcacaccgcatctcccttatcaaagctgcgacccgccgcttctccgcgatgtacctcgccgagtaccgcccgtgcttgaaggcattctggttgcccttcggagcccccggcgaaaggcctccatgcatgcggcagcgtccattaggcattgccggcgac

SEQ ID NO: 146 - DNA, 48406 bp, Bradyrhizobium colbertium
  misc_feature (30179)..(30188): n is a, c, g, or t
tttctcctccttcttggcgggacgctgccggccccatgcttcggtggagcgggcgcgcagatagacgtacaggtcgtccatgtagcaggcgacgttcggattgtcgccgaaagccggcatgacgttctcctgtgcggtcgaaatattcttgcgaccggaggcgactacgccgaggaaatcgccgtagctcatggtcttgacagaatccttgagtgccggcgcgtaagtggagcccatgccgtccgggccatggcagacgtggcagtcggagtgatagcggcgatatccggaataggtgaaccagtccacggtgccgtcggccgaaatcttgtaggtcggaattccttccttatcgagccactttccgtcgtcttccttcttcacggcggccggatcgcccggaccgtccgcgattgcagttcctgcggacgcaacgaagatcatcagcacggcaatgacagagcagattttacgcaagagattgtcctcgaggcgttcggtggagacgagccggcgcgtggagttgatccacgcgccgaagcgatgctgagcgaggcctagttcggcagcgagaacacggtcagcgtaccgccgagtgccgtgtagttgctcagagccgcatagccgccgactgcaccgagacctgcggtcggatcggtcaagcctgccgccagaccgatgccggcccaaccacctacgccggagagcacggcaatgtactgcttgccgttgttctcataggtggtgacgttgccgatgatgccggacggagtcttgaacttgtagagctccttgcccgacttggcgtcgaccgccttcaggtagccttcgagtgtgccgtagaacaccacgccacctgccgttgcgagcgcaccagaccagaccgagaactgctccttgttcgaccagacgatcttgcccgtcttgttgtcccaggcgatgaagttgcccatgtggctctcacccgggggcgggtacatcgagagcgtcgcacccacatagggctggcccgcggtgtagctcaccttgaacggctcgtagtccatgcagacgtggttggtcgggacgtagaacagctgcgtgtccggcgagtaggccgccggctgctggtccttggtgccgagcgcggccgggcagatgcccttcgtgttcttgtcctctccgccgtgctcggtcgaatattgagcaacgactttcggccggccgtaggtcggcgagttcttgtccatgtcgacgccgctggtccagttcaccttcgggtcgtacttctcggcgaccagcaattcgcccgtctcacggtccatcgtgtaggcaaggccgttgcggtcgaagtgcgtcagcagcttgcggttctggccgttaatctgctgatcggtgaggatcatttcgttgacgccgtcatagtcccactcgtcgtgcggcgtcatctggtacacccacttcgccatgccggtgtcggcatcgcgcgcgaagatcgtcatcgaccatttgttgtcgccgggtcgctgcttcgggttccaggtcgagggattgcccgatccgtaatagacgaggttcagagcgggatcgtaggaaatccagccccaggtgcagccgccgccgatcttccactgatcgccctgccaggtcttgagggacgagtcggggccgaccggcttgccgagcgacatcgtcttggcgggatcgaccttgatctggtcgtccgggccctcggaataggcacgccagacttgtttgccagacttgaggtcgtatgcggtcagatggcactgcacgccgaactcgccgccggaaatgccgaccatgaccttgtccttgacgaccagggcggacgaagtgccagtctcgccctttgccggattgccgttggtggcggaccacgcaacctgacccgtcttggcatcgagcgcgacgagattggtgtcggcctgatgcaggatgatcttgccgtcaccgtaggccaggccgcgattgacggtgtcgcagcacatcaccggaatgacattgggatcctgcttcggctcgtacttccatacgatcttgttctcctgcgaaaggtccattgcgtagaccttgttcgggaacggcgtgtggacgtacatcatgttgccgatgatcagcggtcccccttcatggccgcgcaacacgccggtcgagaaggtccaggcgacctggagcttgcccacgttttgtgcggtgatctggttcagcttcgaatagcgggtgttggcgtagtcgcccgccggcatcacccagtccttcgggttctgcgacatcttgatcagctcgtcattggctgaagcgccgccggcggcgagagccgccgccgaaccaagacaggtcgccagtagcaccttgcgcatagtcattcctccgttggtctcgtttattgtttccgaagcattgctcaatcgccgggcttcccgtccggcgtctgctcgtgcagggcggtcacgattgggaccagaaacgatgcttgtgctgtttcctcctcctgatgagagccacgggtccacgtgcaggagcggcccgttcttgttgttcctgctaccatccctacccacttcaccattgggaaacttgcccaagagagaagccggtttgctcgacagcgcacgggggcaaagattttgattttgcagtagcgaattcagttgcttccgccccgacttcgggccgctttcaacgctcaggttccccttgacggcgctgcaactaaggcggaggattgactttgaagagcggcaatggaacgcggcgcttgttccacaagattgctcaaattcgaggtaacgtcgacgcagtcacggctgagggctccagcagcgctggtcgcgattcgcatcgaatctccggatcaaaccagtggctggattaatgtccgacaccattcacacgctctcgacgaccggaatgacgccgaagcggcagatccagagctggatcgacggactgacgagcctgtgtgggcatttcgaggtcgatccgctggaggcgtcctcgctcgagggccgcatcgactacacgagcgtctcgcgcctgaagctctgccaaatcgaggtgagccagcatcgcatcgcgcacacgttggcgcgtgccaaggccaatgagcacccctacatcaagatccacttccaaacctacggggtgtcttatttcgaacaagaaggccgtcacatcgaaatcaaccctggcgacatcatcgcctacgatgtctcgtgtccgcattcgatcatcagcccggccttcacgcgtcacgacgtggtgatcgtgccgaaggcactgctgcgcgaccgcggattcccgtcgcagcggatgcccgcctgcaagctgtcgtcgaagacagggacagggcggatcgcccatgacttcgtgcacgctactttcgacgaggcggcaaagctgtcggcgaacagcgcggtcggcgtcgccgactcgctgatcgacctgttgttgctgccgctgcgcgaggccgacacgatgttcgatcgtgtcgggcccgaagcgatgtatgtgcgcgcgcagttcttcatccgcgagcacttgcgcgatccggatctgtgcatcgaccagatctcggccgagctcggctgctccaagcgctatctgcacatgttgttctcggagcgcggcaccacggtgagtgactacatctggcaggcgcggttgcagaactgtcgccaggagctcgaggcccacgccggcaagaccatcaccgacgtcgcgttctcgtggggcttctccagctcgtcgcatttcagccgggtgttccggaagtattttggcgtggtgccgtcctcgatccacaaggcgcagcagggcaccgcgaactcgggcgggcattaggcgtcttgaggcaactcgcgccgcgcggctaaattcacgccggcgttgccaccaaagcgaccagcagcacggcgtagcctggcatcacgctccagtgcagccggcgcaaccgtcgtgcggcattggcatccccggcgtctctcgcgctgagctggttgtctacccgtctcatgaaccggcgtcctccccaggtcgccagggccacgatcatgccgaggaggagaggcgccatcccgatgatgccgatcacgcgttgaacattccgcgcagcaattgggcaacgggttggatatctagctcaccagcaggaaggccgcggcgcaagcgtgaaatagctcatgggaaagagcaggatgatcatagcggcgacggcatccgtgacatcggccttcgtccgcagaagggcacaatcatagcgggaaaacgcgcttccgaaactgggctttggtcggactcccgggcggaaagggagcaaccgccgtgccggcgatgtcgcgaaggtcaggccggctcgaggccgagcgactttgcgctctcgatccagatcggcagctcgcgctgatacagcgcattggtttccttgaagccgattgcgggttcgagcacgaaggtcgagagaacctctttcactttcggatcgttgttggcggccacgcagagctcggcgatgcgatcaacgaccggctgcggcgtcgccttcggcacggcccagccggtgaatccgctcaccgtaaagaattttgacgtcgcgccctgctcgggaagcgtcttgatggccgggattgcgtcgaccttcttcgagtgcacggcgaacacggtgccgcggtcgctttgcaggacagactgtgcggccgtgtagctgcccatcgcggcatcgagggtgccttccagcattcccgtccacatcggcgcttcgccgcgatagtgcaccggctcgatgttgaggccgtactgcttgttgagctcgttgactgtcatgtgcggggccgatcccgcgctgtaggtgccgaagttcaccttgccgctcttgcgcgcgaaggcgacgaaatcctccagtgtcttgaccccggttttcgggtttgccaccagcagcaggccggcgcccggaatgacgctgacgagggtcaggtccttgtccatgtcgtagccggggttcttcatcaccacccggttcatgatgtaggtggtcgagatcgagcacaggatggtatggccgtccggctcggcgcgggcgacctcggccgtgccgatcgcgccggaagcgccgggcttgttctcgatgacgacggtcttgccgacctgcttggagatgaactcgccatatgcgcgcgcgagtaggtcggtctgtccacctgcgggatagctgcaaatcatccggatctgccgcgccggccaagcgccttgcgacgtgccttgcgcccatgcgttgcgcgcagcgaatggcatggcaagtgcagtagtaccggcggcgatgaagtgacggcgatcgagcttggtcgacatgattctctcccacattctcgccgaaattactgtatcaggcggtctctgccatcggctgcagccgagacagattggcgcattggttacatcggtcagctcgcgaggcctgcgcgctgcgtcattggccgacatgcccggtcgacgcatggattccggttcgcctgcggcgccccggaatgacaggcaatcaccgctgaatgatcttcgtccagacgtcgcccagaatcgctggctctcgcggcggcagataggtgaggccggcctgcttgccgaactcggcgatcttgccctcagcggcgagctccgtcagtgccttgttgaccgcatcgatcagggctggatcgctggcgagcccgacatagccgcgattggcgccgatcgggtagtaatagccggacgcagtcacgctcgtgtctggatgggcggcgcgatgggcatccaagcgcgcaaggtcgatcagtgtcgcatcgtaatcaccgcgctgcaccgcgccgaggaggtcgtcgcggccaggaacgagatgggtgatgctgtcgatcaggcgtcctttgtcgaaggtcatcaggatggcatcgccgagcgagccgctttcgatggcgagacgaaggccggcaagatcgccgatgccgccgatcttgcggcccttcgccttgggcccgagcgccaccgtcatgggcgaatagacgtatggttggctcggcgcgagcgcgccgagctcgacgcggcgtcgccggtcctcgcgcgtggcgccggcgaaacccggcaggcgcgccgtcttcatgcccggcttgaccagggaatccgtcgtcagcgcgtagccgccgaccaatgcgcagcgcccgtcggagagcagcgcattggcctcgagctgcgggctggcatcctcatcgagcttgctctcgaaccacaggatcgtcagcggccggcgcaggcgctcggcgacggcttgcgccagcagcacgtcgaagccggcatccggcttgcccttttgatgcaccgacagcggcggccggtcttcgtcgagacagatcttcagcggatcctcggccgcgtatgcggcacgcggcgccgctgctaggaccgcggcgatgctccaggcgacaagccagcgtctcatggcttcctccggctggagacgaaggcccacaggttcccgatctcgtcgtcggtgaggatgtcgccccagggcggcatcttgttgttcttgccgttcttcaccgtggtgatgaaacgcgtcttgtcgtcgggtatggcgcgcaggtccggcgtgatggtgccggagttcatcagattggggccatgacaatgcgagcatttcgaggcataggtcgacttgccatgatcgatctgcgcctgcatggaattggcggcagcgtcgtcggcgcgaacggtcgccgcaagcgcgaccgacagcaccgcgacggcggcgatcaccgccgccgtcttgtgagacatcactttcagcatcgtgtccgtggttactgcttcactgcaaagacccacagcgaaccgccgggcggcaccttggccagccgctcgtcgcccgagaacagcgagtagacgccgccatagccgctcgtcacggcaacgtattgcacgccgtcctgctgccaggtgacgggttgcccctcgatgccggacccggtctggaactgccagagcttcttaccggtgtcggcatcgaaggcctcgaactcgccggtcagggcgcccgagaacaccacgcctccggccgtcgacagcacgcccgagaagcgcggaatgtcgctcggcgcttcccacttcgacttgccggtcatggggtcaatggccttgaggtgtccgcgcggcccgtccccgaactcccagggatcggtcaggtccatgccgagataccattcaccctgcttgaaggtgacaggctcggccttgtacttgccgccgaagttgagcgtgttggcataggcgaggccggtctgaggattgaacgacatcggctcccaattcttgccgccgagaatggacggatagaccgtcaccttcttgccttccctcgcgtccttcgcaacgtccgtctcgatcggacggccggtcttcatgtcgacgccggtcgcccagttcaccttcacgtaaggattggccgcaagcagcttgccgtcggtgcggtcaatcacgtagaagaagccgtttcggttggcgttcatcagcacctttgtcggcttgcccccgacgttcatgtcggcgaggaccatctctgcgactgcgtcgtagtcgaacggattgttcggcgagaactggtagtgccacttgatcttgcctgtcttgggatccatcgcgaggacggagcaggtataaagattgtcgccgggccgtaccgctgcgttgaacgggccgggattgccggtgccccaatagaccgtcttcaactcgggatcgtacgagcccgtaatccacgtcgagccgccgccgagtttccaggtgtcgcctttccaggtgtcgccgccgggctcatccggcgaaggaatcgaatgggtgcgccagagatgcttgccggtcgccgggtcccatccgtcgatgaagccacgcgtgccgaattccgcgcctgagacgcctgtgatgacgacgccttcggccaccagcggagccacggtcatcgaatagccttccttgatgtcggccgccttctgccgccacagctccttgccgttcttggcgtcgatcgcaatcaagtgggcatcgagcgtggtgcggaacagcttgccttcatggatcgcgacgccgcggttgatgatgccgcagcagacgatccgaggcgtctcggccggatattcgattttgctcttccagatctgcttgccggttttggcatcgactgccatggtggcattgtgcgtggtcacgtagatcacgccctgatagacaatgggctgcgattcctcactgcgatcgtcattgaagctgtaattccagatcgggacgaggttcttgaccgtatccttgttgatctggttcagcgtcgaaaaacgctgcagatgatagcccattccataattgagaacattcgatgtgtcggtcgcgcccttgaccagctgctcggtcgtttgtgcatttgcacaggttgacgcaagcatgacgaggcctgcggccatcgcaaagcgtttcatccgttcctcccaatatgcgcgccttttgacgctgcaggagcaacactccgcccgaatgcaaaacgcgtcaatacgaaagtcgcaaatgggacgccggatcttgaacggcagatgccggtcacctgacggaaaccttacaaggtgctagcaattgtgtgcagacgctgcagaaaattcgcgccacgaagcccgtttgggcgcttggcgcggcggccttccctgagttgtggcgcgggcaggttgcaattttcaacttgaacccggtctcgtttgtggacttatgtcgtctccgatcctgctcggatcgaggttctcaggaggtttggatgacgtcgattcgcccgttttcgcttgcgctcacgattgcattgctgtccggcccggcccacgcggcatccggcagcgcggtcaagatgttcgatacagacaatgatggcacgctcgatatggctgaggtgagaaaggctgccagcgcgctgttcaccaagctcgaccccgatcgggacggcacgctcgatgcgcgtgagttgcgcggacggttgtcggcgaaagagctcgcagcagccgatccagatcgcgacgggaccctgacgctcgatgaatatctatcggttgtggagcagcgcttcaatgcggccaatccggacaaggacgggacgctggatgcaaaggagctgaacgcgcggcccggccgcgcgcttctgcggctcatgcgttgacccggctttgccggcgagtttaattccgaccggcaagcccggaacatcgggcggctcgccctgttctcttcgcgatgtcctgctcggcgccagggcagcgcagcgggagaagaggagaagcagatgaacacgaagcgttccattcttgctgcctgcgcgatcctgaccttgagcgcgggggtcgccattgctggcccgtgcaacacgagcagcgccagcactgacaagaccgacaaggatgccggctccggcccggtcacaataggttcggcgcagtcgcagggttcgtctggcgaagcgggtcagcatccgcccaccagcacgatgaatcgcgccagcggcggtgcggctgcctcgtcagaagacgctcagcggcaaatgcagagccagccaaccgcggcggaacgggcggaaggtgccaagtccagtacgcaaacggcgggcaaggactgctgaccgcgcggcacatgtgtcgattcgagcgccgcttgaagtgccaggtctcttcgctcggatctgcttgaccgagagtgaaccggctttgcccgagagggaagtgcggtcgcgaagaatcgacattggtgcattcgacagctgaatctgcgcttgaactggcggggagccagccctaggttttgcgccgcgcgatgtcgcgctcattacttggggagacccgcatggcttggaaagctccgaagattgtggaagtgccggtcggcatggaaatcaacatgtacgcctgcgcttcgcgcaagtaagactgacgcttgccgcggcctcgatggcgaatgccgtcggagccgcggcactgtcgtatctcggccaacctcgttgtgttcggtgctttgcgagtgacgcaaggttgcgcgacgtcagctccagtgctctcccatcaaaatctcgaccgtgctctgcggcagcgtgttacgctgatgcgcggtcagtgctgctgccacgtctgggcagcgcgcgccttcggagcaggggatgggcggcagagcctgcaagttctggacggtggtggggtgcgtgatcgcactgacaccggcacgcaccagcgccgaagagggctttgataccgagcacattttcggcttcatgatcggcagcgatgtcggcaatgtcggcgagcgcgaattccagacccagacgacgggccggctcggcaaaggcgggggaacctatcgcgccctcgagcacgaagtcgagatcgaggtggtgccgctgccgaactttcgcatcgaggttggcggcaccgcgagcttgcacgacatcaccggcgttcctgatctcgatgaccgtcgccagttcaactttcagggcgcctcgctcgacttgcgttatcgcctgctcaatcgcgagcgcgcgccgttcggtctcactatcgctgccgagctccacggcggccgcatcgaggagacaagcggcgcgaaggggcggatgtacggcaccgaattcgcactggcctttgaccgcgatctgattccgaacttcgccatcgctgcgctcaacctgatctatcaggcggagtgggcccacttcgaggtggcaggagcatccgacaggggctcgacgatcggcgcggcgattgccggcctggtgcgcgtgcggccgaatgtgctgctcggcggggagatgcgttactttcggcaatatgagggcgtcggtctcggtgagttctctgggcaggccctgttcgtcggccccacagcctatttccagctttccgagcgttcgcggctcacgatgagttggagcatgcaagcatgggggcgtccggccggatcagggaccaatctcgatctcgccaatttcgagcgacatcaggcacgactggtatttgggatcaatttctagggccggatcttcgcctctgcaccagcccggaagaggaaccgtcggcccccatttcacatgccggattgaaactttcccctcctcgcgacgtagctccatgtgctagtctgaccagcgcgttccgagaggactccggcatgagcccgattgaccttgtggtgaccgtatgtgcagtgctctcgcctgcgacctgcgaggagaagcatctgatattccagtattccgggtcgccgcggcaatgcgcaatggctgcgccgccctacatcgcgcaatgggtcggcgagcatcccaagtggcaggcggtgcgctggcgctgcgaatatccgcgcccaaacgacagggcgtaaggcacccgctctatttggtgcaatccttcagatccttgtccgcgatcgagaacaccgcatctgccctgatctcgatgtcgcggacgatgcattggcgtgagctgggatagctgaccttggcgtcatagcggcccggctcgacgcccacaatgcgcagccgctcgtcgtggtcgacctccttgtccttgtcgttcaggcactggttcggaccccagtcggtcttgcccgcgggcgagagctggaagccggagatcgtctccgtcgtcagattccagagccggatgcccttgcccttggcctgcgcaagtaccgcgcccggcatcgcgaccacgaggatgccgatcgcgatcagcctacgacgcatgatgaacctccctcgatgaatctcgttgcatccagttgaccacgagttttcatttcgattcaagctgtagcctcgcaagctcgcccttgatcctgccgagatcggcttcgctgcgctccgcgcgtggaatggtgatcggcacctcccgcatgatgcgcgcggggcgcggcgacaaaaagaacagacggtcgccaagcctgatcgcatcgtcgagactgtgcgtgacgagcagcgtcattacggggcggctcgccaccagcgttgcgatctcgtcgcgcaaacggctggcgagggcgtcgtcgagcgaggcgagaggctcgtccagcacgagcagatcgggctccaccgcgaaggcgcgtggcgctggcccgcgccgggcgaggccgagcgacaactcgccggggaagtgatcgcgatgcgcctccagctccaggatcctgaacagctcggcgagcttcgcgtcggccacgccaggggcagccagccgcacattctgctcgaccgagcgccacggtaacagccgcggctcctggaacaccatgccgatccgcgcctgcggcggccgcgcgacgccgcctgaaaactcggggtccaatcccaggatgatgcgcagcatggtgctcttgccgcaaccggacgggccgatcaggacgccgacctcgcccgattgaagcgcgaacttcaccggcgccagcacctcctggatcccgcccgcggcactcctgaaggtcttgcctttgatgtcgacctcaagccgcacggggccgccaccggtttgcgcgggtttcgaacggctgtaccagcaaggtttcgatgacgagcacgacggcggcgaaggtcagcgaataggccagcagccgcggcgtatcgaacaactggaaggcgacgccgatctcgaaaccgacgccgttgggacgtcccaacagttctgcgaccagcacgatcttccaaaccagcgacaatccggaacgggcggaggcggcgatatacggcgcgagctgcgggagcacgacgtggcggaacgcgcgccagcgcggcatcgcgaatacgcgcgccatctcgtcgagcgagcgatcgagtgcacgcgccccctcgcgcaaggtgacgatggcggtcggcagcttgttgatggcgatcgccgcgatcgcggcggcttcggtgagcccggcccatatataggcgagcacgatcacgaccagcgcgggcaggttgagcaggagaatcaaccagggatcgccgagccggtcggcgagcttcacccggcccatcaggtagccgatggcgctgccgatcgacatcgccaatgtgaaggcgagcgcgacgcgcgccagcgtcgcgccgagatgcaggaagagggcgccggaggaggcttccgcgatcatgacgtgaagtacggccggcggggcgggcagctttgcaccgccgacgaacagcgcggcggtccaccacgtccccaggagcagggcgaacgagagaagacgcagcacctcagtctccggggactgcgtgatagaacgtgccgggatcgagctcggccgccggtccgacgagatcgcggccgccgatctcggcgagcacgcggtagagcacgcgtgcgtccttttcctcgtcggcaatgctccggcgcgggatgccgtcgcgatagcggtcgcgataggccttgagcagggtcggatctgtggtgccggtgagcggcgcgaccttgtcccaggcggcatctgaggtcgccagcagctccttggccttgcgggtcatcgcgatgaagcgcgccaccgcctcgcgatgcttggccgcccagccttcgtcgaagacatagccgaccgcggagacggcaccctcggcgccgagcttcggcaggatgtcctcgatgccggcaaggcggtgaaatccctttgcctcgagctgcgcgcagaaattccagaaattgaggctcgcgtccatctcgccgtcgagcgccttggccgcgatcaggggcggggcgccatagacgatggtcgccgcggatttcagatcgacgccatcctgcttcatgcgtgcctggagcagcagccagctcttgtcgatcgctccgccggccacggcgagcttgcgccccttcaggtccgcgagcgtcttgatgggcgagttgggcggcaccatcaccgcgccgagcgcgctggaatagggatagaaggtgagcttggcgccgagcgcgcgctcgcgcgacacccacagccaatccgacaggatgatgtcggcgctgcccgcgcgcatcgcgatcttgccggcctcggtgctcgcgagctcggtgacctcgagcgacagatcggcctccttgtccaggccggccgcgcggatcgcggccagctcccaggagaatgttccggtcttctgcactgcaaggcggatggcgtcggcggcgcggccgggcgcggctagcgtcaacgccagcgtcaccgcgagcgcgaatgttcgaccagaagctctcatcaccttgtgagccgtttcctctgacagagtgcttttcaggacaatacgcatagcatagccttgctcgcaaccagcgggaggatgcgcatgaatctggcgggacagctacgaccgattgtcgccgcattgatagtgctggccgcgagcgcgtccatggcacgggccagcgaggccaatgattatcccacctcggcgcgcgccgagtacgtctatggctgcatgaaggccaacggcgagacacgagctgcgatcgagcaatgttcctgctcgatcgacgtggtggcctcgatcgtcccctatgagcgctacgtcatggcggagactgcgctcagcatgtcgcaagtgcgcggcaatctcggcgtccagttccgtacctcggagcaggcgaactcggccgtgaatgacctgaggcgtgcgcaggcggaagccgaggtgaggtgtttttgatttgacgccgtcatcccggggctgccggcagaggccgaaaccggaatttcgagattctcaggtgcgcaaccgcgcaccatggttcgcgctttgcgcgcccggaatgacgataaggacaataagagagactcacgtccccggcttgtcgatatcccactcgttacggaacacgtgcccgcccgtatccttcgcctccgcgcgaaagcgcttggcgccattggagacgtacgtgaaacgcagattgggatcttccgagatcgagatcccgccttccatcgacagcacgggactgtcgccctgcgtcagcttcaactggttgatgaagaacgccggaatgtagagttgcgtgacctgatccatctgcagtccggaattgttgggatggccgatcatgatctgcgcctcgcgcacgcggctcgccggcgcatcctcgcgtgcgaactgcctatagcgcatctggccaagccggttgcgggcttcctcgacgttcttgactgccggtgccgagcagccgcccgatgccttcacgtacgtcttggacacgtagagctgaccatcgctgagctcggcgaccgcgtgcacatcggtgtagttgttgacgcgcacgcgtgtcgagatctcgctgacattggcgtcgggcccgagctcgaacttcgccgccatcggcgcgggattgcggtcgatgacgagcgtgatcgaacggatacgccgtgcatcgccaggcgacagcttgctgcgcagggtcaccggcacgatggctgcatcctcggcgcgatacggcatctcgatgccgatgacggcgctgccgtcgttcattggacgattgctgaagatgtcctgcacgaggcccggccagggatcgggggcctcctcggcccgcaccggcgcagcgaaggagatgccgagcataacggcgataagagtcaggcggcgtgtgcatcccgtcatggtcgtgatcccgcgcggacgaaacaatcgttgggtacagcctagcgcgtccgctattcccattcaatttccgagaatgctgcggttgcgttgcgggcgttgtaatcgtcgaacagcagccaatgcggccgttccgaagcggccgccttgtctgcggcggcgcggatcggttcgccattcttgttcaacctgcggacatcggacagcagcgttgacagatagcgtccttcatcgcgcagcgccgcgggccagccgctcacgggaccgtgaccgggaacaacccttagcgccgggatcgcctctaggctcttcaatgcgtcgagccagccgcggatgctgccatccatcaccggaacgtgccggagaaagacgaggtcgcccgcaaacaatgttctcgtcgtctcgtcgaacacggtcagatcggcgtcgctgtgccctgtcggccaggcgcgcagagacagtcggcgcgaccccagatcgagcgtcatcgtgttgctgacgagcaaggtcggcgtgatgatctttacgggatcgatcaactcgctgcccatgatgcgacggaaattttcgagatagaaaggcccgcgcgtcgcgagcgcctgcggcagcttgtgatggccgacgaaagtggtgcttccggccgcgaaagccgcgttgccgaagacatgatcgggatggccgtgagtgttgacgacgtagcggatcggcttgggcgtcttcgcacgcacggcggccagaagcgcttcgccttcacgaaggctgccgccggtgtcgatcacggccacggcctcctcgcccacgatgaagccgacattggcgatgtcaccctcgttctcgcggctcatcagggcgatgatcccggagtgtacaaagattcccggcgcgacttcgctcacaggcaattcggctgccccggcgcgtgctagcgtcgctgtccccagtaggaacaaggctgcgatcatagaagcgatgcgagacacttttttgcctcagttcagggagcctgtcgcgctgcgctgcaacaaggaagccaacgccaagttgagcaacgatggcgcgtcaagcgtcgcatggataacattcaacgacaatgaggaggaagcgcgatgacgcgagctggacgacatcgtcgctggttgttttcactttggatcgtgatcgcgtcctgcgcccttggcgatggcgctatcgcgcagaccagtgacacgggcgatctctcgttcgagctcgtggatcccaaggtgctgcgcgtctgcgccgacccgcgcaatctgccgttctccaacgagaagggggagggtttcgagaacaagctcgcggagtgtcttgcggagaagctgcagaagaagctcgactacgtcttcttcccgcaggcgacgggcttcgtgcgcatgacgctgggtgcgcatcgctgcgacgtcatcatgggctttccgcaaggcgacgacctcgtgcagggcaccaatccctactaccgcacagcctatgcgctggtcgcgaaggcgggcagcgggcttgagaacgtcgatgtactcgaggatccgaagctgaagggcaagcgtatcggcatcgtcgccggcacaccgcccgcaaccaacatggcgctggcgggcttgatgggtagtgcaaagccctatcagttgatgatcgacacgcgcttcgacaattcggcgaaagcgatgattgatgatcttgccgccggcaagatcgacgctggcgtgctgtggggcccgatggcaggctactacgcgaagatggccggctcctcgctccatgtcacgccactggtgaaggaaaccaccgggccgaagctggtctatcgcatcggcatgggcgtgcgtcccgcagaccagaactggaaacggcagctgaacaagctcatccaggacaaccagggcgagatcaacaagatcctgctcgatttcggcgtcccgctgctcgacgagagcaaccggccgctcggtgcggagccgctcaagaagacaccatgaggcagcatctcgccgtcgcgctgctcgctaccgctctcgcagggcaggcattcgggcagcagccggagcccttcgagccggagggatatcgtgccgacaattatcgcgccccggtaccggcgacgctcgccggtgcacgcgtgctgacgacggcggaagccgaggcgatctggcgcgcaaggaggggcactttcatcgatgtgatgccgcgcccgccgaagccgaagaacctgcccaaaggcaccgtgtggcgcgatgcgccgcgcaagaacattccgggcagcatttggctgcccgacaccggctacggcgcgctgccgccagccatggacgattatctccagcgcgggctcgctcgtgcctcgcgcggggacaaggccgcactgctggtgatctattgcatggccgactgctggatgtcctggaatgctgcaaagcgcgcactcgcttacggctattccaatgttgcctggtaccccgacggcaccgatggctgggagcgcgcgatgcttccgacagaggaggcgcagccggaaccgcgccccgatcagtagcgatcgtcaaggccggacgcccggtcgtgacgcaacgttccaggggaaagcaaagcctacttctgcttctgcagcttcgtcagcgtgcccgtgccgttcgtctcggtggcggtatagctcacgcggtcgccggcatggaccgcctccagcatcgcagcgtccttcgccttgtactcctgcagcgccccagcgctgcccgcaccggcaccgacggtgcccttctgcgtctgctggatcgaaatcgtgccattgagccgatcgatccgcatgatcatgccggtcatgtcttcagcaaaagcgctggatgcgagcatgctgagggccgcagcgcccgcgaagatgaatttcgtggttcccatcgaggcctcccggcgtcctggagttcacttcgacaagccatcccggatcaatttggttccggcagatcgcggcgaacgagcccgctgcgcctgtgggaaccctcgtgagtcgcccgtgaggctgccgctattccatttcctgctggatcaaacgcccgagcgcgaacagacgctggtcgatcgtggtaggaacctcgcagacgaagcgcaccactttatggcggtcttcgaaaatacgggtcttccagatcagctcgttgctcagcgcttcgaccttggcctcatcgcgcggcgttgcgccctgcagggcctggagctgaagcgcatcttcgcgaatcttgtcggcagcctcgcgctgcttgcggctgacccgttcgagaccgttcatgacttgggaacgctgggcattcagcgtgtcgaacaggccggcaaacaggagcttcgctttcgcggccttgtcggagccggaggcggctagaagctccttcaccgatttctcggcctcgtccagcggcgtcttgcgtgccgacagctttgcaaccagcgcgctgacctcggcgtcgtccttccacttgttctggacgtcatcgagcggcggaccggcccacacggcggccagcgagatctccggaaccttggcctgggtgcagggccagtccggatagcgcggatcggccgcgagcgcggctgtggcggacagcatcattgtgatggcagccaggacccaaaccttcatccttcgcctccggcagggccgcgtcgcgccagcccgcgcgagggatcataggccaagatcgcaccgatcatgaagacgattgtgcaagcagcgaccaccgccagcgagatccagttgatctgcccgtacagcgcgaagcggatcagctcgaccgcatgggtgaacggattgacctcgcaaagatagtaaagataagggctgccctcctgcacccgccagagcgggtagagcgcggaggaggcgaagaacatcgggaagatgacgaagttcatcacgccggcgaaattttccagctgtttgatgccggaggagatcagcattccgagagaacccagcatcagccccgagaggatcagcgccggcagcacggtaaggtagcccgcggccggcggggtaatgtcccaaagccaggcgatcagcaggaacgcatagacctggagcagcgacaccgcagtgcccgcgagcagcttgcagaacaagaggaacccgcgtggcagcgggctcaccagcagggtgcgcatattgcccatctcgcggtcatagaccatcgagagcgaagactgcatgccgttgaagagctgaatcatcgcaatcagcccaggtgcgatatacacctcgtagaggatgtaggtctcatatggcgggatgatggagatgccgagcacctggcggaagccggcggcaaagatgaacagccacaccaggggccgtaccaatgcggagacaaaacgttcgcgctgatgcaggaagcgcagcccctcgcgccagacgatgccggtgaggcaggtcaggtactcctggactgagaagccacgcggcgtatcgcgcgcggtgatgctgctcatgtgccgcctcccggcatcgtttgcgcgccggtcaggcgcatgaaggcggtgttgacgtcctgcgcgccggcttccgcgacgacgcggctcatcggaccccgcgccagcactttaccttggtgcagcacgacgagatcgtcaccgggcatgatctcgtcgaacaggtgcgtggcccagagcacgccaatgctctgctcggccacgagctggcgaacatggctgatgatgtcggcccgtgccttgacgtccaggccgacggtcggctcgtccagcaacagcagccggggacggtgcagcaacgctcgtgcaatctccagccgccgcatctgtccgcccgagagatcgcgcaccttgctgccggcgcgctcttcgagcccgatgcggccgagcagctcggcgctgcgggcggcggcctcgcggcggctgatgccgtggagggcggcgtgatagagcaggttctgcgtcagcgacaggtcgaggtcgagcgtgcgcggctggaatacgacacctaacagccgcagcgcctcgccgggagtcttgctgatgtcatggccgaagatggagacacggccggactggatgccgaacaggcgggtgacgagcgagaacagcgtgctctttccggcgccgttgagtcccagcagtgccgtgaagctcgccggctgcacgtcgaatgacacgtccgtgagcgcgcgccgtggtccgtaggaatggctgacgccctcgatcgacaacgccggcaacgcggccgcatcaggcctcggcatctgacgttgctcggtgaccggggcagggctggtcatggcgcaatcgcgacgccccaaggcagttcgcccacctgaatggtcttgatgactttctgcgcggcgacgtcgatgaccgagacgtcgttcgacacgccattggtggtgagcaggtatttttcgtcgggcgtgaacgcgacatgccagacgcgctgcccgaccagcagatatttcgtcactttgcgcgtggcgacgtcgacgaccgcgatgcggttggcgggcccgagcgcgacaaaggcggtcttgtcatctctggtcatgccgatgccgaccggctggatggcttcttttcgcaagcccgggatttcgaacgtgactttgccgatcacttcgtgcttcttgggatcgatgatcgagaccgtgccgccgatctccgaggacacccagacttcggagctgtcatgcttgtactcggcaaaacgcgggcgcgcgtcgaccagcacgttggcgacgatctggcgcgtggcggtgtcgatgaaatgcgccatgttggtggtctcggacgtgttgatcagtgtgttgccgtcggggctgatggtcatgccctcgggctcgacgccgacctggatatcacccaggcgcgcgcgcttctcgaggtcgatcacggtcaccgtgttgtcgttctcgttggcgacgtagagagtctttccggcggcatcctgggcgaacaattccggatcggggccggagggcaggctgtcgacgacggtctgcgtcttggcatcgatcacctggatggtgtcgtcgtcgcccactgcgaccatcacgaactttccatcacgtgtgagatcgatcccgcgcgggcgctgaccgactttgatggtcttggtcaccgtccaggtctcggtgtcgatgaccgacaccgtgttactcttctcgttcgaaacataggcgatgaacgcatgcgcaggcgctgcgacgagcgccattgcggagagtagcccaacacgccacatgcgcaacatctgcgtcctcacttcaacttgcatttgctctccgggcgatcgtagccgagcgtgtcgagctcggagacctgatgcaggaaaccttcctgcggcgataccgacaccaccatgcggccgtcgaccagcaggatcggctggcgaagctgcaagttccagtcacgcaaggtcagccgcgtgcctttgaaggcggcgaccgagaaatccgggcccttgatgaagtcggtcaccttcttgatgtcgccggaattggtgcgcgaggtgccttcgccgatcatgcggaccgcggtccaggcctgcatgtcgagcgcggtcatgcgccgcgaattcagcttgaagaagcggttctggatctggatcgcgccccactggtcctgcgccgcgtcccagctccgcggcacgaggccggcggagcccgcgacggggcgcggatcccaggtgcgatagggcaggtacgcgccgaagacctcgctctcatcggcggcgatcagcacgtcgtatgcgggcgcctgctgcgtaaacaccggaatctggcgctggatcagcgtcacgccgctgtcggtacgtcgcgcgccgcctttgtcttcgaaggtccgttcctggacgatcttggcgccgaaccgcgtcgcggtgcgccggagcgcatcggcgaacagcctgtcttcgttatgggagccgaccacgagaagccagcgcgaccactttttccaaacgagatactggccgagcgcatcggccagcatcgcgcgtgtcggagcggtgtggatgacattggcgcggcaatcggcctcgcgcaaccgttcgtcgattgcgccgacgttgaacagcagcgtgccgcgctcacgcagggcgtcggagactttcagcagcgcatcggccggcaggtcggcgatgacgaacccgttcttgtcagcgagggcggttgcagcctggaccggatcctcgccttccttgacgcggcgctcctccagcgtgaagcgctggttgagaaactttccggtggtgttgttgtcctcgatggcgaggcgggcgccggcgaggccgtcattctccgcaggttgctcggccagcgatagcgtcgatcgggtgccggcaattccgagatagccgacgccgatcgtaaccgggtccgcggcgagcgcactcgtggcggcaacacccagaccgatcaggccgaccaaccatcggatcatgtttcctccaggcgttctccccagcttgaccgctggtggagaattgtctctgctgaagcatgaccaatttgtcagggcatgcaaccccgcatttcgtcctcgcgcgcgcgaggacgggaatcacgatcgtgcgagcattgataggctttgcggctttgttgttgacgggttcggtcgcgctcgccgatccgccaaagcttgcggtcttcgatttcgagctgatcgacaccagtctgcccggtgagttctacggcgcgaagccggagcaggcgcggctggagcgtatcagcgagcagctgcgcaaggaactggcagaatcgggccggttccagctccttgatatagctccggtcagggatgccgcccgtcgcgcgaacctgcaagcctgcggcggctgcgacctcaagctcgcccgtcagctcggggccgatctggagatcaccgggctcgtgcagaaggtctcgaacctgatcatcagtcttaacgtctatctccgagacgtgaagaccggcaacatgatcacggtcgccagcgccgacatgcgcggcaacaccgacgaagcctggacgcgcaccatgagctacctgatccggaaccgtttgctggcgccgaattacgggcggccggagtagagcagcaatagctcgccgcgagggcgcttcgcgctcacaagcggagaaggaaaaaacgctacgccgtcaaccttgctgcgtgccagtgcaggtgatcgctcatgaaggtggagatgaaatagtagctgtggtcgtagcccgcctgccgccgcagcgtgagcgggatgttagtcttggtgcatgcctcttgcagcagctcgggcttgagctgctccttcaagaagttgtcggcatcgccgtaatcgaccaggaagccggagaatctcgcgccatcctcgatcagcgccaccgtgtcgtggttgcgccaggcgtccttgttcggcccgagatagccggtcagggccttgatgccccagggcacctgcgaaggcgccacgatcggggcgaacgcgctcgcggcgcgatagcggtgcgggttgcgcagcgtcaccgtcagcgcaccgtggccgcccatggagtggcccatcaccgattgccgtttggcgtcgaccggaaagttctcggcgaccagcttgggcaactcgtcggtgacgtagctccacatgcggtagtttcgcgcgaatggctcttgggtcgcatcgacatagaagccggcgcccaggccgaaatcataggcattgttggcgtcacccggcacgtccggcccgcgcggcgaggtgtctggtgcgacgaagatcaggccgagctcggcgcaggctttgcggaattcgcccttctcggtgacgttggcgtgggtgcaggtgagtccggaaagataccagaccacgggcagcttggcgccggccgcatgcggcggaacgtagaccgagaacaccatgtcggttccggtggcctggctggcatggcgatagacgccctgcacgccgccatgggatttattggtcgagacagtctgaatcgtcatgcccaagctccgtggcatctcaccccatcaacaatgcacgcttgtgtgaccgaaatttgtggcgtcgtcaggcgacgccactgtcgatcgccagccgcaccagctcgaccgaggttttcacgccgagcttctggcgcatgatggacgaggtattggccaccgtcttgtaggacgattgcaccagccaggcgatctcggacaggctcttgccggcgctcagcagccgcaggatctccatctcgcgtgcgttcagcttcgatagcgggctttgggccagcgtcggtcctgcaaaggcgatgctgcgcgcgatggcagtgggcagataggtgccgccgccgctgacggcgcggatcgcctcgacgaggtcgtcgggatcgccggtctttgagacataccccttggcgccgcactcgatagcgcgcgcggcgaaagcaggatcgtcgttcatgctgaacatgatgatccgggcctccggcgcgcgctcgaggatgcgacgtgcgagctcgaagccggacacggtcggcaggttgatgtcgatgatgcagaggtcggggcgttcgacgatgaagacgcactcgccgtcttcggcgtcggcagcctccagaatctcgatctcgccctcgtcggccagcacggcacggcagccggaggcgacaatgggatgatcgtcgacgatcagaatgcgcataggcgttccccgcgacagcgcgtccctgcgttagagtttgcctgttttgcgctgcacgcagccagcatgaggaactgggcgtctcatgtggcctcatgcaacccggccgggattgctgtacgcttccgattagatatcgggcgcttcgcctctgtcaacgtcatcggacaggcgcgggcatccttcgcgaggcactggcgatagcaatgtggcaaaatttatccttgcgcgggcgcatcaatctcttgctggcgctgctgctggcactcgggctcgccgtcaatatcggccggcaggtcgcggaggccgggccgcgcgtgcaggccgaggaccagagcgtaatccggctcgcgcgcgaattcatcgagatgatcgtggcggacctgaacgaggcgccggagccggacgcccggctgaaccagatcgcgcgcgatctcagccgcctgcgccatgtcagcatcacgcttcgggacgccgggggtcattccctgacgccgccccggcttgacgccgacgccgacacgcgcgcgccgccggcttggttcgtcggcctggttcatcccgagcagaccgcggtcagcgtccccgtctcgatccagggcaagccgggctcgctcgtgatcacctcgcaccccgatgacgagatcgccgagatctgggacggcatcgtgacccagctcgaggtgggctcggtgatcgcgctcgcgctgtttttcctgatgatgaatgtggtcggtcgggcgctggcacccctccagtcgctggccgaggccatggggaagctcgaacgcggacattacgaggcccgtgtcacgccgggcggcgcgccggaactcgccgcgatctgcaccaagctcaaccaccttgccgcgacgcttggcgaggcggtcgaggacaagcgtcgacttgccgagcgtgcggtgtcgcttcaggacatcgagcgcaaggagatcgcgcgcgagctccatgacgagttcgggccgtatctgttctcgctgcgcgcgcatgcgagcgcactggccaagctggcggatggacgggacccgagtgcggacgccgtgcgcaaacatggcagcgccatgctggagcagatcaacgcgctccagcagttcaatcgccgcgtgctggagcgccttcggcctgtcggccttgccgagctcggtttgcgcaaggcactcgaatccctgtcgcggctttggcggcagtcgcatcccgaggtcgcgatcgagaccatgatctcgccggcgctcgggccgaccggcgagaccgccgatctcaccatctaccgtatcgtgcaggaggcactcaccaacgtattccgccacgccggtgcgacctcggtcaacgtcgtcatcgagccggcggagcagatggctaacgacggccgcggctgcgcccgggtgcgggtcagcgacaacgggcgcggcatggagccggaccagaagctcggcttcgggctcgtcgggatgcgcgagcggataatggcactgggcggcacgctcaacgtcgtgtccggcgatggcggcttgactgtagaggccctgattccgactgcctcgtcatgatccgaacatgacgtccgagaccacagggagggctcgacatgccgatgtttggccgatggatggcgtcgattctggccgccgcgatggtgtcaggatctgcgctggcggcttctcgcggtgatcccgtcaagaagttcgacaccgacaacgacggaacgctcgaccatatcgaggtcaggaaggcggccatggcgcttttcgccaggctcgacccggatctcgacggcacactggacatgcgggagttgcgggggagattgaccggcaaagagattgcggcagcagatcccgaccacgatggaacgctgtcggtgaacgagtatctcgccgtggtctcgcagcggtccgacgcagccgatccggatcatgacggcacgctggatagaaccgagctgaaggcgccggctggacgcgcgctgcttcagctgctgcaatgagcagccggctgcccgtcagttcgagctatccgcgttgcccgcaagctcgtgcgcacggcggagcaggtcgctcgtgcgacggagaccgagcttggtcctggcctgcttgacgagccgagcgacggcacgaggcgtgatatccagctcttcggcgatcgcagaataggaattcccttggccaagaaggctgagtgtctctctttccctgcgggtcagcatggcggccttgccggaatcaacgtgatcggggaggggaacgccgcgaagattgatccgctcgtcgacatagcgatgtccgagcctgacctgacgcactgcctttggcagttcgtcgggcggagagtccttcagcaaatatccgatggctcctgccttgatcgcggacgcaacgatacttgcgtccgcatgcatgctgaagaccagcacgcgcgcgagcggcgcatccgaggacatgcggtgcagcaagtcgacgccgcccagcgcttccccgggaaagctcaaatcgaggatgacgactccgggccggtgctccaggaatgcttgatagccactcgggacatcgcgcgccgcgacgacgtcttcgacgtcccccagcaccacgcggcaagcttctgcaatgattggatggtcgtcgacgacgagtatcgggctcaatggaactccctgaattgcatcgtgtttcgacgagacgacgggtgcggtggacgccgcatcagccggctgcggcggtgcctgccgcagccgtgctgccgcgtcacttcttgggccgtatcgcgtcggcggtgccctggatgaaggcctggatcttcacgacatcggcttccgtgagcttgcccgtgaagtccggcatgcctttgtcgcggaacggtcctttgaagacgatgctcttgaggttggcgatctcctccgccggcacgtagccgagattgcggacgttgccgcccttgtcgacgccgggtacgccatggcaggtggcgcaggcggcgacgtagagtgctgtgccttccggcacgtccttgggatcgtatttcacgccctggagcaggccttcggtctggtacttcacgaattccggcaatggcgccttgccgttgagcgcgaacgtgtagactgttccggggctttgccgctcggtcgcgcgctgcgccatgccgtagacgccgccccagccgacggcgatcgagacgtactgcacgccatcgagcatgtaggtcgaggccgcggcgacgacgccggtgccggtcggtgtttcccacagcgtcttgccggtcttggcatcataggcaacgaagcgtccatccgcggtgccctggaataccaggtttccggccgtggtcagagtgccgccattccatggggaggggtattccacccgccaggcttccttttgcttgaccggatcccacgcgatcaggcgtccgaacggaagactcttcggcggctctccgttgagcacgaagccgacattccagccggtggcgccgccgaacttgcccggcgttgcggcattctgcttgaagttcttttccggaatgaggttcagcggcacgttctgggccggcagatagaccagcccggtctgcgggttgaacgacatcggatgccaattgtgggcgccgtagggtccggggatcgagtcgtacgccgcctcgccacgcgcggccggcacctcgatcgggcggccgttggcgtcgtaaccggtggcccagttcacgtcgacgaagttcttcgcggagatgaatttcccattggtgcggtcgatcacgaagaagaagccgttcttgggcgcgtgcaggatgaccttgcgcggcgcgccatcgatgctgatgtcggcgaggatcatcggctgcgtcgaggtgtagtcccagtggtcgccgggcgtctcctgatagtgccagacgtacttgccggtatcggcgttcagcgccacgatcgaggcgagatagagattgtcgccgccagcgggactacgaacgttcctgttccagggcgagccgttgccggtgccgatatagacgagattgagatcggggtcgaaggtgatggtgtcccacggcgtgcctccaccgccattgagccagtacttgccggcgggatcccacgtcttggccgccttctccatcgactcgtcttcgaatggcttggacggatcgccgggcacggtgaaccagcgccagagctgattgccgctatcggaatcgtacgcggtgacgtagccgcgcgcgccatattcggcgccgccttgtccgatcacgacctttccgttgaagacgcgcggcgcaccggtgatcgtgtaggaatgctcgtgatcgatcagcgtgtccctttcccagaccttcttgccggtcgccgcgtcgagcgcgatcagtcggccgtcatatgcggccacgaacactttccccttgtagagtgcgacgccgcggttgacgacgtcgcagcagcctctgtagccgagctcgcggttgacttcgggatcgaacgtccagatgcgcttgccggtgcgcgcgtcgatggcatgcacgacgctccatggggccgtctggtacatgatcccgtcgatgacgaccggcgtcgcctcgacgccgcgcgaggattcgagattgtaggtccagaccaggccgaggtctttgacgttgtcgcgcgtgatctgattgagcttcgagaatcgcgtctcggcgtagtcgagaccgatcgtgggccaattggtggacgtcgcggtgttcgccctgatgtaggcgctgtcgacctgcgaggtgatggctttgatgttctccggcgtcggattccttgctggatcctgcgcggaggcggcggcaatggatgtgatgacgccaatgcctgtgacaaggcctgtgacaaggcctgtnnnnnnnnnngagacctgtgacgaggctgcgggttggtcgagccgacgaatatcgaactgaaaagcgatcccccaacgtcatcatgtccctccctgtattttcgtttgccgtaaaagcaccccgccacgagggcggggtgagtctacggatgaatgactcgcgatcggatcgcgatgtcgagccaaggattgcacgaaggccccttgcgaagttcggcaaaaagtctcgtcccgtccgggaattgttcccagttgagcgtcgggggcttgcgcccaccgtgggagacgtcgggaataattcccgattttgccgggaattcgtgctccgaagaggtcggaccttttacggctggtgcttttcggctgttggcctgtatcgttcgcctaaccggcggggaaacaagagagccggacgatgcgggtggaggcggcaggtatgggcgttcgtagtctggtcatcatttcaatttctacgggaatggttgttgcgaccgaggctgttgccgctccagacgagcagaccaacgtccagaacctgccgccggtcgaagtgactgcgccagcgccggcagcgccgcgggtggtcccgtcgcggccggttgcgcgcataggcgcgccggcatccgccgccccgaggactcggctctatgtcttcccgacctcgcctggcatcggccggggtctcgatgtcgacaaggtcccttccgcaatcaacgccgtcgatgcgagccagatcaagcgaaccaactcgctgaacgtgactgatgcgttgcgcgacaacattcccggcgtcaacatcagcgaggtcaccggcaatcccttcgcgcctgacgtcgagtttcgcggcttcgttgcctctccggtggtcggcacgccccaaggcctcgccgtgtaccagaacggcgtgcgcatcaacgaagcgttctcggacgccgtgaactgggacctgatccccaccgccgcgatcagatccgtgacgctggtgaccaacaaccccgccttcggcctcaatgcgctgggcggcgcaatcaacctgcaaatgaagaacggctttacttatcatggcgcggaactcgacgtcatgggcggttcgttcggccgcatccagggctcggcgcagtggggcaagcaggtcgatcagaactacgccgtctacggcgcgctcgaaggcctgcgcgacaacggcttccgtaatttttcccaatcgactgttcggcgcttctatggcgatatcggctacagggcgggtgacagcgaattccacgtcaacatggggctggccaagaacaacttcggcgccagcgctaccgtaccggcggagctgctcgacaaatactggggcgcgacctacaccacaccgcagactatcacgaaccgcgtcggttatctcaacctgaccggaaaggtcgacgcgacgccgacctggacgttcgagggcaccgcctatgcgcgccggttcgagcagaacatcgttgacggcaatccgaccgacgtagaggagtgcgccgcagatgcgggattgctctgcttcggcgacgacacttcagccgcctatggcgggggcggcgtgcaactcgccaacccctttgcgccaggcacgatcctcggtgccatcgaccggggctcgatccgttcgtccacgttcggcgtgtcggggcaggccaccaataccgaccagctgttcggccatgacaatcgtttcgtggtcggctcaacctatgatgccggcatctcgcgctacaatgccagctccgagatcggctcaatgggagagaactacgttgtcagcggcagcggcgttttcctcgggccgacccccgcggcagatcccgttgccggtcccgtctcgctgcggacagtcaatcagtacaacggcctctatgcgatggacacgttcaacgtcacgaacgctttcgcgatcacgggcggcggccgcttcaacgcggcgcggatctcgctggaggatcagctcgggaccgcgctcaacggctatcacacctttacccgcttcaatcccatcatcggcggcacctataggatcacgccggaattgaccgcctatgccggctattccgaggccaaccgcgtgccgacgccgctcgagctcggctgcgcggatcccaccaggccctgtctcatcgcagccttcctggttgcggatccgccattgaagcaggtcgtctccaagaccgtggaggcgggcttccgcggcaccaaggagctgaacatcggcacgctcggctggaaggtcggtggtttccgtgccaccaatcacgacgacatcatggcggtgccggtcgtcgggcggaccggcttcggctacttctccaatgtcggccggacccgccggcaggggctggaggccgaggtcaacatcaagtcgcccacgctccagttccaggcgagctattccttcgtcgacgcgcgttttcttgatccgctcgagctcggctcggaaagcccgtttgccgacgacaccaccgaaaccatccaggtgaggcccggcaaccagatcccggcggtcccacgccaccgcgtcaaggtcggcgtcgactacgccgtgaccgatgtctggaaggtcggcggcaacgcgctgttcgtctccagccagcatctcgtcggcgacgagtccaaccagttcgagaagctgccgtcctatacggtgttcaatctccacacctcctatcaggttgcgaagaacgtccagctctacggccgcgtcgacaacgtgttcgacaagcgctacgtcacctacggccagttcttcgaccgcgatgccttgcccaacttcaccaacggcggcagcgacttcctcgacccgcgctccctgagcccggcacggccgagggcgttctacgcaggaatgcgggtgacgttctgaaaccagcgtgacgcttccttttcccaacaggggagagggctctatgcggcgcaaggggctttggggtttggcctgagacggtcctgccttgcgcgatcctgcttccaggcaaccgagcggctgcacaaagaaacgttgagcgacgatgcgcagtcgagcggctccgcggcacagcttcctggcccgcttaaccaatcagaaaccatgacgaatgatctgaaaactttaacgaaacgacttggcggcctgcgcgtcggttcgtcggagggcccgtccgatgacagagcaccagttgagagagcagcaattccggatcgcgcgctataggcatttggagcgggaagtgaccgatccgctcgcggcgtgtctgcttcacagcatcatcgaggagctcgaagccgagctgcggaaagacgggccggatcggctcgggccgtgcgattaacgctttcttagcgctgatcatgcggattgtcggcctgggaacaccaatggagatggctcccatgctgaaggacggcacctatgcggcgtggtacaacacgccgctcgatcaggggaccggaatcgtccatgtcgcggacggccagatctgggggcgcgacagcctgatgacctatcgtggctcctgcacggtcgatggcgaccgcttcactgcgatcgtatcggcgaagcgtcataccgaggggcgagcaacggtcttcggtgttgaagatgaactcacgttggacatcgagggacgctgccccggcaagatcgcgagctacaccgcgacggcacaccaggtaccgggagtgatccttcatggcacgctcattctgacggaacagcagccgccggcaggcgagcgaaccgagcgcgtggcggcgttagatctcggcaggctgccaagattgccgaggcgtttgcgctgagcgggaaagctagcggggcgactggcccgcatccatatgccgcggccttgccgcggcattctgcatcgtgctttcggcacagcttgctttccaaaccgccctggactcgccattgtgcgcctgcaacaaccccgaagcggagaagcatcaatgacggacaaggtctcgcgtcgccgatttgcgaagatcgcggggctgtccgcagccgggatgactggtgcgatcgacgcagccaaagccaagccggcccggccgccgcgcgggggaggcggctttccgccgggtttcatctggggcacggcgacctcgtcataccaggtggagggcgccgtcaacgaggatgggcgtggggcttcgatctgggacaagttcgcgcgcattcccggcaagatcgaggacggcaccaccggcgaccgcgccaatgagcactatcaccgctacaaggaggacatcgcgctcatcaaggcgctcggctgcagggcttatcgtttctccgtggcctggccgcggctgtttccggaaggcgacggcaagcccaacccgaagggaatcgatttctacaatcgcctcgttgacgagctcctgaagaacggcatcgagccgtggctgacgctctatcattgggatctgccgcaatcgcttcaggaccgttttggcggctggcgttcaacagatacctgcaagatctttggcgactatgcggcatacgtcgccaagcacctcaccgaccgcgtcaagaacgtgttcacgctgaacgagagcggccgtttcgtctatttcggttacggcatcggcatcgacgcgccgggcctgaagttgccgcaggccgaggtcaaccagatcaggcacaacagcgcgctggcgcatgggatcgcggtacaggccgtgcgcgcccatggccggcgcggcaccagggtggggccggccgagaacatcgatgcctgcgtgccggcgatcgacacgccggagaacgtccgcgccgcggagattgcgctgcgcgagatgaatgccggctatctcaacgtcatcgtgacgggccgctataccgacgccttcctgaaatttgccggacccgacgcgccgaaattcaccgatgcggagctcaagatcatctcctcgccggtcgattttctcggcctcaacatctacgcgcctcagaactatgtggtggcctccgaccagggcgcgggcttcatgccgctgccgatcccgaaatcgttcccgcacatgaattcggactggctgcgcgtcgggcccgagacgatctactgggtgccgaagctcgcagccaagatatggaaaacagacgcgatctacatcagcgagaacggcacctccggcgacgacgtcgtcacgcccgacggcaagatctacgacaccgaccgcatcatgtatttgcgcaactatctcgcccagctccagcgcgccactgccgaaggcgtgccggtgcgcggctatttcctctggagcctgatggacaatttcgaatgggtctacgggctgaacaagcgtttcggcctctaccacgtcaatttcgacacccaggtccgtacgccgaaactcagcgccagcttctatcgcaacgtgatcgcgaacaattcggcgggggcgtgaactcttccttcgtggagcgttgtcgcgacggggacaggcccggccaagacctcgttgaggctttcgcgtagcggaaaatctgcgtgaggggacggagagggcgcgtcgcgccgcgcattgactctcctctctcccttattcaaaaccgcggtcaacactcatagcaagaggcaacgccaatggctgacgcgctgatcatcgatgcctgcaggaccccccgaggcatcggaaagacgggcaagggagcgctttcgggcattcatccgcagcagctcggagcaaccgtgctgcgcgcgcttgccgatcgcaccggcatcaatacggcagacgtcgacgacatcgtctggggctgcagcgcgcaggtcgcgacgcaaagcggcgatctcggccgcatgtccgcgctcgatgccggctatgacgtgcgcgccagcgcggtgacgctcgatcgcttttgcggaagcggcatcaccagcgtcaacatggccgcaagctcgatcatggccggcgccgaggatctcgtcatcgccggcggctgcgagatgatgtcgatggaggggcggcgcggcagtggtccgatgatgatggacaacggcaatctgcgcctgcgtgcactgcatccccagtcgcatcagggcgtctgcgccgacgcgattgcgaccatggagggcatcagccgacgggacgtcgatgcgctcgggctcgagagccagaagcgtgccgcgcatgccatggcgaacgggtacttcaaaaagagcctggtgccagtctatcgcgaggacggcagcctcgcgctcgaccacgaggaatatccacggccgcaaaccacgatggaaggcctgagcagcctgaagccggcgttccctgcgatcgccgactacgctctcgacgacaagggcacgacctatcgtggcctgatcctgcaagaataccctgagctgaagatcgacttcgtgcatcacgccggcaactcctccggcgtggtcgacggcgccgccgcgatccttctcgcatcgcccgcttacgccaaggcgcacggcttgaagccgcgcgcccgcgtggtggcgatggccaacatgggggactcgccgaccctgatgctgaacgcgccggtgccggcgacgcgcaaggtgctggcaaaggccggtcttaccaccgacgacatcgacctgttcgagatcaacgaggcctttgcggtggtggcggaaaaatatatccgcgacctcaagctcgaccgcgcgaaggtcaacgtcaatggcggctcgattgcgctcggccatcccatcggcgccaccggctcgatcctgatcggcaccgtgctagacgagctcgagcggcgcgatctcaagcgtggtctcgtcaccatgtgcgccgcgggcggcatggcgccggccatcatcatcgagcgcgtctaggccttttttcgcagggtgaatcgcgaccggcctcccccaagaggccggtcgttgcttgtcgaaagccgcgaatcagatttagcaaggtgtcgtgcgggcctttgaaacaaggcaaaatccgttgcttgtggcttctgccgctccggaagtagccaaaaagcagggttttttgccacagggggccagaaaagcccgtaaaatcgcgagaaaactgtgcagaaggctataggccttcaacggttggtctaatatgcaaccggcaacgaatcagaggagacacgatgccaacccagatgtccaaatcgcagttgatcgaaaagattgcgaccgccaccgagctttccaagcgtgacgtcaagaacgtcatggagacgctgaccgacgtcggccacaaggagctcaagaagaacggcctgttcctggtgccgggcttcgccaagttcgtggttatcaagaagcccgcaaccaaggcgcgcaagggcaccaacccgttcacgggtgaggagatgatgttcaaggccaagccggcccggaagatcgtccgtgctcgcccggtcaaggctgccaaggacgccgtgggctaacaacgcaaaggccccctcggattggagggggccttttgtttcgaggcagccgcgagggcctgagacggagggctcagcccttgcggcgcttcacccggaccgggaccggctgaagccgcggctgggctcctgcaagcgcatcgcgcagccggtcgacggctcggtcgagcagttcgcgcacccgctgcgttgtctgcgatttctttgctctgtccagcagtttcggcatcgccttcactccgccgcttcatccacttgggcctcgcccggctcgagcgcggcggcaatggcctcatcgacgcgctccagccagatgaattcgaggttgtcgcgcgcgctcttcgggatatcgtcgtagtcccgcttgttgcgcgccggcagcatcacccgcttcaagccggcagcagccgcggccaccaccttctccttgatgccgccgaccggcagcaccagcccgcgcagcgagatctcgccggtcatcgcggtgtcgctgcgcaccgtgcgattggtgagcagggaggtcagcgccgtgaacatcgcaacacccgcgctcggaccgtccttcggggtcgcgcccgcggggacgtgaacgtggatgtcgctcttctcgaacagctggggatcgatgccgagctgggaggcccggctcttcaccagcgtcatcgcagcctgcacactctcgcgcatgacgtcgccgagctggccggtcaggatcagcccgcctttgccgggcacgcgcgttgcctcgatgaacaggatgtcgccgccgaccggcgtccaggcaagcccggtggcgacgcccggaacgctggtgcgcaatgcgatctcgccttcgaagcgcggctggccgagcacggtcgcgatgtccttcgccgtcaccacgaccttcgcggccgtgccttccgcgacctgcaccgcggcgtggcggaacaccttgccgatctcgcgctcgaggttacgcacgccggcctcgcgggtgtatcccttgacgatcagcttcagcgcctccggctcgatctcggcctgctcggccgagaggccgttggcctccagctgccgccgcaccaggtaccgctgcgcgatctccagcttctcgtcctcggtgtagccggcgaggctgatcagctccatgcggtccagcagcggaccggggatctggtccagcatgttggcggtcgcaatgaacaccacgcgcgagaggtcgaagggcacgcccaggtagttgtcccggaatgtcccgttctgctcgggatcgagcacctccagcatcgcggcggagggatcgccctgcacgccacggcccatcttgtcgatctcgtccagcatcatgacgcagttgcgtgcgcccgccttcttgatgccctggatgatgttgccgggcagcgcgccgatataggtgcgccggtggccgcggatctcggcctcgtcatgcacgccgcccaggctgacgcgcacgaagggacgattcatcgcgcgcgcgatggattgtcccagcgacgtcttgccgacgccgggcgggccgacgaagcacaggatcggcgccttgccctgcggagcgagcttgcggaccgccagatattcgatgatgcggctcttgatcttctccaggccgaaatggtccgcatccaggatggctcgcgcctccttgatatcgatcggcttctcctcgggcagcgcccagggcagctcgatcagccagtcgagataggtccggaccatgccggcctcgccggcggcctccggcatgcgttcgtagcggcgcagctccttcttggcatgcgcctccgcctccggtggcatgttggccttggcgatggcggccgtcagctcggtgacctcggcctgcttgccgtcgccttcgccgagctggcgctggatggttgccatctgctcgcgcaggatcgcctcgcgctgccgctcgtcgaaagaggccttggtcttctggccgatctcgttgctgatgcgcagcacctccagccgctcggcgaggtgcttcgacaccttctccacgcggagagcgaggtcgatggtctccagcacctcctgcttgtcctgcggcttgatgtccatgaacgaggtcgccagatccgccagcgcgccgggcgcgctggtaccctggaacatcgctgccagctccggcggcgcctgcggcagcaactcgatcgcctcgatggcctggcgctgcaggttcagcgcgcgcgcctcgatctcgggtgagatcgtggtcggctcggggatctgctggaagcgtgcggccaggaacggcgtccccggcaggaaatcgagaatgcgcgcgcgctgcacgccctggcagacgatgtgatgcgtgccgtcgggcgccgtgatgtagcgcacgatgttggcgatggttgcgacccggtagaggtcgtccggcccgggatcattggtttcggggctgcgttggaggacgatgccgaccggccgctgctcgcgcagcgcctgttgcgcagctgcgatggacttcgcccggccgatcgtgatcggcgcgatagcgccgggaaacagcaccatctcgcgcacggggacgatgatcagcgcgtcgtcggggatcttcacgtcgttattagtctgttcgttcgtgttcatctgttcggtggccatgatcgacctcaggatttggcgaggcgcagtgcgacgcagccgtccatcacgaagcggctgatggcgtagcggccaaggggcaatgcaatacggcgctcaaaacgcccctgcggcagctccagccggtggatgcgggcgttgcgaagctccggcgggagggtgcgctgaccggagatgacgagaacgccgtcgtggatgaccgtctcgacattgtccggattgaccccgggaagcgccaccaggatcaggagctcacgctcggtttcgagcacgtcgatgggcggctcccaacaggcttcctggcggccgaactgctggcgcagccgatcggcgcgggtcagcgaatccagggcttcggacagcatccagtcgaggggattcttgggttgcatgatgtaggctcgggggtgggaaagcctgcatatggggccggttccggggaattccagtgcgagggcgctgatgtgccatgcaccgccgtgcccatccgaaatggcaaacgccgcggctcgggccgcggcgttccgccatttgcctagaggttgggtcaggccgccgcgcggtactcttcttcggcctcgaggttgatcacggaggtggcgagctccgtcagggcgtgatcggtcgcctcttcctcgtccagcgtctcctggagcagccttgccgcgtcctgcatgccgagctcctcggcccaggtgcgcagcgtgccgtagcgcgagatctcgtaatgctcgaccgcctgtgcggccgcgagcaggcccgcatcgagtgccggcgcacccttgaactccttcatgatctcggcgccctcgtcggtgatgccgttgatcgcctcgcagggctttccgcgtgcgggcttgcccagcatcttgaagatctggtccagccgcttgacctggccctgggtctcgcgcaagtgcttgttgaaggcggcggccagctccttcgactgtgctgccttcgccattttgggcaaggtcttgatgatcttgttctcggcgaaatagatgtccttcagcgtctccagaaacagatcgctgagcatcttcggcgcctgacgcgggcggcgtgccgcggtcttcttggccgcggacttcttggtggtgcgtttcttcgctcgtttagccatacgtcctcctcatgaggcgacacgggaaggcctcgccttcctcaatcctcgggcgatcaaaacctccggggaacgaaaagttccaaatcgcacccggcgttcgccgggctcgctcaggtcggacgcttgtaggggtcttcctggcgctgtcgctcttccgtcgcacgatccaggcgtgcccgttcgctgcggcgtagatggccggccttcatcaccccgtaaacaaggaccccgccgagcacgaacgcgccgatgaaccagagccaaagcatctgggccgaggcgtggcccaggagcatgctcactccgctgtcgctcatgattggtctccaccgatgttcattgcggtcatgctgagcttaagtcggccgccgaaacgtcgttccatgcgaccgcttcgtgatggtcagaccagatccgcgagcggttgccgcgccggaggcgtcttcggctcgccgccccgggcggtgaagtcaccggcttcggtcgacgtccgcagccatttcgtcacgtccccgatggcttcccgcggcgaccggccgaacttcctcaagctgcggaaatattcgagctgaagatgcgccgaagtgccgcgcttgggtatcgacttgagatgctggatatcgtcttcgatgcccagatgcgcgatatgaggtgccagcatggcaatcacggaatcaagccagcttcgaaatgaaatcggttcgaacgacaccaggtcgatataggtgccgtcggttccgtagcgctgggcgcgccagcgattctcctcgaccaacgcgcggtgcacggccgaatgcgtggcgttcaggtcgggatggtggacggcatggcggaccagcgcgcgaaacagcgctgcgatcgccacggagtccgcggtagcggtgcagcaatcggtgatgcgcagctccagggtcggatgctgaagcgagggccgcagcgcccaccagacataggtggcgttgggcacgatgcctgcatcgaccaatgtcttcacatacgtctcgtattcggccaggttccggaacatctccggaaagccggtgcggggcagggcgtcgttggcggcattgcggtagcccagcaatcccgttggatagccgcaccagaacggcgacgaggtcgagagcgccagcagcagcggcaggaacggcacgaggcggtgcatgatctcgacgcgcaggtcgggctcgggcacctcgacatgaacgtgcagtccgctgatcggattgccgaggccgaccattccgaggtcgctgatgaccttgctgtagcggcgcttgcgcgtcatgcgctgctgctgcggctgcgccagcggatgcgtgcccgccgcgatgattccgacgccgtgctccttgccgacctcggtaagaaccgagcgatagcgcgcgagctcggcccgagcatcgcccgaggacgtcagcggcggggtcgccacctcgatctgcgattgcaggatctcggtagtcagccgctcgccgaggcgcttctgggctgccgccatgtagggcttgggcagctccgatcgtggtgccgcggactggcggctgaccagaaagtattcctcttcgatgccgaagcggtaacggtgcatgacctatgctgccccttgcgccttggcatggcggcgaaccgcgtccccgaaggctgtcaggatacgcgccgacgcatggtcggagctcgcccaatagtctgggtgaaagagcgtgccgacggcgaaatcgctcgcgccctcgacgctgactgcctcgatcgaaccgtcctcagccacggcctccgcgaccagacccggagcgagatcggcgatgagaaagctgtgcagcgagttcacggtgatcgagtctgcgccacagatatcctgcaggacgccaccctttcgcagcgtcaccttctgccgcagccggtagcgggcgtcctcgttgtccgcctcgggcgtgccatggcgcttgtcctccggcaaatcgtccggctccttcgccagcgtgccgccaaaggcgacgttgagctcctgaattccccggcagatgaaaagcgcggggatgcctcgcgccagcgcccgtgggatcagccggagtgcgacctcgtcgcggaattcgtcgaacggcccgtcgcgtgcctcgtccgcaattcgcccatagcgcgacggatgaacgttggtctgcccgccgccgacgaaaaggccgtcgagcccgtcgagataggcatcgacgtcggcttctggcgcgacgggcaggatgcgcggcacggcgccggccacgaggcccacggccttgacgcagatcagcgcgaccgaggcgagctgctcgccacgcgcgaccatggaatcggagagaatgccgacctgcggtgaaccgctgcgagcctgccactggcggcgcgaggcgctatgtctccattgctgaaggccataggcgaccgcatcggccgcgctgccgaattgatgaatggcagccttgagctctctgacgtttgtccccaatcgaagcgccatgcggctgcatgcaacgggatcgtgcggatcgattctggagcggggctcgtgcaattgtctcggctgcttctattcgtgtggcgatgccgagtaaaacggcaatcgtagagaatggttgcttcatgatcgagccgctcgatctatttactcagcacgagccttaacttttgttattgctcgcactcgaacagccggacggggagaagcgctcatgattgatttctctctgtccgccttcgtgacgctgctgttggtgatcgatcctgtcggtctcgtgcccgcctttctcgctgccacagccggcctgcccgacaaggccaagcgaacgatcgcgctgcgcgcgccgttgatcgccgcctcgatcctggtggtgatcgcgctggtcggaaactggctgctgcgcgagctcgggatcggcatccccgccttccagatcgccggcggcctgctgctgttcggcgtctcctatcagatgatcttcggcgatcgtccgcaccgcgaggcacgcgaggccgacaaggcgaccgcggagcatgtctcggacgtcgcagtgtttcccctggcgatccccatgatggccggccccggcgcgattgcgaccacgctgctcctttcgggcgacgccggctacggaccgcggctcgccatcatcatcgccgtcgtgctctgcgtctgcctgatctgcatgctgtgttttctctccgcgagcctgatcgcgcgcacgctcgggcgtaccggcaatgccgtgctctcgcgcgtcctcggcatgctgctcgcggcttattccgtgcagttcgtgatcaacgggattgcggccgtccggaccagcctgccatagggctgcgacaatctgtttgttggcttcgccattatttcgtggtcgggcagacgtgccggcaagacgggccgccagatccgggacgctttcgcttgcgctgccatattgcttgacgtacttccgatccaacaagcccatcgtcaggagatctgatgtcgatgacagcggacgagctcgccaagaaacaggccatcatcgacgcctgccgtcgcatgaacgcgctcggcatcaaccagggcacatcaggcaatatcagtgtccggcatgtggacggacttctggtcacgccgaccagcgtgccctatgacgcgatgaccccggaccagatcgtcttcatggcgatggacggtacgcacgcgccgcaccagaagccatcgagcgaatggcgcttccatcgcgacatcctgaagtcgcggcccgacgtcaatgccgtcgtgcatgcgcatccgacctattgcaccattctggcgatcatgggcatggagatcccgccggtgcactatatgatcgcggcagccggcggcgagagcatccgctgcgcgtcttatgcgacgttcggaacggcggagctatcggaccatgcggtgcgggcgctggagggccggctggcctgcctgctcgaccaccacggcatgatcgcgatgggcaagacgctggacaaggcgatgtggctggccgtcgaggtcgagacgctggcgcggcaatatcacggctgcctccagagcggacgaccgccgctgctccccagcgacgagatcgaacgcgtccgccggcgcatggccggctacggcctgtcggaagggtaggggcgggcaagaggtgttcgtgcggatcagacatctcgtcgatggcaaggggacgagccgcaccatggttcggctgcgtgccctcttgcgcagcaatgagttctacctgatcccgctcgcgctcgtgatcggcacgctcgccggcgcggtcgtgacgctgatggccgggatcgcgcagatcgcgcacgtggtgatctacggaatcccgattgatgtccacctgtcggctcacgcgagcgtcagtccgtgggcggcactgatcgcgcccgcagtcggcgggctgtcgctcggaatcatggaatggttgcggcggcgcatgaagatatcgaatgctgtcgatccgatcgaggcgaacgcgttgcgcggcggcaatctgtcgatgcgagacagcgtggtggtggcgggccagactttgatctcgaatggctgcggtgcctccgtcggcctcgaggcgggctacacgcagatcggttcgggcatcgcctcggtgatcggcaagttcttcaatctgcgccgcaacgatctgcgcctgatggtcggctgcggcgctgctgctgcgatcgcggcggcgttcggtgcgccgatcaccggagccttctatgcctgcgagctcatcgtcggcgtctatgcggtcggcagcgccgctcctatcctcgccgcctcgcttgcgggcgccttgaccgcgcaatggctgggcggcgcgccgtattcactggagataccgaaggtcagcgccgtcggcgtcgagcaatatctggctctcatcgggcttgcgctcatcaccagcggcgtcggcatcgccgtgatgcgttcctcgccgatgttcgagcgactgttcgcctggttgccggtctggttccgcccggtcatcggcggcctcatcgtcggcgggttcgccatcgtcacgccgcaggtgctggcggccggccatggcgccatggtgctcgatctcttccaggagatgacgatcggtctgatcgcgctgatcatcgccttgaaggtgacggcctgcctgatttcgctcgcctcgggtttccgcggtggcctgttcttcgcctcgctgttcgttggaagtctgatcggaaagttctttgccgcggtgctgcttttgatcagcccgaacttcgccatcgatccgctggtcgcgatgctgaccgggatggcgacgctcggcgtcgcgatcgtcggcggcccgctcaccatgtcgttcctcgtgctggagatgacccgcaacgtcgacgtcaccgccgtggtgctggccggctgcatcgtcacctcgatctgcgtccgcttcatgttcggtcactccttctcgacctggcggctgcatctgcgcggcgagaccatccgcagcgccaacgacgtgggctggctgcgcaatctcacggtcgagcgcctgatgcgctcggacgtcggcaaggtgccgtcgaccacgacgattgcggccacgcgccgcgaatttgcgctgggctcgcggccgggcatcgtgatcgtgaacaatgcggacgaatatgtcggcctcgtcaccttgcctgacctgttctccagtgatctcgacaccatcgccgacgagatccaggtgatcgagctcgcgcgcctgaccgacatcgtgctgatcccggaaatgaacgtgaagtcggcgatggcggtgttcgacgaggccgaggccgagatgcgggcggtggtcgattccaccgacagccgcaaggtggtcggcttcctcaccgagagcttcgcccgccgccgttatgtcgaggagatcgacaaggcgacgcggggcgtgcttggggcgctgtcttaggccggctatcggctgggcggggccgcaacgaggcaggccacgatccggcggaccagcggcagaaccacgagcagcgtgggaaaggcgacgagccaggacagcgcccaggcgcccggccaggtcgccaggaatgccggcgtcgcgccgaggctccgcagcgtcgatatgaccgacaccacggccgtcatgaggatggacagcacgaacggcatcacgatcggcgcatagcgcgccggcagtttacgaaccgcaatcatctgatttctttcgaggaaatggacgcgtcgagcacgttgaaacccaggaaaatggcatcgatcccgacggcgtcggttgatgcgttggttcacgtgaaacgcttacggcagcctaaaacggcgcggctgttcattatccgctcaggttggatggcgcaagctggatcggatcgttcggtttacaatcgttcaaaacgtggcagatcgccgcgatcaggaaaccatttcagcggtttgcgccttgtagatggtttgcttatgtctctttcggcgagaatagaggaaggtcgaaaatgagtactggacccatgatttccgcagccggccgcaacactgtcgtggctgcgtttgcaagcctcgccctgattgcggcctccgcatccccttccgcggctgcctcgtccgggacaccggccaaggcggctgctgcaagccagcccacgtccgatgtcaccgatttcggcgcagcccggcgtcgccactatcataggcgcgggccgaacgccgcaggactcgccttcatgggcatggcggcaggtataatcggaggcgcgatcgccgagagccgccgccgcgagtactacgagaaccgctatcactacggctatggcccgcgtccgtattatggtggcccgggctattatggcggcggcccctactactacgatccgggctatcgttacgcgccatattgagcggtcattctcgacccgattgagtagtgcttgaaaaagggcggtgctttgcgctgccctttttgatgtttctgcgttcctgaagcccggagcgagcgaaacgcaatccggcgctgttcgcccgagatctcgcgcccttactccttaccagatgacgccggcgctccaccgtgtccgcggcgtg

SEQ ID NO: 147 - DNA, 10155 bp, Bradyrhizobium colbertium
ggagtgccgcgcattccgtacgcggacatagcaactaggcgccgcatccccagagcctctaaggatagtcggcaggcggacagcggcctaacccaaaaccgctgccggctgaattggaccgacccagtcgccaaacgagcaatatctgcagcgctcgcgacaagccggctcgccgcccgccgcaagcgcacggcaacagctttgccacttgcagttggagcgttcatcggccagcgtcctgccagtgacgaagctttgcggctcttcgaaccttcgagactcgccacgtattcatgaaagtgtcgtcggcgcgctgagcggtggacatcaattgccctttagcgcgtggtgtagccgccatcggccatatgaagcgagccagtaataaagccggcacgctctgataatagaaatacgatcagatcagctatttcctgggccgtcgcgagacgccccatcggatgtctggtgatgatggcctcacgctcttgaggcgggcgcgacgccagaaggggcgtatctacgtatccgggcgcgaccgcgtttatccgaatgcccttctcggcatagtcgagtgctgcagtcctggtcaatccaatgaccgcatgcttcgttgctgtgtaggctgatgtgcccggcacagcgatgacgccgcagaccgacgcgacgttgacgatcgcgccaccgcccgcggcgaggagagccggaatttccgagcgcatgcagtagaacaccccagtcaagttcaccgccacgcaatggtcccagttatcgattgtctggtcggccagggcgccacgcggtgtggctatgccagcattgttgacggcgaaatgaagcgcgccgaagcgatcgaccgtcgaacggacggcggcttcaacggctatcaggtccgcgacatccagctcaatcgcgagcgtatccagacccgatttgttgagttctgtcgcaacgcgggcggcggcttcgccgtctttgtcggtgatggcgacccgggcgcccaactctccaagggtccttacgacctgagccccgatgccggaggccgcgcccgttacgaacgctactttctccttaaagctgctatccgcgtacatctgaactggtcctcttgtctcggcattcaggaagagctcggggaggaaccttggcttagggtagtctcgaatttgacctttaaggagctcttcgacccggcggatttaagcatcagtccgtgagaagcgatagtcacaagcatatgtgaccgagggcgtcacgcacccagcgatggagacttcggtcagattggaagagcgacctcagtcgtacgcctgtcgtctcgaagtgccggcattttttaccgagtaatcaagagccggggttactggtcccttcttcaccgttcgaagcctacgacggccttgtactcctcgaattcgaccgcatttcctgaaagtctgtcgtgcccgccttgagctcgtcgcgcacgcgtcgcagggacaggaagaacgtgcgctgcacgggccgcttcaatcttagcattccgccggttgacaatgcgtttagcggccatttgcaaatcctttgttcactcgcggccgcgagcgacggcgtagcagagcggcgggatcgggtcgctattgtatgaagggacccgtcgatgtcgaggtgcggtcaggctcgctctgaccggcgtcttcacgcaacacggacgacggcgtgtggccaaaggccgaacggtaggcccggctgaaatgcgagacgtccttgaaaccgcacaacaaacttgcttccgtgacattggcgacgcgcttgctaagcaggagatcgcgggccagcgagagccgtcgactccagagccaccgcatgggagatgttccaagcggggcaaatgcgcgattgagcgtgcgcggagaaagtccacaaagcttggccagagccgttagatcgagatctggatcgtcgatacggttcaacaccctttgttcaatgaaaggcgctagaccgctcttgatgccgcgcgttgtctgatcgtcggcccttctcatcgccaccgcataaacgtccagcagcgctgttatgagctcatggctgccgaggcatcccggggcatcaagagcttcagccacattcttcatcatgctggccgcaaggcggccgttaggcgacacgcccgacgtggcgcgtggaaagccgcgggtcgcaatgccacgctcgatcatggatccacgcggcacagataaggtcatggccgcgtatccgctagggatgctgagattaaacggccgtccctgctcgtaacaacccaggtcgcccggctgcaagatcacttcttgatcttcctggctgatagcgacgcggccttcgagaagtagcagaacgacgatattgtcgatcggattccgaagaatttcggatcggctacggtggtagaccagcggcgacgatgcgatgtgtccgatctcgacacctccgaaggagcggaccgaaacgctgcccgagaacggagcttcgccaataggctcacaccgtgtcatcgaataggcagagcgcatcgtttcgcgccatcggccgaggtcggtgataccggttcgcatggcaggcgtctgacgcacaatgtactccgcaaagcatggtcaggcgcgctatctcaatcggcagatcgccatgatcgcgctctgaaaaggatagtcactcataacagtacgcgcgccaagcaagatgtcacaagggaaggcgattgacgtctctcagaagagaggcgctggattcgcgtgagcggaagaccctcgcagtctcacgaccttcatcggcggctctgccggccgcgcatggtccggtataataatacctatggtcgaacgttttggccagccaagtcaaatcgctggcgatcctggaaaagcagcgcgccctagctgtggctagaaccatagcctgctcatcggtggcgcacgggcggtccggaaccgaccttcgacccaagaacgctcgagtggaaaagggtagcaatgaaaattgggctagttagcgcatctgtcgttgtcggctctcgtatcgttggcgaaaccctctcgcgagggcaccaggttttggcaatagcccaccatccggagaagatcgcaagccgcgagaatccgaacaggagagcttgcgacatacgcgacaaagccaagcttggctgcccgcttgaaggcgaggaggtggttgtcagccaggcacgcgctttccacctcgaaacctctgcgcttcttgaagctctgtcgcttgccgagagcccggggctgatcagggtcggaggagcgggcctgctgctcgtatccgacggccgcgttctcgtcgacacgcagaccttcccggaagcagccaaggcggaagcgcgcggtacgcagaagctgaaggatgcgagagcagacactcgtcaatccacctttatgtcatccttcgccctgttcgttccacgtgtgcggaccggtgcataccggaccggcaagggatcatctcgtctacacgcatatcgcagggtaaagcggttgcgcgtctcgacgaaatcgaagccctgcgtcatcgctgcgtccgctttacggtaggttagcaacgcgatgtcaacgaaccggcagcgtgaaatcgagcttgacgccggaggcagcctcgtcggcgccgacatgcggaccctctcctggagtgagcaatacaagctcgtatcgagcacggtcattccgcgcccaattgcgcttgtctcgacagatggccccgcgggccgtaatgcggcgcctttcagcttctttaacgccgtggcattggggccgccaatggtcatgttctgcatcggaccaacccaattcgagaagtcgggcgaagaaaaggacacgctccggaatgtgcgcgcgacacgggagttcgtcgttcaactcgtcgacgatgcgaacaaagagcggatgaatctttgcctacccgaatatggggtggaagtcgatgaaatggagcgcgccggattcgcgaccgcgccatccatgcgcgtgcaagctccgcgcattgtcgattgtcccgttcaaatggagtgcctcgttacggacatccgtgcactcggacaaacaccctattggatggttgttggcgaagtcgtctacgttcactaccgatcaggaatcgccgatagcagcttccatgtagacatgctggcgctcaatccgattggacgtcttgccaaccccagcatgtatgcccgcatcaccgacaatttccatatgccgccgccagcgaaggaatgagagcggacggcctctccactgaccaaagtctgaaaggactggcgtgacttaaagggagaaacacagatgaagctcagtttcgatgggaggttggtccgagtgagcggcagaggcgatgggaacggagcggcgattgcaatcggcctcgcacaagccgccgcgcccgtcattgttgacattgatgaggaagctgcagcttcaggtcgggcgccgggcacgtacgctcctccgatgcgcaacggtatggcgctgcggtcctttgctgatcgcggttcatgaatttgatctttgtctgtgatggacgccagtccaagcgcgaggaattgcatgtccaaactcgagcagaaaggtcgggttaccgagagcactatctgcgatctgctcgtcgtcggctctggcgccgccggcatggcggcggccataactgcgcgcacacgcggcggtctgaaggtgatcgtagccgaaaaagagccggtatttggaggcacgacggccttgtcagggggatatctatgggttcccaacaaccctcttagtcaggaggcgggtgtcgaggacagtgtcgatgcggcacggacctatattcgtcacgaggccggcaatcattttgacgagaagcgcgtcgatgccttcctgcgcgcgggtcctcggatggtctcgttcatgcgcgccaattcagccgtcgagtttgaagcggcaccggccttctccgactatcatccggatgcaccaggcgcgctgccaggcggccgaacaatcctcacgaagccggtcagcgccacacttctcgggagcgatcttccgaaactgcggtgtccgagacctgagttgacgatcttcggcctcacggtcggctcgggcaaggaattgtggcacttttatcgcgcgacgcgtcgcgtcgaatccttcttttatgtcgccaagcggctcgtgaagcacggcatagacctggctgtctacggccgcagcatgctcctaaccaacggaaacgcactggcagcgcgcctatttcgtacagcacgcgacctcgatatttcaatctggctcgacagtccggcaaagcgtctgatccgagacgagagcggcagcgtaacaggcgcgatcgttcagacgccacacgggttgaggcaggttatggccagcaagggcgtcgtcctggcctgcggcgggttttcgcaggacattgcgaggcgccagcagatttacgcccataaggcgagcctcggcgaacaccattcggccgcaagcccgggaaacgtcggagacggcatcaggctcggcgaggccgtcggaggacgaatatccgagggctatccgaatgccggtgcgtgggcgccggttagccttgtccctcgcaaagacggatcattgggaccgtttcctcacttcatcgatcgcggcaaacccggcgtcattgccgtggttcgatccggccgacgttttgtcaacgaagcgaacagctatcatgactttgtgcaggcgatgataagcgcttgcccgaagcgcgaggccgccgaggcattcctggtcgcaggtcactggaccgttcgtcgttacggcttgggtcacgtcaagcctgcaccgctttctctgcggccatcgatcgagtcgggctatctgatcaggggcgagacaatcagcgaactggccaccaaggccggcatcgacgcccaagggcttcaggaaactatcctggcctggaatgcggatgtcgtcacgggcacagatcggcagtttgcgaaagggagtacggcctacaatcgctttcatggggaccctgaggttagacccaatccatgcctcgccgagatccagggcccgttctatgcggtccgggtcgtgccgggagatatcggtacattttccgggctcaagaccgacgaacacgcgcgtgttctcgatttcgatggcaagccgattagagggctctacgctgccggaaatgatgcggccagcatttttggcggcaactattccggtggcggcataacgctcggaccaggaatgacgtttggcttcattgcggccgagcacgccgcgggggcgggaaatgcggacacataatactcattcgcgacacggcctctcaagcagtcagaccggcggcaacatagtggtcccagtgtccgaacgactgatcatggggcaggcctatagggaggcaacagaaatggaaaagaatccgaaatgcaaaggcgccacgcttcgcggcggcgtcaacatgctcgaaggcaaagggccgcatctcctggtcgtggttgccggaggctggttcaagaagatcgtaatgccaacctatccgagcggctggcggtagtgggctgcgcgagcttactgggttggaccaaagcgcctggaatcctcggcctgggagttggcgcaccgagccgctgcactgatcggccgaaggcccgagaagcggacgccgaccgcgcttcgctggtcggttaacgtcgagggatagcaaacaaatgacattggaggaaacgtcatgttgacacgtcgagttgttcttgctgcgagcgtggccatcctatcggccgcgtcagctaaggccgaagacaaggaaattcgcattggtgccttgatggccgcgagcggtccagtcgccttcatgggagcgtcggagaagaacgctttcgaaatgctggtcgagcagttcaatgccaagggcggaatcgcggggtacaagatcaagccgtttgtctacgacaccgaaggcaacggaacgctcgccgcccagcagttcaggagacttgtcgattccgacaaggtctctgtggttgtcggaccatcgagcaccggagagtcgctcgcagtccgctcgatcgcgaacgagatgaaagtcccgctcatctcgatggctggagccgacacggtcgtcgttccccccacgccctttgttttcaagaccccgccaggtgatcgggtcgtcgcggcgcatattcttaccttcatgaaggggagggggatcaattcgttcggcctgctttattcgggggacggctatggccaggcgggagccgcgacggtcaggttggtagcggagaagcttggtgtgaaaatcgcagcggccgaagaattcgggccgcgtgatacggacatgacacctcaggttctcaagatccggtcgagtggagcggactctctcctgatctggagtgtcaaccctggaccgacgatcattctgaagaacgcagcggccctcgggtacaacaagcctatatttaactcttacggtggagcgacgccggctctcatcgagcaagcgggggcagcagccaacaacacctacgtgtcctccatgcggctgctggtgcccgacagcttgccaaaggatgatcccatgcacgccgtcgtcacccagctcgccaacgactacaaagctcggttcaaggcgcacgtgacaacctttgtcggacacccgactgatgcgctgcttctcatcgaagcggctttgaagaaggcgcaaagcaccgatcggcaaaagcttgccgaagcaatggcgagcgacatctcctttcccggagccaatggaatgttccggttcacggcagaaaatcacaacggtttgaacgagaagtccaactccatggtgatgctccaagtgcagaacggtaaattcgttgttgtgaagtgattcccagcgtttggcgccgcggaagcggtgccgcacgaccggaaataaattcgaggcccgaatggatacgtttttacaggtgcttatttcgggaaccgtagtcggatgcgtttacggcatggcggcgttgggctttacgatcgtctataacgcgacgcggatcattaacttcgctaacggcgagttcttgatgttgggtggcgtgttgctcgccggcgtcgccgcggttgcaaagcttccgatgccgctcggcattgcgacggctatcattggtagcggagtgatcggctggatcctgcagcggtgtgtgctcgacgtcccacgcagcagtaatccgaccgcgcaagtgatgctgaccatcggcgcggcgcttgcgctccgcggggccgtagccctggcgttcggacgtgatgtgacgtttgtgcctgagttcggcctgctgccgctcgtgttgctggggaacgtctacgtgccgagcagggactttggatcgtcctgatcctgatcgtggtcagcggtgctctctggtatctcttctcgatgacggtgcttggcaaggccatgagagccgccagccaggaaccacgggcggcagccttgtgcggcatagagccgaaacatgtggcagctatcgcgatggtgctggcaggatgcatcggcgggctggcgggagcgatgcttgcgcccatatcctcggccttttatgagaacggtacgttccttgggctcaaaggcttcgcggcagctgtcgccggcggcatgggcaatccgatgggtgccgtcgttggcggcctcctgatcggcctagttgaaagcctcacagcaggctttgtttcatccggcttcaaggatgcggttggctttgtactgctgctgctagtacttacccttcggcccaatgggctgataggccgggccgcggtcaaaagggtctaatcgcaatgcggatccagacaccaagctccaagctttcgcgcgactggcgggtactcaccggattcgccttgcttctgatggcggccgaactggggatatcgagccaattcctccgctccgtgatcatcctctccatgattcacgccattgccgcggttggcctcacattggtcgtcgggtatgccggtcaaatttcgcttgggcaaggcgccttcatgggactcggcgcttatacgttggcggtgtgcctgcaaagagagggtctgccgatccttatttccctgggcgcggcggtgatcctgccaggtcttctgggcttcatgatcgcgcggccgatcttgaggctctcagggcacaatctggcgcttggcacactggctttgggcgccgtcttctacgttgcagccgctcaatggcacagcatcaccggcggaatcgacccagggattgtcgatctgccaaacgcgggcttcgcggggctcaaccacgaacgcgtcatcttctggacttcgattctggggatttgcggtgccgtggcgatcggcaccagcgttgtcgacggccgtttcggccgcggcctgttggttttgcgctcctccgagctggtagctcaatgcatgggctttgatacggcccgcgccaaatcgatgatctttgcgatctcggcgtcgatgtccgggttgtccggcggactgctcgcactttacctccgctcgttcaatgcctcggcgttcggggtaaatatctcaattgagctcttgatgatggtgatcgtcggctccctttcgacggtgtggggcgccgtcttcggtgccttcgtcatcatagcgttgcccaatctgcttgagggtttcgatcaggcgaagcttttgatctacgggctgacgatgattgcgatcatgatgttcgctccgaacgggttgggcgagacgctggtccgcgccgtcacattaaggcggaaaccaccatgagacgttcggcaattctagaggttcgaagcctatcaaaggatttcggtgggatccgcgccgtaaacgacctgtccttttcgctcacaggcggagaagtcaccgggctgatcggcccgaacggagcaggtaagacgaccgttattaacctcgtcacgggggtgctcgccgccaaccagggcgaaatagccttgtgcggtgctgatctcagcaaggcgcccgccttccggcgttgcgccgcgggaattgcgcgtacgtatcagacgccgcaaatggcgcaaggaatgaatgtgctcgagaacgtaatggctggcgcctatcgattcggtgtaagcgaagcttttgtcccatttgattg

SEQ ID NO: 148 - DNA, 16862 bp, Bradyrhizobium colbertium
tagaggacgacgatcccgatcacgccccaccgcaagtgacgtcagtgcttgactacgacggttggaaagaccttgcccctgaagttatgacgcttttggcgcgaggcgctaggccaaacgcctgccgatcttcaagaccgcatcggcaaccctatcaacctgctccatcgtgagattagaacccgacggaaggcaaattccgcgctcaaagagttcgtctgatactgagcaatttccatggaaaaaatactcggcgtgcgcaaagattggttgacgatgcatcggcttccaaactggacgagcctcaataaactcgtctgctaagtgccgtacaagtagctgaccatcaatccgcgcatctggcgctaggaatgctgccgaaatccaatgcgtggagaaactccattccggctccggcataagttgaatccagctctcattcgagaatgcctcggaatagcgccggaatatttcgcgacgcgcctgaacacgctgatcgagcacctttagctgacccctcccgactccagcaagaatattactcatgcggtagttgtagccaattacgctgtgttggtaatgcggagccggatcacgtgcttgcgtagccaagaagcgggccctatcagccaaacccatttcggacgtaaccagcatccctccgccagaggttgttatgatcttatttccattgaaagaatagataccgattcgtccaaatgtgcccgaatgccttcctcgatatttagcaccaagagactccgccgcgtcctccaccatcggcaccccatatctgtcgcagagcgcccctaacggctccatatcagcgctctgaccgtaaagattcactacgattacggcctttggcaggcgtccattcttgcgcgcagcctccagcgctcgttcgagcgctataggcgacatgttccaactagtcggttcagaatcgatcagaacggggacggcgttctgatacgcgattggatttacgctcgcggcaaaggtaagcgatgaacaaaatacacaatcccctgagctgacgccgaggagcaccaatgccagatggatcgcagcagtgcctgagcttaatgcaacagcgctttccactccgattagctctgcaacctccgcctcaaacgcgtccacgttcggacctagaggagcgatccagttcgttcggaaggcctcttccacaaagtctcgctcagcatctcccatgtgcggagtcgagaggaggatctgttcgtcaatgccccggcgctctatcaaatcaacaacccggccggatacattgaccactggaaggtgatcgatcgtgtgtttctgcatcaagccgagcgcatcgcgccgggtcccgttttccggtaccacaatcgagcggcgccccggcatgatggcgagagtttgatcaagcgacgcgccctcaagcaaaagcctgcgcaggtcgccatccgtgacggtacgctcgaacttgcgatcgccctcgacgagaaggagaacgcccagcccgctgcgatccagcatatcgagcgcgtcgcggagggtggactggcgtgtaatgcagattcccgagatatccatgcaacggtcccccttaccggatcttgcgggcgggcacgcccgcgtaagtcattcccggtaaaacatccgacgtgacgacggcccccgccccaattgtcacgtcgtctccgatcgtgacgcccgggagtatattagctcccgctccgatgaaaacccgcgatccgagccgcacgttcccagccagcgttgcgcctggcgcgatgtggcattggctgtgaaccacgcactcatgatcaacgatggcgccgtgattaacaatcaccccttcaccgatcgtcgcccccggtgcgatgaccgcccgagcggccacaaacgtcccatctgcgatgctggcgctccgggcgatggtggcgaccggatggataattgtagacggtaatccaccgcgcgccttcagcgcttggtgtattctggcccggacgtcgttgcggccgatcgacacgtgaaaacgctgatccatcatttccactgtcgcatcgaggcgctgcacaattcgccccagcaccctcttaccaatctgagtaatggactcatcgactacgcagatgtcaagctgctgcccgcaggactgaagcgcatccagcactaccgtacaatggccaccagcgccgaccagaaagaaatgttcaatagacattgctcttcatcagagatgcacccgtaagatcaattcccgagagtagagctacaatttgcgcgccagcccggccatcgccatagacgttcgttccgtcgaaccgtgatgacgaaagcgcggttccgatcgcgcgctcgagatcgtcgctatcggttgaggaatcgaagacattcgcatttcgttgacgtaaattctgccgtgaaccgacattaacgaccggagtgccaaaacttgcggcttcgataatgccggcactcgaatttcccgcaagcaaatccgccgcggccagccacgacaggaactcttccctcggcaaatgagtcgcgagatgaacctcgcctgcagcggcgcgcgcctccagcatcgatctcacgccgccgcttccagcgtcggaattgggcctgagcgcaataacctgaagtcttcttgcgagcatcgcatcgataacacgcgttgcgtattccgccgatcggtcgatctcttgcaacaccgggtgatagacgaagaggccgacccgccgcgacggatcgaaaccaaccccctgacagagctctttgcgtccggtcagtgcgatatgagcgaggtcgtctaatccaggcgcccccacaacaaacacgcggtccgccgcctcccccatgcggatcagccgatccctgctttcgcaggtcgcaacgaagtgaaagtgggcaagtttcgagatggcgtgccgcaccggctcgtcaaccgtgcccgagcgttcccctccatggatatgagcgaccggaatgttgaggtggatcgcggccagcgcgccggccagcatttcgccgcggtcccccaacacgagaacgatgtcgggtttaatcgccttcaaggcatcgacgaccccgatcagcatacgtccaatattgctggccatccgcgcgccggacgggggcccctcctcgaccgtcactcgggccgcgatgggcaggccagcgttctcgatataccgaacggtaaaaccgtactcgcactgcaagtgcataccggttaccacaatcgatagttcaagcatgtccgactgatggatgagttgcaaagccgacttcatcagcccaaaatctgcgcgcgtacctgaaatataacacactctgcgcggcatcatgcgaggtctgaccagatcagcgtctcgcccgcggcgatcgcacgcgccgacttcctgccgactaccttttcgatgtcgaccggcgcgatcccagttcccgggcgcattagggtgaggtctcctcgcgcgattcggactccagcatcgagcgcgcgaatcgcggtgacgctgcgtcgcaccaagtctcggacgggcaattctgagggggtcggcgccttaatgtctgaacccatcgcttcctcgacatcgcggatctgccgcacgaattccgcaagctgatctggttcaagggaagccttatggtccggcccaggcaaactgcggtcgagagtgaagtgcttctcgatgactatggcgccaagcgcgacagcgccgctggaagcggcaaaaccgatagtatgatcagaatagccgatcggcagccccgtagcacgggccatggtgctcatggcccgcaggtttacgtctttattctcagccggatagttggacgtgcaatgcaggatggtgaccacctcggcaagaggctcaccaaatcgtcgcgccgcgcgctcgtcccggatcacgtcgatggcctgctccacctcgctaagttccgccatccctgtcgaaacgatcagtggcaaattcttcgatgccatgtgccggaggaatggtagattggtaatctcacccgacggcactttgatgcgtttaatgccaagcttaacgaggaagtcgagcgcatcctcatcgaaggctgtcgacatgaactcaagaccgcacttctcgcaatgcgagaatagtcgctgatggagtcgctccgatatctcaagcgacttaagcatgctgtgttggtcgccatcgcctgttgcctgtcgctgatagtcagctttcgccgcgcctttgcacgtcagcttgtccgctgaaaaagtctggaacttcacagcgtcagctccgctccgcgccgctgcctcaaccaaagcgatagcttttgcctcgtcgccgttatggttgacgcccgcctcggcgataatgaaagtcttcatggcgatttaccgtaatgtcgagccagagcttcggcagcaatccagtccgcctcagtgtcgatatcgatcgcctcgcaaggtcgatcgcagagcacaccagcagtccggtgtggaaaaaacgttcgctctcgttctaacacagaacaacggatcaggtatatgttgccggccacatggactgccggcggcaggtcctgcgagcgtagccttgtcccccgcgcttctgcaaatggcacaaggttgccactgttttcccagtgaaagacatgaaacgggtgggggtgcgcaggcgcaacaccgacgactgcttcgcagtcgcccatttcaatgcgcgcgaaggcatcgtgccaacgcgagggctctcgcaccggcgacgttggttgcagcaaggcaacgagaccatatgatcgcccctcgtttcgctcgcgtgccaacacatcaatgacaacatctgccgaagtcgccgtatccgaagccaaagcttcagagcgtagataaggaacatcgacgccttctgaccgagtgatcgtcgctatctcatcggaatcagtggagactataatacgttcaaaacggccaagcgatttggcaaagcggatggaccaggcgatcaggggaatgccaagaaaacaccttacgttcttgccgggcagccgcttcgaaccgccacgggcgggaatgacagcgagcgtcttcatggaatctgccacgctactgcaaaaggtattcttccaacattccaagcccgacgataccgctccgctcgggatggaactgtgtcgcagtcacattattacgcttgaccatcgcggaaatgcgatgaccgccataatcacagtcagcgaggcggtcgctatcgcgggccggctgtgcggcaaacgaatggacgaaataaacggccggcgcccttgaggcgaagggacgcagcagcgtgttgtcccaagacctacctgtctccggctcgataaggtgattccagccgatatgtgggacacgctgaggctcaccagttctggtagtacttgagatcttacgcacgcgacctggcagaatgccaagaccgaccgtctcgccgaactcttcgctagcctcgaacagaatctgcatcccgacacagatgccgagcatgggacgttcggaacctagaaatgtgcggatcgcatcgccaaggccgagctcattaacggcgcgcatgcattcagaaaacgcgccgacgcctggcactaccaaacgctcggcggcgatggcgactttcggatctttggtaacgactacatcggcgccgacatgttcaagagcgcgcgcgacattgagcatgttgcacatgccgtagtcgagcaaggtaacctttcgcgtgatcattgtatttgtcttacggaaagcccggcctcgtaggccgacgcgcgaatgtcgctgatcttgagccgattataatgtaacacgtcggccatcgaaataccgtcagcccggccttgctgcgcggcctgcaagaagtcgttgatcgatcccatgccgccgctagcgatcaccgggaccgatacgccctcgctgacgcgccgaatcaattcgacgtcgtaaccgcgtcgggttccttcccgatcgacagaagtcagaaggacttccccagcgcccatctctacccctctacgcgcccaatcgatgacatttagtcccgtccgctctcgaccattatcggtgtaggcctcccactgacccggcgcgacctgcttggcctcgatcgatagcaccatcgcctgtgagccgaaatggcgcgctatctcggtaataagctccggacgcgcaacagcggccgtgttgatggcaaccttgtccgctcccgatcgaaggatatgacgcgcgtcgtcaaccgagcggatgccgccgcccacggtgatcggaataaagacccgatcggcagcgcgccggatgatgtcactcaaattgttgcggccatagaggctagcaacgatgtccatatagaccagttcgtcagcgccgtcgtgatagtatttcaacgcgaattcctgcgggtctccgatcacgcgaagcccttcgagctgcacacctttgatgaggttcttccccttgatgtcgagccgagggataatacgaacgttattcacgcgatcatgtgctctcaacgacctactcatcatagacggcatggcgcagatgccagcgattgccaccccacttccacagatgaggggagcggaaattgtcagcaagccggtggaaatactgctccgtcatcactggttcctcgaacatcttgctggcttgtggaaactccttggccggaatgcttaagtagcggaagatctcctcggcaaaacgtgccggatattcatgatcgaagcgcttaaccagcgcaactccctcgtcccggtcaatgtcgcccgaacgaatctcctgtgaggcatcgtagctggcgcgcccgatgccgaacttcacgccggtggtataatagtggaaatcgtcgatacggtcgtcgatactgttgtacttgctgtaggtcccggccgtgcgttctggtgaagcctggaagccgccgtgctcgacggcgtaatagtaacagctctgcggatgccacttgaggtagtatcccaggtagtgcacttcgactttctgacgttctatctcgttgggatcggccggtagataggggagcaaatcctgatgctccaccccgaattggctcttcaggtccgcgattgagacgccgcccagatagatgttcgattggtcggcagacgtgaaataggaccaatcacgcttggcagtctcggtgtcgccgatcggattgccgtattcagcctcattctcgccgtagatcacgagcgggatcttgtgcagcagcgccattttcggcgcgagcgacttctggccaaacatgaaagcctggaatgggtggaacaggagatccaccgcgagacgcgtcaggagacgatgcacgcgtccattcggggtcatcagcaggttgtcatggccggcgtggatccagctctggaaattcttccagccccagtcggtgtagatgtgcggcgcccaagtgacggtcagcgggtgcatgccgtacttggtgcgtagaatatgtgaggcgtagaagctgtccttaccaccggatccgggtacgatacaatcatagttgccgttccggctgcggtgctggtctagcaaagtgcgcagctttcgttcgcgctcctcccagtcgatgctgccgttcttcttctcggcaaagcgacaggcatcgcagatcccctcggcatcgaaatggatggtctttttcttgctctccttggtgtgctcatactcgaccgccgaattcgggcgctgatttgagataacgcaacgcctgcaatacacgacctgtttcggaaggccgaattttgttgtcagattgaccgcgtccgccgcaaactttgacttatcgatgtcatgcggggcgggaatcctatccataaaaacctccgattctcgaacgccatagcggccagtctgccggaaagacgtgctgctgaccaccaagccgctcatcggtggtcgaccgtcttttaggctatcggtggtggaaaaccaataagtatcgcagagtagtattcccgtgtagagagcgccaaaccccacttaccgccgtccacccgcaatcaggaccgagggctggaaaccggagtttggtccgttctcttgcgtgcagccacctgcgctagcacccgcttgtagactgctagcagttccctactgttgcgctcgggcaagaagttagacagtgccagttgatgagcagccgcccccatccgcgagacgcgctccttgtcggtagcgagcgattcgatcgctttggccaacgcaaccggattccggggcggcaccgcaagcccagtcacgccatccaccagagtatccggcgacggacgcgcgatcgcgacaatgctggggatgcaaagaaatgcggcttcaaaaatggggcgcccgggcgcatcgtaatgtgacgggaagcacaggacatccatgcaggcgtaggcctgtgcaacgtcagacgtaaagcccgccatgtgaacgcagctctcgagcccatcttcggcgatttttgcgcgcacctcgctgcccacgtcctgaccgagcttcaggcgattaaggaagcgtgaccacaacgtgccggagcgcccggcatccgaaccgactatgatgaattcggcatcgacgccctgttcgcgcgttaggcgcgccgcctcgatcaattcgaagatgcctttgacccgcagcaggttgccgacaaagccgaccttgaacgagcccggctttaggcgaagtcgatcggcaaagccaacctccgctttttttcgagcggggagtgagaacgaattgtgaatgacatcgacgcgaagcggcggcggcagacttgcccgcacggtctcatcgatggcgatgaccgcatccgccttgcggagaagcgattccatcaagcgcgtgcgcagcgaggcagcatcgttccgaacgaccgagcgcacatgaacaatgacgggagccttgaacagatggcgcgcgatcagccacggcacgacgcccgtgatctcgttgatatgaataagatctacctgtttccaacgctgctgcgcgcgccgcaacgcgagaaatgtcgagggcaagaacaccagttcgcgcagcacgaccagccagcgcaggccacggtaatagctgtacctggtattgtcgaactggctcactccccacgtctcgatcacctcgccaatcttgccaaagaaatcatggacggttccccgcggcgcgacgaagaacggctggacctcgccagcaggaagcgcctgcaccgcctcatagaggctgcggcaaccgccggcgaaagcgcccgtcatatgaatgtacaggactctcatgcgcggttcatggaggtcgcctagccgatcaactgccgggacgagttcacaagcttcttcgccaatttaaagaggctgtggttgtttcgatactccaaaaaggtcttgcgtggtgatgccatgatttcggcgaattcagcctcgctgagatccagcttcttcagcgcgtattgacgatcctcctctagtaggtctgcagggtagaccggcgcttgcatcgctttcagcgcctccgccctactcatctgcccagacaggatcaggttcgagtaatgcgccttccgcttgtcgatgtcgaacttccgaggcagcaagtaagcttgatagaaccgagtatagatcgattcgtagtgcttacccccataataaacccatccgagttgctgttgcaggacgtccatggccttctgtttgttgtaatcgataaaatttaggatggagaccatgcgaatgcgccgtacaaagatgtagtagaatagccaaattagcgaaaagtggggataggtggatagtctggtcctcccgaagcggcgatggacatccctcacataagaccagtcgaagtagccgtatccccatttctccggaaggatagcttccgagacgacattggtgccggtgataatgtgcttcagtccgtgcttagcagtgatctggtagagcaacgcccatattgcatgatcagttggcacctccccgtctggggtggaggcccgaagaaacgaagtttgtaagtcgcgaaattcctcccagtcaatcacatgggtatacaggtctatgccgagtatcttgagcgtcttctcaatgtttgcgaccgcaagctcagaattccagccgttgtcgagatgaaccgccaaaggccgcagcccaagatccttcattagccacgcgacgtaagtactgtcgacgccgccgctcactccaataacgcagtcgtaccgcttacccctgccggcgcgctggagctcggccacaagctgggcaagccgctctttgcgttcaacaggcggaaccaaccgatgtcgagctaccgcctcatagcgatggcaatgattacagactccttccgcatcgaaagcgatttccggatcggtcgtatccatgatgcagcgggtacagattgccattttgccgatcgactccttaaaggcggacagaagatgctaggcgtcccgccccatcccggattccctggatatcacctaattcagcgcggcagacaactccgcctgcgatggatacgtgatcagcactgcccggtagggaccgtgaaacacaaacatggcgcccgccgcaactgcagcggcacccgcctgcttcgcagcggtaaaatcgctgacctttccggctccacccgcggcaatcacggggatgctgacgcccgaagcaacccgcgatatcaggtcagcgtcgtagcctttcattgtgccatcgcggtcgatggaggtaaccaagagttcgccggcgccaagctcctgcatccttttagcatataccaccggatcgtagccggttgcccttgacccgccctccccataaatctgataacctccgaacagcttgcgtttgacgtcaatcgaaacggtgatggcctggctaccgaactcgcatgccgcttcgcgcacgagctcgggacgacgcaatgcgacgctattgagcactactttctcgacgccacagctgaggatcttcctgatgtgctcgaccgagttgactccgccgccataagcgaccggcataaaacactcactagcgatattctctatcgtcgagaaagcgggccccctcccggtgcgcgaggccgtaatgtccaatagtacgagttcatcgacttccttgtcattgaagatgcggatcgcgttaacgggatcgccgacatagaccggatttcggaatgtggtcgtcttcacaaggccggcgccgcgaagtagcagcgtcgggatgacgcgcgtccggcgcatctcagaaccgctcgacaaaatttctgaggagcgccattccgaagcggtggctcttctcaggatggaattgtgcgcccaacaaattttcacattggaaagcagcggtgaatgttttggcgccgtagacgaacgtcagcagcacgtcctcaggcttgtgacagactacatggtaggaatgtgcgaaataaaaccgcggctgcggcggaaattcaaccatcaacgcggacggcttgacctcggtgacttcattccagcccatatgcgggaccttgatgtcgggctgtgacgcttggttaaaacgccgcgcgtcggcctgaacccaaccaaggccgggtagctcgccctcctcacttccctccgtcattaattgcatgcccagacacaccccgagcgtcgggacccgttcctccagcactttctggttcaaggccgcaaccattcccgactgctgcagtttgcgcataccggcatcaaacgcgccgactcccggcacaatgatcttggttgcatcggccaaatcctgcgggacggacgcgatcttgcaacccgcgccgaccttcttcaacatgttccgcatcgagccgagattacttgtgccatagttgacgatggtaatcactggacgcgccccctccgaagcgacgtgcattcgttgagcacggcgcgtaagtttgcgacgtgctcaggttgaaagtaatagtgggacgtttgcgcaggcaccacaccccagccgcggctcaagactaggtcggctaattcctgcgggctgtggattaagatggcatcgccgcgctctgcgaggcctaggacaagttcgtggctgggcagggctacgatcgcggtcggcgtaccgatgccgagcgcctcgaaatgacatgccgaggagatgctgagatgcagatcagatgttgcgatcatctcgtaggtgtcaggtttcgaattgccccgccaaagtaccacccggggatcttcggaaaacttagcgtcgtagtgggtggcttccgcctcatatccaggatgcaaacggatattgagttcgaattgggagggacagagccgaagaaactcggcaacgaaatcagcaagtcgcccggcagcgataccttgggaggtcaacgtcaataccggcttgccgggatcagctacaaagcttcgttgacgcaagcctcgattgacatcgatcatgggagagccaaccgcacggatgcgaccaagcctgccgagtgcggaatgctctaggatcttcatccagtatgaaccatacacagtaagtaggtcaggcaacatgagggtctgcctgtcgcacgtaagtacgtcgctggaaaggttgtctggatgctcattactgaaaatgccgtgctgcatctcaatgaacgggataccgaggctgttggcagccaagaatagcgcgaactgtccggagtttggaactagcaagcaacgcggtcgtagccgttgcaacacgaggcggtagagccgggcacgccacctcaggacgctgaatttgaggcggattcgttcggctgaaaactgagtgagtttgagatccgcgacaatgagctcggaaagccgctggaaattccggtcgggtctagcagggaacagccgaccaagtgccgcgctgaccgcaaccacagaagtgtcgctgaacaccggctttcgataggcatgcttttcgttttgattgaacccccgagcatcagcatagagcatcttagcgccacctgagatctgatcaatcaccggatcgaaatagatgtcgtgccagccccgctcgtcgaacttgcggagcgccgaggtcatagtggcaccgagaaactctagatcacgaggtgcaagcgcgagctgactcaatgcgccgaagagacttgctatcaactcgtcgaccggaaccgacgacctatgcaggccaagatcctgaagtatgaacgagatctcgaagcgcagcatccgccacaacgaaatcccgtcagctgtcatcccgaacgcgtcattgcggcgctcgaaatctgctaaaatggaagcgacatccgcctcagatcgaagggcagaagccggattcatcacacaaggccgaagattctagcgactagctgcatcgagtaccaagagtcgtctatggtaacaaggttttttggctcaccacgagcggccgccaccgcctgtgcagcctgatatcgcaaaccgggtttgaaggtcgtgtcatcagcatcgatctcgagcggggtaacggtgcgcgttccccgcaactgaaatgagacttgctcgagcggtcgcatctcgatgcgctgaacggcagtattgacgctgacgatccagggccccggaccgttccaaatgccttcgtaaaggccaatatcgccgctggcaaaaatgatcttggcaagcactactcgtggcgcctgtggactccaaggcaccacagggtcgacgtgggtgatttcgccgcgaccaagcacgcgaaagtaatcgatcaggtggatcgaattagcaaacataaagttgcgcgccactagttccgggtgcttgttgatctcgactgctgcctgctggtcctgctgatcgatcaccttgatgaagcgcaacgacgaatcgtttgctagcagctcagccgcgcgacgggtgctagagtaggcgcgccggttcagtgcaacgtaagcgcggcgtccagagctacgtgcgtcgtcgcggatgcgcgttgcgtctgcaagatcatagcccgcaggtttctccaaaagcaaagtccagggataggcaaaacaagcctttgcaacctccgccatggaaagctcgacaaccgcgaccaccacaagatcggcttgggtcagccggtaaagatctgcgatggaatcaaacacttttgtgccgtacgccgaggctaggcgttcagccttttcgcgggttcggctgtagatgccggcgatgacaacacccggcaagccgtcgaacgcccgcatgtgctcctcggccatatagcccgccccaacgaaggcgacctttatttctgacatgccgctattcccctcaggcccaagcgaatatccgctcacggggtaatcctctttcgagttcgatcggtcgaccaccgctctcgcccgacagattggccgccaccaatgctgcgaccgcgtgtcttccgctactaccgtctgggtaggagccacccgccaacagcgaccgccagagcgccaccgtcgggccaatcacgtccgcttgcgcgatctgacgctgaaattcgtcggcgggcataccgtagcgcgttgtgggaagctcgcgatactctgctcggcggtgaatgccacgaacatagccagcgagctcgtcaactaaaatctgtccattgcggcaggcgtagaccacttcgatgccgtgcccgagatcaccgccgagctcaatcagtaggcgtactcccgaagccgtcacaccgcgcacttgaccggatcgatcgatatattgtgcgccgcgaggatttggcacattagccggatcgaaccaagccgaaatctcggcaagcggttctgcggtcaggtaacgaaacgcttcgaaatagtgtgaggcattcatggccaagccaaagttactggccgtcacaaccattgaccgcaacccgccgaactcaggcgagttcgttagatttttgacgtccgtatactgctccataaatcgcatctggtgattgatagccaacttaacgccggcggcgtcgcaggtcgcgatcatatggtcgcactcctccaaggagcacgccatcggcttctcgcataagatgtagggcacgcccgccgcagcagcggcgcagacgtatcggcaatgactcggggctgttgtagcaacgactactgcgctgggccgcaccgctcgtagcatttcctcagcgcggtcaaataccgtgcttctatcgactgcacattccacgagcgtggtagcgatggcgtcaggggactgatcgaacacacccgccaaatggaacccagccgcacgcgcagccgaaatatgcctgcgacccattcgccccacgccgatcatgcatatattcatcgaaatctccgatactggatttcggaaatttgtcttagaagcgttagggccgaaatccgacccttgctacgctgattggatgatcaaggcaacaaaagtctcttcgtttcggcgaaaggtcgattccgttgaaaaaggccggcagtatttcgttgtaatggctccgtcgcgatgtggccgaaccgctctaccggcctctatgcgagcctcggggtgggtatcgggatcagcttggccatctttcgaaggttctgaacggtggctgcgaggatgaactcgtcgcgcgcgccgtttgggcctcgtagacgtaaacggtcgagcttgagaatgcgcttgaggtgcgcgagcatctcgatctttttgcggagccggcgcgaagtgcggccctccaatgatcttgcgatctggcgcgccatgtcgcgagcgcccgcgtagatcgagcgcggcaccctccgtgaaggctgcttagggcaacaccgagacttcaatgcgcagcgatcacaatcatgcttgctggcgaggtagagcatggtggcgccatcattcaccagcgttccagtcgtggtaagaactttaccgctgggacaacggtagaggtccccggcatggtcataggtgacgtcatcgcgcgagaagatcccgtctgtgcgggcggacttgtcgaagactgtaacgtgcggctcgatgccgtgctcatagaccagccaggcaagcatctcggccgagccgtagccgctgtcaccgaggagccggtccggatagagatcgaaccgtttgagcgagcgctcaatcatgcgtttggcggccaacacctccgcctgccggattgccgtcgtcgcctcgacatcgacgatgatcgcgctctcgacgtcgatcaggtagttcgtcgagtaggcgaagaaggcttggccaccatgcgcccccgtccagcgtgccgccgggtcggagggcgacacgaacttcggcgtgacctcggtcgcagctccgaaagcggcatcatcgaggacagccaggatcgctcgcccggcagcctccggcggaagtcccctgtcgccttcgatccccttctgccgattggcatcggccttgattaggctcgcgtcaacggcaaatccttcgccgccgaccagtcgctcctcgatgcagcggcccaacacgctttcgaacacgcgacggaagggatcgctctgccggaagcggccatgcccattcttggagaaggtcgaatgatccggcaccgccccatccagaccgagccggcagaaccatcggtaggccaaattgaggtgaacctcatcgcacaggcgccgctccgaccggatgccgaagcagtagccgatcaggagcatccggatcatcagctcgggatcgatcgaaggtcgaccgatacggctgtagaagaccaccaggtcctgcctaatctgttcaaggtcgacaaatctatcgatcgaccggagcaagtggtcggcgcggatgtgcctttcgagtgagaactcatagaacaacgcagcctgttcgacttgccgatgccccatcatgatcttcagtcctgccaattagacagtaagcgtcgttctcaggccacggctttga

SEQ ID NO: 149 - DNA, 19439 bp, Bradyrhizobium colbertium
gtcctgatggacgaccacgcggagacgctggcgacacttcagcgactgcgggagatcggggtccaaatctcgatggacgacttcggaaccggctactcgtcgctcagctatctgcagagctttccgttcaacaagatcaagatcgatcaatcgttcgttagaggccatcagagcgagacgagcaagatggccatcgtgcgcgccatcgccaccctgggcagcagcctggggatgtcgacaactgccgaaggcgtggagacggagcagcaactcgccaccatcctcgccaatggttgcagcgacgcccaaggctatctgatcagcaaaccgctgaaggccgatgcagtgaatgaatttctgaaccgacccaaagctctcacgtgcaaggcgcaatcatgacaaacgagcttcaccgacttgtgtattacagccacaaccggatagatgatgaccagcctgatcagatcgattcgattctaaaggtttctcaacggaacaacggcgccgtcgacgtctccggcgctctcatcttcaacaaaggcatattcgcgcaggtcctcgagggccgactggcggatgtcgagcagacgttcgagcgcatacagcgcgatcgccgacatggagacgttcaggttctcgcgttcgaaaaggtcgattttcgtagcttcccgtcttggtcgatgggatacatcggtgccgcgcggagagacatagacttgttcggcccgatcagcgcaagcaccgggttcgaagcagcgaaactggaaggtgatcgcattctcaagatcatgcgagagattgcgatggacgaggaagaacgagcggcgtgaagacaccgatcatcctcggatgtcgttgagggttttagagccggcacgtgggcggagcggcacgtctggatggacggcgggctcgatgagaggacggcgccccattcacgttaggaaggctctgccgggttaggggaggctctgcggaaaccagcgtctcgaagaggagccgcaaccgctgcagcggaggcggaggccttcggccggtatttgtcggcctgaaggcgttgcaatagtccacgatccccgcgcgactatgaagtcggtgctccgggagtccgctgcttcctgcaatccggctgcctccatcggatcgccattgccgcaaacgatatgccggatttgtcgcgcgtgaccggatccttgagaagagcatctccggcggcgatcacgcctgtatggacgatcgagcggccggccaccttgcgtcgggcgtcgacaggatcggcgatcttcttgcccctgttgttgtgtagcacattcagggcagggtcaggctcggcccggctattttccgagcttctacccggctccaccacaatcactagatataccataatgaggtgcattcaactgccttcccagcaggacctcaaccacgtggtcgaccgcgccggcgcgcttagaccatcgaggccgctggccaccgactcagaccgccaccgcggtcgtggcgacgagcccaaccgagatccaaagaggcccagctgaacggagcaggagggcgctttccaccgaaaaacaattttagtcattttgaccaaaattgtttgcctgctaacgatgatcccacggccggtcctggctttttcggcagctacgcgacgtcttccatgagcgggccgctacattgtttcccaagacgtcagatgttcagaagatcgacacgctgatcaaagcccccaaagcgccaggaaggcgtagtggagacctaaggatgaaaaagttcgacggactaagcacgcgcaagagaacctatcgtataggcggcccagacgaggcactcgtgcttctatgggcacgaggcgacgagccggaagatatcgccaggagattcaaactggacttggccatcgttcaagaggccatcgaaatgcacgggcacaaattcaagcgccgcaagttgcgccgtcgccgcattctgtgagcggctctaagaccatggcgcccatcggtttggtcttacggcgcaagaagatcgagagcgctgccgttgcgaattcgattagcatcgggaccttcccacaaggtggtggcctttcctctttacgtaccccacgcggcagctcggctccccgaccagcgagaagcccgccagagagtgcagtgacccattggccccctcagcggcgacaagcagtattctaggcgattgacgcgagagccgcccagtccgacggatcgagctcttccaagctcgctgcggtaccggcgtttatcaggaactcctcgatcccggcacgcaacgttccccgcaccggttcgaactgcaggcactcgcgaagcagagcaatgcgttgacgggaaagttcatcgcctaccaagggcccgtccgccgcccgaaacagccgctcccgaaattccgccgctcccggataggagtccggcagcctagcgtcgttcggatgatagtgattcgagtaggtcacatcgtggaccaagcgacggaaaagaacatcgcagcggatggtgctcaaggaaacctggattgctcgcggctcgagaacgtcgattctggggacgcgacgccgacgatatttcagaggaagcgaccttttcgcctcctcgaactgatcagcggagaaaatcggctcaagcggatcgtcgaaggtcctgagatggcaatgaatccactgatttcgtgggcgcgcagcgcgatcgggccccgcggcggcgacgacgtgaactccgtatttcgacaagacataaatgggctcaccacccgccacatatgcgaatccatcgcagatcaggagatacgacagcgcctttcggcggcattctcgcagcgtggtctcgaaatcatccgagatcagtctttgaatgggaacttcgttcctcttcggaagcggcggctccaagatgcgccggcgtatgtgctgcctgaacacatcttcgtccagacgtgccagctcacctaacagatcgccttcggtcacatgttcttccgaaccataggaccacttgaggggccaccacaattgccctttccaggccagtatctcctcggaaaaccggtgccggccgatgaacgtcgtatccgtgacgcgaaaggccggtttcgcctccgacggatcggcttggttcaggataagcgatgcgcccatttcgcggaaaaattgtttacgaggtttccgaccgcgatagggaatgaactcgacctcatagcgacattcgaatggcaccgcgagaaacatggagggctccgatcgagaaacatcgtcgcgcgacgccaaagtatgcgccagcttgctgcgaatgcatttagctcgtggcgtcatcggagtgggaacgattaacgtttctgtcgtccggaatggtggaaaacccgggaaaacgatgggaagctaattattcagcacacccgcacaggtagcttcatctgcattgctcgctcttgcgtaggggtcgagaccgcgactacgcgctccggtgagcagacggagggtatgcgagcatcccgaggtctccactccaaggcgaccttgcgcactactcgttaacgctggaactgaaagccggctatagggaaacctcgtgttcagtgggggtgcctagcctgatggcgaacaggacgtgggccgtgccgaagatcgtaaagtcgccattaaccgtcatcgtcgtgctgctcggcttcacgctggcgagcttctggtcgctcatcgcttggaaggccgggcaggaaagagcggccgccttcgcgaaggccggcgcggagacgcagggactgacgcactccctcgcgcagcatgcctcgaagagcttcaacgccgtcgccttggctctgttcggagcccgccagtacatccagcattccgacaggtctgcccgtgcgtccgccgagatcaacgatctgctcgctcaatacgccaggaacattccgcaggtccgcgagatcggcgtgctctcggaaaccggcgattggatgttctcgtccttcgagacgatacccccgatcaacaacgccgaccgggaatacttccggtaccatcaggcgcaccccgaagaagccgaggcgcggatcagcgatcctctgatctcgagggtggtcggacggccgacgctgctcatgacgcagcgactgtcggcgtcggatggttctttcgcgggcgtcgtcttcgcggcgatcgacctgtcgtattttcggtccttctacgccgggttcgaagcggagcgggatcgcacgatcacgctcatgaagacgaacgggaaggtcctggtccatcggcgcgacgatcaggtcggcaaggacgtcggcggcagctccctgttcgggacccggctgaaggattcggtgacgggcctctactcgatcgtctcgcccttcgatgggcgagcgaaacagtttgcctacgaggcgctgtcggacttccctgtcgtgatcagcgtggccgtcgcggaagaggccattctcgaagaatggtggaaggaccggaattttgatctgcttctcggcggcgcggtgtccacggttctcctgggttttgcggcgctgctcgcggctcagttccgcaagcgtgcgtcgatggccaggatgctgcgcgagagggagcgggggtaccgcctgctcgccgagaacgtcgaggacgtggtcacaaggattgatgcggaaggacggcggctctacatctcgccgtcggtcgagaagctgctcggctggtctgcggccgagatcataagcgaaggggcctattccaacatccatcccgcccatagtcgcctggtcgaggacctgatccgccggctaggccccgacaaccgcaccgcgacctgcgaatatctcacccgccgcagggacggcaattacgtctgggtggaggcccagctgaacttcgtcgaggagccggaagaacggcggcccgagatcgtcggcgtgatccgggacatatccaagcgcaaggctgcggaagagcagctgctcgaagcgaacgagcagctgaaggcgctctccgaaacggacaccctgacgggcatcgctaataggaggtgtttcgaccgcgctttggaggcggaattcaagcgatgtcagcggtccgggtcgcagctttcggtgctcttcatcgatatcgacaagttcaaggcgttcaacgactgctacggccattcggctggagacgagtgcatccgcaaggtcgcccgggctctcgccgccagcctgaagagaccggccgacctggtcgcccgatacggaggcgaggagttcgcgatactgctcccggagacgacgcccgccgaagcggaagccgtcgcggaaagcgtccgcctagccgtcgtggaccttgcgataccgcacgaaggaaatcgccacggctgcgttacgatcagtgtcggcatcgctggtctcgaagacgatgtgcggagctcgccggcgtcgatgctggccgccgccgacggggcactttacgtcgccaaggaacagggacgaaaccgcgtctgcgcagccgccgagaacccgagtctcaccttggcaagacaggtcggctaaaggtcgtcgtcgctgtggatctggcatggaacgattgcgccgccgagttgaccgtacaaccacggaatccacccagcttgagggtatattcacctgaagagtcgggctgcggaattcatctcaattccagtgggtcgcagccgctctctttcggggcgtgagcgtaccggccgggacgccgaacatggtcgtccggccgttggtgactaaggcccggaattcgaagccgcggtttgcgtcagcgagagcgccaacacgatgaggcccgcccattgttcaacaaaaaggctccagtccggggggaggactggagccttagtcagaaggcatctgttttggcagcagatgcgaaggatcaacggttagcaacggggcgcctccccaaaaggccgcgaagtagctggggctccacaggtggcctccccaggccttgcgcctacatgaggcgataaatggatgaatttctacgaggacgcagcgcagtcactagcctacatccgcatcaggtgttcgtaacaaagtctcataacgtaagtttgcacgcaatctataggtgcatcgtgtcccgcccgtcgtaaccgggttgccgcgaagaaaagttagcttccccatttttgggttttccacggcggcgtgggcaaagcacgcagattcgactcgcatccttcgatccgggctgcgcaggctctccgccatgctgctgcgcaaggcctaccgctacagggtctatcccgacgtcgcccagaaggagctcttccggcggacgctcggatgctgccggcttgtctacaatctctgccttgagcagaagaacgagtatctccgccgccgcaagagtctgtccaagttcgaccagatcaaggagctgaccgcgctcaaggaggcgttcgacttcctgtacgaggtcccccaccacccgctgcagcaggccgtctatgacgtccacgccgccttcgacaactacttcgggggactgaagcgtcagcgcgagcttgcgatgcgcggcatcaaggccaatccggaagactttcccaagtggccgacgttccacaagcgcggacggaaggagagcttccgctatccggaccccaagcagatcaagatcgagcccgaccgcatcttcctgcccaaggccggctgggtccggatcgcgatccatcggccgatcgccggcaggatcaagaacgtcaccgtatcgacgatcgccggcgaatggttcgtgtcggcgcaaacggagctggaagcggtcattccggccaactcggggcctcccgtgggcatcgacctcggaagcgcccagccgattgttctctccgacgagacggtgttcggcattccgcgcgcgacgccggccgagcgccggaggttggagaacgcccaccggacggttcaccgccgcaagaaggggtcgaagaaccgggagaaggccaaactcagactggccaggttgcaggccaaagctgcccgtcgcaggagggacgcggcgcacaaggcaaccacgaccatcgccaagaaccacggcgtggtcgtcatcgaggacctcaaggtcaagcggatgacgaagacgggccgcggcacgtcggaagctccgggaacgctcgtcaggaagcgggcgaacgagaaccgcgctctgctcgacatcgcgcctcggacgatccggacgatgctggagtacaagtgccagtggtacggatcgaccctcgtcgccgtcggccccgcccacacctcggagacctgcagcgcttgcggcgtcgtcgatgcggaagcccgcatcacccgcgctcgctacgtgtgcggcgcgtgcggcggagacttcgacgccgacgtcaacgcggcgaggaacatcctcgccagagcaatcagctcaaccggaggacttccggggatggcctgcggatcgagccagactatcggccggacgcaggaaaaagacgctcgcgagagcagaagctcggcccttcagggccgagagtagtcacctgtagcagtgacgcaccgatggtcgcgttgcagctactcctctcgttcgtcagtcatctccctgacgacccgaacgatatcgtggggatagaaaggtttgtgcagaagtacgctatctgggacggggcggggaggcaccggcgagaagcccgtcgcgtagatgacggacagtcttggattttgctctcgagacctttcggcgatctgccagccgtcgaccttgccgggaagcctgatgtccgtgaccaggacgtccgctgccttccgtgcgcagcaggcgagcgcctcctcgccgtcggcagcgtggatcaccaagaagccggcctcccgcaacgcgtcgaccacgaattcacggatgagagggtcgtcctccacgacgagaatgcgcacggcgatagtcctgaacgccttgagctcgcaatgaagcctaaactgccgaaggtttgggcggttccgggtgccgcatgggcaatcggcaggctgacgtccgaggccgttttgtgtctgggtccagcagacggtcctagaatttcagcgtagtccgcagccctaagactcccgcgttgttgagccgccggccgggtacgctaatctgtacctgttggtggctcggctatcacgcgctcgacctcgtcggccagaaccgcaaggtgctcagcgatccgcgcgaacagctcccgcttggcagggtcggtggcgaggtcgctgatgagcttgcactcggccgaatcggttctgagcttttccagctgtgcgaccatgtcctgcatcgcgccgcctccttcaagccggcggtcgcagaagggccagcatcggctgatgcactacgtcgctcgcgcatccgcgcgaccaagcctgaagttctaatgatacatgcgtgtcacttccccccgagtgacgctagtcaaggcgaagagcctgccgccccggcagcaggcgcttccaccgcgatttcgtccttataccggtttcggatcaaggagcacgtatccgtttttgcgacgcagcgtctgaatcggttgccatcggctcggattacgtatgagatcggatgtcccccagggggcgatttcagaaagtgcattgtcggggagaggttggcatgtttgacgccgctacgaccgctcttttgcggtcgatcctggaggaggtctgccgaaacgtggccagcggcgagaccggcatgcgcacgcacgtcgcgagcaagatcctcgaggccgcgcggcagggcgaggttgccccggagaggctgcgtgaggtcgggcgcgacgcggtttcccgcgcccccaccatgtggctttgaccgtccggagccgcgcgtgaatttccaggtgaccgtcctgaagatattggtgagctatccggaaggattcgccgtgatggaggacttgaagcgggacatggccatcctggcgaccagcggccgcgagtgggcggaccggaccaagcggcttgcggcgcgggtgccggacctcgacatcttctcgcaaggtcttgtggagcgcgaatccggaggctggaagatcactcccaaggggcgggccgtcctggagttcatggaggcgcgcccggttacggagccgccgcatccggcatccgtcgcgggggccgctgcggcggacgccgaacctgcgcttctgctagggcagccggtcgacagggcgaagcgccggcgcgagcgccgggaacgacgccgcgaggcccgggagagggcgcgcgccaaggcatcatgagcaaaccgggtgcgggactggcgccgggggaacccgcgaaccctttcgcccgttcttctgcgatcggaggtctcatgaaagacaggcgaaagaaaaaggaaggcgcggccgcccatttctttggccagttcgccacccgcacctcgcaggccgcgggacgcgcgtcgaccttcgtgatcgccgccttggtagtcctggtctgggccgtgacgggaccgctattcggctattccgacacatggcagctggtcatcaacaccggcaccaccatcgtcaccttcctgatggtcttcctgattcagaattcgcagaaccgcgacagcgcggccatgcaggtcaagctcgacgaattgatcagggtcggggcggcacggaattcgctcgtcggcatcgagcatctcaccgacgaggagatcgaagacctgcggaagaaatgcgagtcgcgcgccaaggcggaaaaggcggcgaacgagcacgtggagacaaccggacgccgagcccggcgcgccgccgagcaggctgcgaattgagtgccggcggctcctaagccgcaagtggcgcaacatcgattgaagctgctgcgtcgtatcgctcgctgcatacgggagccggtgttgctcggcgtcgttgcgcggcgacggcaacgtcgcctggaaggcgcctccccaatccggccaacggcgctttagttcgtcgattgttggtccgccgccctagttccacagtcccatcctgcaaccatcgctaggtgagtaaaatgagtaactggctcggtcacaggattccggttttacaagatccgcaaaagccatcactgtaaacgaatatggacgttgatgcaggtacgaacgccgtgaccgccgcctccacctatctgaaacgtctgatagacgtcggcggcgcaactggccgactgatcgcgtcgtacgattggttcttcgaccccgcttggcccggtagagcaatggccacgaagcctgaagctgacgacggagttgatgcttcggtctcccgtgcctctcgtcatgttgtgggggccggacggcatcatgctctacaacgacgcttattcgctttttgcaggtggacgccatcccgggctgttgggatcgagggtgcgtgagggctggccggaggtcgccgacttcaatgacaacgtcatgcgcgtcggcctcgctggaggcactctgtcctataaggatcaggaactgacgctgtttcgaagcgggcaggccgaacaggtcttcatgaacttggactattctccggtcccgggcgacgacggtcttccggcggcagttcttgcgatcgtcgtcgaaaccaccgaacgcgtgcgcagcgagcgtcttcaggactttcgccgtggactcaaggaccggctgagagaactttctgagccgcgcgacatcctgggagccgtcgtcgattccctgggaacgtatctgggcgccaaccgggtcggttacagcgagaaacgagatagtgacgacgccgtcgtcatcctgtcctgctacgcacgaggggtcgagccgatcgaaggtttacacaaggtgggagacttcggatccgagagcaactcacggcagcgacgcggacttgtcgaggtttgcagcgacgtgctgacagaccctgcgcaggtgcactccacctgggcagctatcgacacgcgcgctttcgtctctgttccgctggtgcggaatggacagtttaaggcctcgctcttcgtcaacttccgggaaccacatttctggacggacgaggaggtggctctcgtcgaggacgtcgcgatccggacctgggaagccgtcgagcggacccgcgccgaggacgcggccgaacgcgcgcggttcgagcaggccggattggcctcgacgttgaacgcgctgatcgccaatgcgcccatcgggtttgcctttttcgatcgtcagcatcgctacacgcgtatcaacgatgtgctggccaacatcaatggtgttccggctgccgctcatctcggccgaaggatcgaggagcttttgccggtcaacgctcgcgtcgtcgcacccattcttgaacacgtctttgccaccggagagcccgtcgaaaatctcgaagtcgacggcgagacccctctgagcccaggcgaacttcggtcgtggcttaccgggttctttccagtgttcgaaaagggcgaggtcgcgcaggtcggtgcgaccgtcgtcgaaattaccgagcgcaagcgcgcggaggaaaatcttcgggcgagcgaggagcggttgcggctcgccaccgaacacgccgagatcggcttctgggacgtggacgaggtcaatcagaaacttcactggcccccgatagtgaaggcgatgttcggcatctcctccgatgtcccagtctccatgcaggacttttacgaggggttgcacccggacgaccgagacagaaccagcgtggcttacgcggccgccgccgacccggaccgacgcgccctctacgatgttcaataccggacggtgggcaaggagggtggggtcatccgttgggtcgccgcaaaaggcaggggcgttttcgacagcaacggacgctgccagcgcgttcttggcacggcgacggatatcacggcgaagaaggctgccgaagccgccttggcagccagcgaagcgaggcttcgcgagctcaaccaaacgctcgagctgcgggtcgccgaagctctggccgagcgcaagctcttggccgatatcgtcgatgggacggacattttcgttcaggtcgccgaccgcgacttcaattggctggcgatcaacaaggcggcctccaatgaattcgccaggatcttcggggtccgacggccccacgcgggagacaacatgctggccatgctggaggctcagcccgagcaccgagccgcggtgaagcaggtgtgggcccgggcgcttgcgggcgaggagttcgtcgaggtcgacgcgttcggcgaggcatcattggatcgccggtactacgaaatgcgattccggaccctgcgcgacgggggcggcaggcctatcggcgcctaccaattcgtctccgacgtaactgaacggttgcgcgagcaaagccggctgaaggaagctgaagcagccctctcccaggcccagaagatggaagccgtcggccaactcaccggcggcatcgcgcacgacttcaacaatctacttggtgcggtggtgggctcgttcgacctgatccgccgaagacccgacgacaccgaaaaggtgcgccgctatgcagaggccggcttgcaggccgccgagcgcggcgcaaagctcaccggtcagctcctcgccttctcgagggcgcgagggcggctcgagatcaagccggtccgggtttccgctctcgtcgcaggcatgcgggatcttttggttcgaacgctcgggcccatgatccacgtccaactcgacctgcaggaggacggtgccgtgttgtccgatcccactcagctcgaaatggcgctgctgaatcttgcgatcaacgcgcgcgacgccatggtgtccggaggacggcttctcatccgtacccgcacgctttccgtgtcggatcagatcgggctggagcccggcgagtacacggagcttgcagtcgaagatacgggggcgggtatgccgcccgaagtcgtcgggcgagctttcgatcccttcttcacgaccaaagaagtaggcaagggaacggggcttggattgagccaagtctacggcatcgcccggcaggcgggaggcaccgtccgcatcgacagccgggtcggagagggtacgatcgtcagtattcttctgcgcaaaaccgacgcgccagttgaggaatccagtggaggcgaggttgagaccgcccgttggccggaaaaatccgcgaaggttctgatcgtcgacgacgatccggacctcagacgcgtgctcgccgcctcgctcgaggccctcgggtatctcgtggtagaggccagggatgggccacaaggactggcattggtcgatgaagccgagccggacctgatcgttgtcgatttcgcgatgccggggatgaacggggcggaggtggctaggatcgtgcgggagacgcggccggggataccgatcgtcttcgcgagcggctatgcggacactgccgcgatcgagcgttttgcatcgaactcggccgtgctgcgcaagcccttccggatggacgaactgcaatccgtgctgacggaagtgctgcgccagaggtcctgaggttcagtcgacatggccattctcctcgatccgacttgagccgaacaacctgagggggatcggccgcggtcgtcacgtttcctgtcgacgtgtctggtcgcgctgctgaccaccatgcttgatcccgatggaaaactttttctgttcgctggacctgccgactagccgcatcagagcgagctcgggtcgtctgcctcgtgagcgaattcagcgtccggcgcgacatctagcgggaggcggtccaacggccggtcaccgtcgtcgcctgaaatgatccggatggactgacgctcccgccgccgcctccggcgaccgttacgcgggtgccggagactgagaaagcgccgctaccgcttccttggcagttcgtgctggtgccgttgaagatccagctgccgtcgaaggcaccggcgcctccgccgctccgacttacccgtcgagaggcgcgcggctccggggcgggcttcctccgcctggcggacggggcgggctcggtcgaacggtccgtccgagagccggagagcgacttctcgtctttgccgatcgacccgcccgcgctgccggattgggcgagggcgcccgacgcggtcacgaaagcgaggagggagccgaaggtgacgctgcggagcaggccattggtcatgagtgcaatccggaccagaacgaaagtcagcggccggagccgtcggcgcagaccgctccaataatgcggcaagctttgccagccttgccgcattcgtcaagcgctgcgtccctggcgcgctgcacgccctcccgctggaacagcgaccaagtttgtccgagatggcgaatgcgccgcagcttctgccgtagaaggagagctcgatcgggcatttggcgcccgcgcaattgccgcgcgcgtccgctaccgcggctctccgtgaggcgtggttacaggagatgccccatttcctgttgtcaggcccgtagacgatcgagccccagggcttgagatcctccatcttgcgcatgcgcagcagaaggccctcggtcgcttcgtccctcagttcggtcgggttgagtggcttctcgggagcatcgcagagatgcacgtgcgcggtttgatcggaccgcggctacatcttgaggagtgccgcccgacctcgcgaggtgaagcgcatcgacgacgatatcggcatctgcttccgcagccaatgctgctgcctgcgacaatgtcgcgaccgtggtgtagggtagaaactccagcccgattctgatgccccatgagcggccgtgttccacaagcgaggctagattgtcggtcgcgcgctcggtatccgggtcgtcgatattgacgatcagatgtcggcgcccatctgcgctcccgcggcgacagccggcagcaggatccccacgtcggtggccggttgaagccaagcggcttcgatcgagagcaactggagccggcgaggcgctgtgatccttgccgcatcgtccttggaaagggtacgcagagaccttctagcgaatcgcttttccgtttgatgaaaagaaggccgacttcattgaatccgccggctttggcagcctcgattgcttgcgtcgtctttgcattgccgtacgtcatcggcgatatggaaacgatcttggtcacggggctacatggctcctgttgaaggcaaaggtctttgtcggtctgcgacttgatctttgagtattttcgtgatggcgccggttcggcaccggttctgaacgcctacatatcctcggcagtggagtgcggcagcgatgcgccgcaagtcgacttggctccttatgtgaaggagtgacatcggcgccgggctttcggcgagctggtcggctactccggcgcgagaagttcgatctgaacgcggtcgcaatctctagcctgctcaaaaacgctccggccgcaccacctgcacgtcactaatcgaaacgaggccgacctgcggggcgacgatggcaaagacggcctgcaataggtcggccgtccggccagcgtcgacgtgcaccaaacggccgacatccccgcggcgtcgccgatctggccgtccgcttcccagcgcccggctcggccgcgcccgccggcgagtggagcgacgcagcaaccgctcacgcccgtgcgctcgagcgtcttcgtcagacgtttgagcagagcccgctcgatgacgatttcgatccgcttcttgtcggaggtctgcatgctgtccttaccctgcgatcatctgagcggcagcgatgtacagcgggatgccgacgatcaggttgaagggaaatgtcaagcccagggagagcgtgagcgcgatcgcgggattcgcggcggggagggcaagccgcatggcagccggcacggcgatgtaggatgcggatgcgccgagcgtcatcaggattgccgtgctgcctgccgacagtgcaatgagccaggcgaagagcgccgcggacgccgcgccgatgagcggcatcccccaggcaaatccggcgaccgcgggtgtcaacgatctccagccgtcccgaaggccgcgtccggcgatcaggcccatgtcgagcaggaagatgcagaggaagccggggaatgcgtccagcaggaagggcttcagcgaggtcattccgcgctcgccggtgatgcagccgaccgtaaacgcacccagcaacgccacgatcgagccgttcagggcgatctcgcgaaggaagcctccggagaacccgtccttggttcgtccgtgcccgctgcgcgcgatgagcagcgccgtaaagatcgctggcgtctccatcgcggccgcaaccgcgatcatgtagccgtcatagggcattgagaactgggtgagcgcgccggtgacggcaacgaacgtcacggccgatatcgatccgtagtgaccggccaccgccgcggcgttgatgtggtcgaggcgcgcgccgtaacgcaacaaagcgtaggcgatgaagggcaagcccgccgacagaacgacgccggccgcgatcgtcagaaccagagctagagtgagtccctgatgggcgacttcggcgccgccccggaagccgatcgagatcagcagatacagcgagagaaaacgtgcaatcgcctccgggacggacaggtccgagcggcccagcgaggcgccgatacccatgccgaagaacagcaccgagggcgagacgagattctggacggcgagcgcgagcacgggacctcctaccggcatgggactgcccgctgcatagcttcccgttgtcatttgacaaaattgattgtctcaacgatcatcattaaaaaaggcaatgatgatgccgcgttcgcgcttgaacctcgacatcgacctcgtgcggtctttcgtgacgatcgtctcgctcggcaatttcacccgtgccgcgcgggcgctcggcctgcagcagtcgacgatatccctgcagatccgccggctcgagcaactcgtgggcggcaagctgctcgagcggtcgccgcagtcggtcgccctcaccgccgagggcgagctgttcgtcgacgacgcgcgacgcatgctcgatctcaacgacgagatggtcgcgcgcatgcgcgagccctcgattcgggggctggtcaggctcggtgcacccgaggatttcgcaacgcgccatcttcccgacgtgctcgcccgcttcgcccatgcctatccccaggtcgacctcgaagtcacctgcgacctgacgatgaatctgatcgagcgcttccgcaaaggtgctttcgatctggcgctgatcaagcgcgaacgctcgttcgagatctccggcacacgcgtgtggcgtgagccgctggtctgggtgacgggcggggtggacctcaggcaaggggtgctgcctctggcggtctcgccgaaaccctgcgtctaccgcaagcgggccaccgaggcgctcgatcgggccaagcgatcctggcgcgtcgcctatacttgcggatcgctggccggaacgctcgcagccgttcgcgcccggctcggggtcacggtgctgcccaaggacatggtcccgcccgacctccacgtcgtggatggaaggccgatgcccgatctgaaggacacggagattgcgatcttggagcgcgatcgtcttcccctgccggcgcagcggctcaaggatttcgtgatcaagaccttgagctgaatttctaggcggcgccgacgccacttgaagcatcacgtcattcaggttcgggccaaggctgcgatgttggcttcccccgccggctgtctgctcttcaagcccgccgcaatcgggtagttcggttcggatagccgcagacgtagaggaatagggctcgctctcgttggccttctagtatcgtggcggagcggctggcttgctcgctcgagcgactggcgaaggcagcgacgatagcaccgcacagagcgtccggtcccgcgagatggtggagacccttggacgtccatgcgggtcgccggattgcgcgcgaaaggtcattcgtgtgtctggcgatagggtggtcccttgcatggagccggcgttttacgcggcgtcgagagtgtcgaagccggcgacggtcagagcctcggtccagttccgccgctcccacggtgtgaagcggcaaccgtcgtcgctgcggcggctgccgctgccggctcccacgcatgcgaacggatgtcctggggctttcagaacgcgtcgaattttcggagcgcaagctgccgatcggggcgagcgatgtggagtagcgaagcgggaggcgcaaatgccgctgaacgaggtgggttcgcaaggagaccgtcctcatgtctacggcgacgaaggtgctgcggcgagacggctgctttgagcgagatcgccgagctcgcgagcgccttcgtgccgtcgcgagcggcagttggagacgacctcgcagggccgcgccttcatcgacatctcgcgcgccgcatgggatgccgacggattggatgccatggtcgcaccatgcagcgcgcctctggtctacccagtcgcggtcggtgtggttgccgcaatgcacgccgtgccgctggcgccgacgctgcacgccttcctgcatgctctggtctcgaactggatttccgcggccagccggctcattccgctcggccagaccgatagccagcgcgtgctggtgaagctggaagccgccgtctccgccaccgccaatcgcgcgctgaatgcaaccttggacgatctcggcagcgcgacgttccgcgctgatctcgccagcctgcggcacgaaacgcaataatacccggttgtttcggtcgtgagcgcaggagagaacaagtcacatggcgaaatcatacggccccttgcgtgtcggcatcggcggtgttggactcgttctatcaccatgttgcaccgcggctgacatcatcgctaaattcgcggacgaccgagagtcactacggggttattggtcgactagcggatgcgcatcacaatgaatggccagcactactatcaaaaaggccttacgattactgcaatgacgatcatcacaatcgcgacgcttggaatttcgttcagtattcgaagttgtcgatttgtcaaggagcgccgcccggtcgccagtcgctttgtataactgacgatccacccataatatccggttagacctaacaccactaatatcttgaggtggaaccagccgaaacgccaagctccactctgtacagtcaaaaaaatgccgaacaaccaaacgaaagctattgatggatttaggatgactttgcgcaaccgcctttcgcgctcgatccaacgcttatcttcatccgatccgagcatggtctcctggtgatagacaaagaaacggggcatcatgaacagtcccgacatcaggaagataacgaagagcacgtgagcggccttagcccatggataggcagcagcgagatagcccatcggttacgcaccctcttcgctgtgcggtagactgcctgcagcgacatcgctgcatctgggtggctcctgcgcgacacgcgcgcggcactccgcgatggcgacctgcagc

SEQ ID NO: 150 - DNA, 1798 bp, Bradyrhizobium colbertium
tcagagccaatattgcaagccgaatgacagctgatgtgctgaacgaaatcattccacatgtattgcagcgagaatgggatgttgtcgcgcatctgagtctgcaaattaaaacacatcgcagcttgcgacggcagaaccaggccactgatgcgttaatcgcattgttacgcgaaacacggccgattgatgagcagaaggcgctgagcctttttgccgcccggtcacttgagtacctcgtcgcttcggaagcgcaggttaaggctcttgtagaaatcgtcttcgccgaggccacaacgaatggaagcgacgagcagtatatgagggcgatgcaatactgtgctcagtgctcagctgaacgccgttcgtttgtacggaaattgctcttggagttgatagtgaagacctttcggaaggtcgagcaaccggctgccgagaacctttttcgcgcgatgtcggactactcgtatgggcggagagggccctcatcgttgctcccagaagacctccgcgctgaggcgcagagtgcgctaagaaagatggtcgtagatggcgcgccgacgaatagttttttcgcaaccgtggcttggtcttggtacggtgtaatttcagaggagctgataaggcggcacggaatagcgacatacttcaacgtctctctggaaggcatgtatttcggagtagatggtctgacgagcctcgtgttgcttgctaatgacggatacttgcgcccggaagggtttagtgaggagcaggcagtaaacgcgttagcagctgtcgggcgctatggatttacgaacggctccctcgccaaggtcgatttcaaccccttattcgcgggagaatcagcgccactgccagtatggaagcgcttactcacccagctgcgcaaagcgccagaggcttgtgcaggggcgttttttgcgttcttgcttgtcaggtcgctaatttcgaaaaagcagtccgacaatgatcaatcgggtgagggagaccagttggctctcctagatgaagtgaagcatctcgtgctacacatgcgggctataaagaagctggagtactatcctcgcatggtggaattggctgcgggatcgttattcggagagcataagcgtgaccaaaatggtgatcatgcaatttgagtaggcttggggcaaggatgcaagtacggcaggcgagatagagcgccgatccatggcgaaaagtaccgtctggcgacaccttggcccaatttgatctggtttctagcaaggtcatcccacatcccgcgccagtgggtgcccgaatcaacccggtccactgccccatttccccgtggcgcgcgcgtgtccattgctgcgggagaggcactgcgttgcaggtggtagtagatggtggtagcaatgcacacgcagccaagctgatttgcgcttgtttttcagtgattttctgaattgcccttcgtctcccctagggagcgccattcaatcctaagccattgaaaagctgcaccctctgggcaaccatgtgggcctggagaggccgccctgctacacacgtagctcattcggcggtccactgcgcgcttgcggtcgtcacatggcaatcctcatcccaagtctgggcttcgcgcgcttcgacagccgcggagagttacgactcgcggagcggctcaaggattttctcgaagaggttgtcgtctggcacaaccttcctgttggtccgctcgaccggcatcccgacttcatcatgctccgcgtgtctctaccctgagcactggatcggcgggcgggtcgcgcagatcctcgccaggcatgacgtg

SEQ ID NO: 151 - DNA, 12338 bp, Bradyrhizobium colbertium
aatgcctgatcccagaccggtgagtttggcgatagcatcaccgctctgggcgagaccgaagcccgccacgagaatggcgattgcacatagaacggtcagcagcaccagtgtggtaagcgacgagtgggacccgccgccgccttgatcactccctccttcctcgggctggtccgaacggtgcccttggcgtcgctcggcgcgccaaggggcacgtctcccatatcgtgccgacatccagaacgcaaagacggcgtaggctagaagtgcgagcgaccaggcgccaaacggaccaagacttacatcgcccgctaacaccgcagaaatggtaagcgatagagcgacgatgacaagtacgccctgcataagcgttgtcggccggccgatggtggaagtgatggcgtcgcgaccgagcacggcgtcggctgctgcgatcagtacgacgttgatggaaacgctgcccagcagattattcgtagcaagggctgcgttcccgacatatgccgacgtcgaaactgcggcaatctccggcagggatgtaatcgtgcccatgaacagcattccgacgaatgcctcgctcaatccggtactgtcggcgattgcgtcaagatattgcgccagcttgtagccggagaaccagacaatacccgcagctgacacgaagatcgcaagattggcgaaaagacccagactgctgagatcgccgaggttcattgcatcgttctcctggctccagtctcaaggctagccgcaaggtggcacgataactgccggcaatccaatccagccgatcgcgaggagcgacaacaacgcgacccccaccgctaggtgtcgaagaaagtcggcggatgaatcccgggtgtcttcgacgtggtcgggtgctcggagcgcaatgaacatcagaacgagaacgccagtcgcggctattgctgcacccgataaaatcgtcagaggaactacgctgaatccaaggagatgcagacgatgaaagctgcgggcgcaggcgagcgcgttgaacacgtatacgaagccaaaatacgcagcccagatgagcagcccgcccagcacggaaaacgttttgcgaatgaatgatgcattgtccatgcgcgcttacccgagcaggcgcggaaacaggtgaacgatcacgagcgacacgatcccctgtacgatggtgtactgccaaagcagctgggtgttgtcgaaggtcacgcgacgttcggcagacaggcgtcccgtgagcgaacgagcggccgtgtagactcccatgaccatgagcacagctgcgaagaatccctgccatgagacaaccgcgtacacagtggcgccgtagctcgacgccgacggcgacaagccaaccgagcgatgagcgagcacctcaatggcgacaggcaaagggatgagcagtgtagcggcgacgagagcgaaaacgacgggagcggagcttctgctcggcacgcgcgtgagcagccggctcgcgccaaacactcctgcgccgctcagcaggtacactacagccgaagcaaccggccaggcgagatccggcaaatcggcaggttcgcgcggccaaagttgcgggttcacggtccacagatagaagtacgagaacagcaggcaagcaaatgcggtagcagcgaccaagatgagtactatcatcgcccaccagctgtggctgacggaacccgttacgtaggccggaagcacaaggcccccgccgatatcgactgtcggcacatccggacccgggtccgtgtcccatagccaccaaagaacgcaagcagtcgcgagtgcgccgcaagcgaacgccggaatatagagtttgagagttagtccaaagaagaaggcggcagtaaacagcgccgccaacacgggcggccaactcggacctggcatcctcagcacatattgtggccgcgcctcgatgggactagtcacaatggtctcgcgcgaccgcgtcggcgcgcccggcaggtagtaccgcccctcctgcacgtctgcggcaaggttgggctggtcccaaagcggctcgcggctggtgacgatggggatcgaccgcgtttggtagttgccggtaggtagccattcaagcgttcctgcgttccatggattcccggcacttgctccgaatggacggaagttccttgcaaggtcgatcagaaaggtcagaactccggtcgcgatcatgaatgcgcccaccgtcgagatcatgttcagcgggccccagcccatcgccgcgatgtacgtataggtgcgacgcggcatgcccatcaggccggtgaggtgcatcgtgaagaaggtgacattcacgccgacgaacatcagccagaacgcggtcttgccgagtcgttcggagagcggcttactcgatatggtgggcgcccaatagtagaaggcggcaaacagcggaaagaccatcccgccaatcaggacgtagtggaagtgagcgaccacaaagtaagtgtcgtgtgcctgccaatcgaacggggccattgccaccatcacgccggtcaggccgccaagtgtaaagatgaagagaaagccaagaatgaagtaggatggagtcttccattgcaacgtacccaacgcgaaagtcgaaatccatgcgaagacctggattccgcttggtatcgacacggccatgctcgcggcagagaagaagctgaccgaaagagccggaaggccagtcgtgaacatgtggtgcacccacagcccgaacgacaggaaacctgtgccgatgacggccaacaccacaagccggtacgccacgaggggcgcctgcgccatcgccggcacgatcatcgacaccatgcccgcggcgggcaggaagatgatatagacttcgggatggccgaaaaaccagaagaggtgctgccacagcaacgggtcgccgcccttctcagcgaggaagaaaggccagtggaatgcgcgctcgagctcgagaagcactgtggcaattatgatcgcggggaaggcaaagacgatcatcagcgcgaagatcaacattgcccaggagtacacaggaagcttgtcgagcgattgtcccggtgcgcgcgtcttcagaacgccgacgatgatctcgatcgcacccgcgatggccgagatttcgatgaacccgatgccgagaagccagaagtcggcattgatcccggaagagaacgtatagctcgtcagtggcggatacatgaaccagccgccatctggagccagtccgaagaagagactgcaaaagaaggcaaggccaccgacgaaatatgcccagaatgcatatgccgacaatcgtggaaacgggagatcgcgtgccgcctgcaaattcggaagcagatacacgcccatggcctcgactgccggcacagcgaacaagaacatcatcagcgtgccatgcatagtgaacagctgattataaagtgcgtggccgataagcctgctttccgggaccgccagctgcgtgcgcatcatcagcgccagaatccccgccagaacaaagaacaacatcgatgctccgacgtaccagacgccgacatagctgttgttcacagccgagatcagatggaagccgcgcggtggtgcccagattcgctccagctcgtcgagctcgccctctgggcgcgggaccgcattcggaaagccgtcagtcccgatggatcttgtctcccgcgaattcgcgatagctgggtgttctgcagtcgtcgtcacttgagaccctcaagatactccgcgatcgcgcgaagttcctccccgcgcaggttggcgaatgacggcatcaagttgccgggcttcagatgctgtgcggacgcaatccaacccgccaccgtgccggcgttgttggggaagcttccggcagcgattgatctgcggctgccaaagtgggtgagatcgggaccgatctggcccgaagccgccgtaccgcgtacggtgtgacaggcgccgcacccggtggcgatgaacaggtcctttcccttgacgcccagctcggtcacgggatcgtctgccggccttctctgatccgcaagccaagtcggataattctcgcgctccaccgcaaccacgtagaacgccatcagggcatgctgagcgccgcaatactctgcgcactggccgcgatagaccccgggccgcgcggccgaaaactgatacctgttgacgcgtcccggtatcatgtcgagtttgccggccaggctcggcacccagaatgagtggatgacgtcgtttgatctcagaatgaattcgacaggcgcgcccaccggaacacggatttcgtttgcggacgcgagctgccgctcgccctgcggatcgagatagttcactctccaccaccagcgctcgccgacgacttcgatgcgggccacgggattctcgcgagccgccgaatgatccgtaagcatcagcccgtagaccagaagaattgtgagaacagcaatcggcatggccacaccgaaaacgatgacgaagcgatgcccgctcatccagccgcgcctcgtcccgccaaacactgcatgcgccgtgaaggtgagaactagcagaaatattgccgcaccacctgcaaacatcacccagctcagggtgcggatggcttcagcattcggaccagacgtgatcagcgctgactgcagccacattagtgacggccggctgccatggctttcttccggcagcatccaggtgcagcccgagacgccggcgccagcagcaagaactgcgaatgacgagagcgctttcattttcttagagtgtacaggtaggcggcgatatgcaccgcctcttgatacaagatcggcaatcgcggcatggccgtccgctgtgacagcgacggcgcatcgcgcaaccaagcgacaagcacagtaggttcgttcggaatcatacccgcgatgtacgttcgcttggcgaacgtgttcagtggggggccgacaatcccattggcgcccggaacgccgggaattgcgtggcaagtcccgcatccgaccgccgcaacgagctctcggccttttgccgcatctccattcacgagtcggcgctcatcaaagtagggtttctgctcagctgcttgctgaagatcggaacagccgcttagaaccaccgtcgtagcgcccacgacagcgcagatcaccccgcgcccgtgccgagtcgctccagaattgccagtatggtggcctttcacttcgttcctgtgatctggcgccctggcacgagatctcgatactgggcataagcgcccggcaagcgaccatccgtccggatccattgagctgccaccttccgcctctgcattcttcaaccccagtcgcgctctcgagctgcctgaggcggtcatccatcggtaatgatcgatcgtctgtcggcacctcccttgccattgctgcggtagcggaacagaactgactcaggtgtgcccgaccgcaatctcgcgaccctcctcgggcttccgcgcccgaatgatccctaaagccctccggatcgacgattgttcctaagcggagtggcagcgacctcgtcctggccagaattcgtgcagcaaacggaggttttcttgtacggtaacgtacatttcccatcctcatctggaattggcttccatcgattgttctgcggagggtcttcttttgacagctgcgactttcctcctacccggcggatcactgatatgctgttgcgaaggtgttcttgttgcaggctgacgtgagcggccgccccgtcgatcataagacaagcttcgcagcatcaatctgacttgcggtcgaggcgcgctctgactccgggcccaggaaccagccttcgaagtgtaggttggtagaccgcggttccgccgcttccgcggaagggttcgctgatcatgtgcgagttgggaagccactatgcggaagctattgtggggtgcgctgatctctatctgtgctgcggtgacggcagcattcctgttcgcttggtctggcgtctacaatatcgctgcttccagtggtcatcttgccgtcgttggcaaatttctccagttcggcatgcagaactcggtcgagacgtatgcggccggaatagaagtgccgtcactcggtcccgctcacgtagaacagggtatgctatacttccactccgggtgcgcgccttgtcacggggcgcccggcctgtcgcgcaatcgggtggcgttggggatgcttccgcagccaccggatctcacgcgtgcctccaatgactggtcgggcgcgcagctcttctggatcgtaaagcatggaataaagtacactggcatgccggcgtgggcagcgccaagccgcgacgacgaagtgtgggcacttgtcgcattccttagacgcatgccgcagattccagcaggagagtaccgggccgccacccgtctgcgcgacggcgaaagccagggtgctcggacaatagcaaacgaaggattgatcgtcgggccgtttgcctgtggcggttgtcatggagcgcgcggcgagggaagctcgctcggtggggttccaaggcttgcgggtcagaaaactgcgtatcttgagatggcgttggaagatttcgcagcggggacccgatcgagcgggatgatggagccaccggtcgccaacctggaccggcaacagcgaggcgaactcgcgcgctactattcgtccataaatctcgacgaggtagcagaacacaacatcggagaaagaatcgacgagccgcgccagcttggagccatacttgccgaacgaggcgcgccatcacgcggaattcctgcttgccaagcctgtcacggtagggatgggcgtgcaagcgacaacactccccaatatcctgcacttgcaggacagcataccatctatctgaccaatcagctgcggctctttcgggcaggcaagcgaggtggccgcttggcggaagtcatgtcggctgcggcgcgtggcttgactgatgaagacatcgagggagtcgcaatgtactacaacgcactcagataaggtccgcgagggaaggctgccgaccgattgatgatgacagtgacgagcgacggccgtcttgtgaaagccgattggcttcaggactgacctggccgatcaggtctccttgcgatgcgcacccaagctgccgtgtgccaccccgatgtgaaatttcatggggccgcggcactctcgctcgtcgaatggtgaatggccacgccctggagcgtgttgttggccgccttgccggcaaccccttcagatagaacgcttaccgatccgtccgtctcaagaatcgcggctgcaactctcctgacgtcggtgaccccgtgcgatcggagtgcggcaagcacctcctcatgtgtcacgcgttcccttcgcagagcattttccaagaatgagccgtctcttatgatcaaggtcggctcagctttgaccagacgttgtactttttcagaacgcaccgacaaccacgtgatagcaagttgaaggaagatcagcagagccatcgcgagcacgccttccgacaaggtcacggatttgttgagcagaacggtcgctaaagtcgagccgagcgctaccgtaatgacaaggtcaaatgcattcagtttggtcagcgttcgcttgcccgagatgcggagcagaaccaccagggcgagatagctggtcgctccgacgctcagaatgcgcaccaaatccgtccaactgccaaaaaacatcacaattctgttccgtccagcactgacgatcgtatccggaaactgcttgtccggtgattggttgctgtcctgaccggcgtcgcctctgcggtcggcagaaggcaacggtgcaataatgtatgttaggatcatcaaacgccgggaacgaagaaagcctcgcgaaacactggcatatggtaacgctgctcattggcgtggtgatagagtgaggatctgacctcaacgtgtggcttttcagatgcttgggcccgccatacttctaactgaagacctgcaacagctattcgcctgatgctcgacgaactgccgcggtcaaccggcatgatagtgcgtcccgtgcacatgttgccgaactgctcgaggcagccgccctgccaggccagactattgacgacgtcaagacaatcggacctatggcgctactccgacgaattcggacaacgtctggccatttcaggccgttgtcgccggtcgctgggcggccggcgatgaacattgggaaatgggccgtgcaagttgttcaacccggagagtcccggctctacagacccccaagacatgcacctgatcgcccccgcgatatcaatgagggtcttgagaccgacgccaaaatggaggccgacgcgcagaccggatggatgagacctccataggaaagggcataaggtcgggacaaatgccgcgtcggatttggattgaaccggcgcgggtcggatctcctctgcgatctgcgccgcttcatgctcggagctgtcacggagtcggctgtcatactccttgggattggaggactggtgatcgtgacgtcgagctaagcgatggttttgaggtagaggctcggatcgaagtatttgctcgccggcgtgaagtccttgatgcccgcgttggccatgaagaagtctgtcgactgctgcagccaattggtcacggtcccgtccgagtacatgcgtttccaatccttggacgtgaacatcttctgggctctgaacgactcgttgatgtccgcaaggggcgtctggctgtagtggcccttttgcaatttctccattgcttcagtgctgttcgcgacgatgtagtcattggcatcggcccagccgcggatcaacttcgccaaggtctccttgttgggctcgtaatagtcgttcgccgccgcccaaccgccgatgatcgcggcttttggataataagcagaagcgtcggcgagcttgaccgcgcccgggaccttgtcgcgaaccgtgacgttgaacggcacccagagggcgacggcaggtaccgcgccggaaatgaaggcggttacggccgccggcatggtctgattgaccagctcgatctccttgggatcgaccttgttggcgcgaagcgcggtgtccagaaatacatgcgcagttgtgccggtcgcggtcgcaatgcgcttgcccttcagatcctcgaacgacttgatgccctgatcgccgcggacccagagctgagcagttgccacctcgatgtcattgataagaaacaccttgccctggccacgcgccgggaagttcgagaggaccgcgccggtcgacagcacgtcgaggctgccaccgatcagtgcctgaaagatttccaggccggtgttgaactgccgcagctcgagatcgaggccctgcttttcgaaggagccgcgatccatgccggtccatatctggccatcgacggcgacagtgtgaagatagccgacgcggacctttgtctttgcctgcgcgatcgcaggtgccgaggccgcgaaggtgccgagcgcaaggcccgccgttgtgcccagaaattgacgacgatccatggtgtttcctccgtctgcttgttattccgagaatgagaccggacgcatctgcgcctgctgggcgcgatattcgtccatcacgagctgtctgatatggcctcgcagctcggcgaattccggccgctcctggatcgactcgtcgcgcgggtaagcgaagggaacgtcgatgatctccttgatccgcgccggtcgcgccgtcaccaccacgatgcgggaggcgaggtagatcgcctcctctacggaatgggtgatcagcatgacggtcttgccttcggtctccaacaccttcagcagcaggttctgcatgttggaacgggtctgggcgtcgagcgccccgaacggctcgtccatcaggaggaattgcggcttcacagcataagcccgtgcgatcgcgaggcgttgccgcatgccgccggacagatgcttcgggtaggaattggcgaagtcggacagacccatcaggccaagataatgatcgcagatcgcgtcgcgctcggcggtcgcgacatggttggcgttgagggtcagcccgaaggcgatgttctgcttcaccgtcaaccaggggaatacgccatattcctggaagatgacgccgcgttcggggccgggaccggcgacagggcgcccatcgaacaatacgttgcccgtcgtcggcttctggaagccggcgagcatgctcatcatcgtcgtcttgccgcagccggacggcccgatcactgcgatgaagtcgccgtcgttgatgtcgtaggtgacgtcctcgacgacgttgaggcggcctttcgccgtgtcgaaggacagtgaaaccctgtcgaactgtgcgcgcttggtcatgcgatggcccgatcctgccagaccagcaaccgggccgttaccttgcgcaggatcaaatccatgatcagcgcgatcaggccgatgcagatgatgccgacatagattacgtcgagcaggaaataggtcgaggcattctggatcatggcgccgagtccgcgctgcgccgcgatcagctcggatgcgaccagcgtcgcccaggccacgcccaacgccacgcgcagcgccgtgaggatgtgcgggacggtgaggggaatgatgaccttgcgaaagatctcggcctggtttgctccgagtgtctgcgccacacggatatagagtggcgtgatctgcgacacgccctcatacatcacgatcacgccggagaagaacgaggcatagaacaggatgacgagctttgcgagctcatcgacgccgaaatagacgatcaccagcggtatcagtgcgatcggcggcagcgcgcgaaagaagttgatcatggggtcggcgaaggtgcgggcggggcgataccaccccagcaggaatccgactggcacggccacgaggatgccgagcgcaacgccgagaaagacgcgccgggtcgagacgaagatgtcgatcagcaggccttccctggtgagaagctcgaagaatttggcggcgacctggtgtggcgccgggatcagcgatacgttgacgaagccgctccagcgcacggcgtaccagagcaggatcgcaccgatccatgggatcaatccgagaccgaggcgtctcaggccggctccgttcattcgacgcgtccacccagattgcggttgatgttttcagaggtcatattataaataggatgaccatacaagtggcgccttagtcttgggcgtcgcaggctttcccgcatgacaccgccgcctttcaccattcgaagcgtccaggcgtttggctatcgctatccgctgacgatgccggtcatcacgtccttcgggcggatgaacgatcggcctgctgtcttcgttcgcgtcgaagataccgatggatatgtcggctggggcgaggtctggtgcaattttcccgcaccaggtgccgaacatcgtgttcggctcgtcaacgaggtgcttgcgccggctctggttggatttcatgcgaccgagccgtccgctgcgttcgagcatttgacgcagggaacttctgtgctggcgctgcaatcaggcgaagccggcccgtttgcgcagtcgatcgccggcatcgatctcgccgtctgggatctccacgcgcgtcgccagaacctcgcgctgtggcggctgctcggcggggcgaagcagaagatcaaggtctacgccagcggcatcaatccgatcggttccgagcggacggccgaagcggccttgagccgcggctaccgcgcgttgaagctgaagatcggcttcgatccggcaggtgaccgcgccaacctcgctgcgctgcgccgccttgtgggcgaaggcctgcttgctgccgacgtcaaccagggctggatcattgcgcaggcgctggaacttgcgccgcacctcgagcgcttcggtctcgcatggctggaggagccgatccgtgcggatcgcccccgcgaggaatggaagcagttgcacgagatcgtccgctttccgctcgcagccggcgagaacatcgccagccgcgccggattcgctgaggtgctgcgcgagccggttcttggtgttgtccagcccgacatcgccaaatggggcgggctgtcggcgtgcgcgggcattgcacgcgacatcctggcatcgggaaagatgttctgcccgcactatctcggtgccggcatcggccttctggcatccgcgcatcttcttgccggtgtcggcggcgatgggctgctcgaagtcgactgcaacgaaaacccgctgcgcgaccgcttctgcggtcccgtgcttgatgcccgtgacggcgtgatcgagctcggcgacgaagcgggcctcggcatcacccccaatcttgcctccatcgaagaataccggacggtctgatgccagcaggcggctacgactacatcatcgtcggcgcgggctcggccggctgcgtggttgcgaatcg

SEQ ID NO: 152 - DNA, 6132 bp, Bradyrhizobium colbertium
gctaggtgggtgcctcatgccgcttacggtaaaaccaatgaccggagccgatctgcataaagcaccgttcaaagacaccgccatgcttaccgatggtggcgtttacgacaatttggggttggagcggatttggcgaaggtgccgtaccgtgctggtcagcaacgccgggaggaatacgcccgaactcggctcacctacgggtcgatggagcggacaattgttccgaactttagctcttgttcaacagcaagcggagaactcccggaagcggatcctgtttggcatgcacaatttggggcagcgtcaggtcgtttattggtggattgacacaccaatcgaggactacggcgtagttgggatttctctaacgcgagaagaaacaatactcgctgcgaacatacgaacacgcttgaacgcgttctcgccaaccgaaatcaatatcctgctcaaggcgggctatgcagcttgtgatgcgtcgctccggtctcataacctttgtcttgtcgatcccccttcttcatttgattccttgcctctccagcctaccaggccgacaagtcgcccacgggtttaggtagcgtcgacaaagactgatcattcggtggctttcagtctaaacgagaccgtgcaatccagcactgatgatacttggtccattctatcatcagttcacataagcgattgagctgacacaactctttgcatagctaaaattgacggcagattgccacctataataaaaatcccatttccatgcttttctataatcagttgtaatttttgatacatatccaagaaataataacccaccatctgttgtggaaacacgaagatttcatcttcgggtccaatcacctcccgagccagatgtacaaacatagcagtagaacgagcgagagagtcagcgctcgcatagctaatctcagttgtctacgcttacgagagccatcgagcttgtttgtttgcagcggattgttcatcgcatcgttcatggccgaacacccaaccgcctcaacccctcctttgcataagtatagctgggatcaatgctcagcgcatatctgaaatctgatatggctcgctgtttatcgccaaacctgtcaaacaagctggcgcggccaccccatgcatatttgtttcgagaatcaagtcttatggcttcgtcatagtcagacatagcctgactgtattgcctcatatctgcgtagacatttccgcggttgaggaagccattggatgtcgctctgaatttgatcgaattggaataagcaagcagagcgccatcattattcttggctgcggcgagcaagcgtccgagttgaaagtgatattcggaattattggagtctctcgatatcgcggccttgagatcctttaaggcgccatcaaagtccagcggtaaactgcacgatccgccaatagtcgctcgcgaacttcctgaagagttagagcagtcgccttgccgatcatagatcgagttcgcatttgtcaatccccggtaaaagtagccgtcgccggattgcggcttcatctcgattgctcgattaaaatcaactatagcgtcgtcgtattttttctgcagcagcttcactcgaccgcgatctatatagattccgccattctttgggtccaatctctcagcttcgttaaattcagctaaagcttgatcatattgcgcgcgagatctgtagatcagaccgcgattggaatgaaaaaccgatttaaaagcatctgacgtagtcgaactcagtgccaaggtgtagtctgccagcgcgttatcaaagaaattggcgccctttcgaaaataagcgagtccccgatcattaagatacttggcatttctggcgtcctgacgaataagtacgttgtagtcggctaacgcgagatcatattcgcctaactcaagataagatcttgctcgcgcgaacagagccactgcattcgacgggaattctacgagcgcttccgtcgcctccgggattgcctccttgtactttccttggtcggtaagttgtgaggccttatttgcccttgcatccgctccggaggagacgtttgcttggggacttggctgttgtttgatggcgggcgctccgacaatatctgcgactggcggagttattggtggcatacccttgtattgaaggccgatgacggggggctgagcttttaaggctgctaatgtcgcattcagtatcttcggggcttgctctttttcatccgtgctcaaccgcgcgaacagcttttgagcgtaatcacctacattgggattgatctgtctcgcaatttcacggtgcacataagccatcagtaagttcacggagccgaaaagacccacttcgtaggcgtacgcagtgttagtatgacagtcggccatcttgaatccggagcatttccgaatccattgcgcgccgagagccggattgttccagggcggcgcggtcccgttaaagtatatgtatgatagatttggcagggaggcgatgtagttgcctttttcatatgccttggtgagccattcaacgccttctttcggatccggcacgagaccctttgcggcctgatattgcagccacgccccaagcgcatattgcgccagcgtaacaccactattcgccgcacggcgcagataggcttcggcttgctttacatcaggagcgggaacaccaattccgtccgccatcagcctagcatagaatcccgcggccattccgtctccggcatcagcagcacgtttgaaaaattcgctacccttgaatgcgtcaaagcggccaaactctccactcagatagcccatcccagcaaaacgcatcgcttgagggtcgcctgcagcggcaccagcctcgatcaaacgcaatccttcggtcgcattattcgttgcgccttctcgacccgaaatcagcaatcggccaagcaatgcgtaagcctgcctgttccctcccgcgacagcttgtctccaaagaagctcggcggttcggttgccgtctgcgttatcattcaagataaatgcagcaccccgtaatagcatcacattgggatcggatggcgtagcgctccgcagtatttcgatggcttcgcctgagttctgccgtgcaattgagaagcgtgcagctattaatttttcgcgatccgcaggcagtgattgattgaacgcagtgtcgtcgatgtcaaacagaaatccgagagacagctttggctgcttgaatacgtcttggaacggaattggaataaccggtcccgctgccgttgttgtttgaggcgtagtcgattgattgactgcgctgcttggggaaggttgcaatacggaagcggagttttggccagtagttccgttcgaccaaggccaaacaaccttgttaggggggcttacgaaaacaaggactaccacgccgataacagcgaaatctgtcatcccgcgaaacgcgacttccttttgataaagatcaaccagatgcgcaaagaatgacctgcgatgtcttccggatgacaacatacctgaatttggggcgcttccattatcgtttgtcatatcccgccctttcagttaattcgcagcgccttttgcctcagcctgtaggttccgtcttggcaggtgttggtttttccgctggcagactttcatccaccgggacgaccaatacgcgctcaccgtcagctacgaactcaaccaagttcgcaccgcctgcttttgcttcgatcaatccatccgctatcagatcttcgatatgtcttgcgatttcccgaacgcctccttcgggcttgcgctgagtgaacgcatcgattgctgaataaagaatatctggatcaatgcctccaccggcgatctcaagctgatactctttcgtcttgcgctccatctcaagggcgacgacacgagcaatatcgaggcctgccagttcacgaaatgcaaaaacatcgtcgatgcgcgacaaaacttcaggggcgaactgagcgtcttgcaaggctcccttagcaaatttgttaagttcatcttgtgtcacgcttggatcgcgagcgtattcggcaatgcgtcgcgcgccagcattgactgtcagaatgaaaattgcctcgtttgtgggatatttggatccgtcgctaagttctgtaacaaagccgtcgttccaagcagacaggaatctcttgtgaatatcacggtgggctttctcaaactcatccagcaaaatgatggaatttggaatgtcacgcagcgcttttgaaatctgtcccggctcgttcgatccgacatatcctttgggggagccgaacagtgttgctgcggcatgagcctgatcgaactgcgccatctcgatcatatgaaggtgtttggcgctgccataaagttgctcaaccaacactttggcaagatatgtcttaccgatgccgggagcaccggcgaagcacatcacagcgattggcttgctcgggcggcgcgcggccagtcgctgccttaaacgtgttgcgagactatctacgacgccattttggccgatcaccttcgatttgagctcacttgccagagttttatcgtcgatgattgcaagcttcttggttttggattcgaatgtatcaactagctcacgtttgcgtgttaggcgctcgagcggatccatgataaacctcggaaggaagttgcctttgaagagcagatagcatgttgccgccaatcctgcggctaccaccaagaaccaagccagagcaggggacgctttttcgataacgatcaaggctatgacgatgcccaaacgaccaacccaatttaggcctgtcataccctgtcctccgatcgaagactgcggagaagggttcttagtaggtggctctcaagggaaaaaagtatatgttgggggagcttcacgctcaaatccaaaattatttgctatctaggctaagcttctcacatgatccatccgacgtaaagcaagcaaattcctcgatacagccatcagggtgttggtatctgaacagcttcgccgggcttaatagctcggaggggcagtcctgccgcgccgacatgtatggaaactgtaatattcccaccgcctccatctaccaatccaagcaccgacacggtccctccgggcagatacggaatcgtcacagtcagaggcttcttgaacagccgaatatcctgcctcacgcccgctccggttattgcaacccaatcgccgtcctccgcatcgaagtctgaaacggtgatggtgcccaagcggagtgtgccgttgtgaagtccagatcgaactttggccttgtcagcgtcgcttgccatcaaacgaccgatcgcttgctcccaatcgtcctttgcaaccggcacgatacccgtgctgttatgatgagatagggacgcttgttgcgctccgaccaaattctctggtggattctgaggaaaaatgccgctggaccatactgcggccccaagtagagcagccgccactaatatcaatcccacccgtcctgacaatggactgggcaaattctgaaacagtgccccgcgattttgaggcgagtccaacaattgaggctgcggagcaggccggtcgccttcagatgcgtctggcatcggcgaactcatcgttggcatccagtaattataagatatggtgcatctactacaagcatagagggctaaggagtctttctgacggaaacaaccgctgggaccaaggatcttcagtcaagttattctaaccaactctggcacgtccatccagacacgcttcgtcatccaaagcccatcgaccacatacgagcaaacaaaaccccgccgaagcggggctattggtcagtaataatagcgtcggggcacgtagtatcgaggagcgcgatagtagcgtgggcgatagtacctacgagggacgtagtatcggcgcacgtagtaccttggtcgatagtaatagcggcgcctataataatattgagttttctctacctgactggttgttgcctccggtaaaagtatcgccacgggtgaaaatggtgctgctgatgctggtcgcccaataagtgcgacagcgacgctaattccaaatagcatcaaaatctgtggtattctcatctcgcctcctgcacccaatcaatgaaagtgtatctgaagggcgggctggagggtgccgtccggaatgcggttggaattca

SEQ ID NO: 153 - DNA, 2890 bp, Bradyrhizobium colbertium
  misc_feature (2339)..(2482): n is a, c, g, or t
tagatctcgacattgccggcgggggatgcggcgatccgagccggcaactcgttgcgcaacttcgccagatgaacaggctccgatgcatgtttgatcgcgatcgcggcgtagccgccatcatcttcggcgacccagtcctggagacccacggcggccacgatggagccgccagcgcgcgacgaggcgccgttgccgagcttggcgacgacgggaacgccggcatagagcgattcccaggtgctgatgccgccgttctgcgggaatgtatcgagcgaaatgtcgaccttcgcgaaggcgagcaaatgctcgtggcgcgacgtcgaccccatgcaggtgatgttctccgccgcgataccttgcgccacgaaccgcgccaccaggctgtcccgcagcaagggatcgtcgagcagtccgtgcttgatgatgatcttcgacccggtcaccccgcgcatcaccttcgaccacacgcggatcgcctcgtccgatatcttgtagatgcggttgaacacgccgaacgtcacatggccgttgcggagcatgggaagctccgacggtggcacgtcgaggatgggctcgatcgtgatcagacacggcaaatcatagactttctcggccagcaagtggcgcgccgattgcgggatgaaagtcgggtccgcgagcacatagtccatggtctgaaggcccgtgcctgtggcgtgtccgaaccccgtcgcctggattggcgcgggcttgcgagcgaacacatggagcctgttgccggttgtatgcccggatacgtcgatcaggacatcgaccttgtcggcctggatacggtcggccaactcgtcgtccgaaagctgcccggcgtcgacccagacgtccgccaagggcttgaatcgttcggtcatctcatccggcaacggacagcaggaatagcagatgatctcgaacctggcgtgatcatgatggcgcagaaccggcaacaaagtgagcgccgccgagtggttcctgaactcggacgcgacatagccgatcacgatccgcttgtccggatcgagctcccgcggcgccaacgtccttcgcggcagcttgacgccgactgcatcccaccacgattttcgcgccgcttgttgaatggcgaaaccggcttcggacagatagtccagcaagaagatcttgcgctcgatggcgtccgcgtagtccggcctgagctccaacgccgcgtcgagatgcgcgagtgccgtcgtgatgtcgccctgactcgcgtaacacgacgccagcagtgccatgccgatctcggatcgcggattttcctcgagcagagtcttgaccgccgcaatcgcctgcgccgtgttccccaggagaatgttgacttgtgccttcccgcgcaatgccagctcgagggtcggcgcttgcgccagcgcggcctcgaaatccgcagccgcctgcggcagccgcgacagatcaaaattgagccgtccgcgctgcgccagcagcctcggcgaattgggcttgatggcaagcccggccgcgagcgcggcttcggcctcgtcaaagtgccggagttcgacgctcaccattcccttgccggcgatcgcttcggcgtgacgcggctgaaataccagggcgcgatcgaaactctccctggcacgctcgatctggcccatcatgagttccgccatgccgcggttgcagaatgcatcggcatagtcaggcttcagcctgatagcgcgttcgtgcagctcgattgcctgctcggcctgcttcatgtgcagcagcgtgttcccgaggttggtcagcgcaagcggaaagttcggcttcagcgcgatagccttctcctgacacctgcgcgcatcctcgaacttcttcaggtcgaaatagaccgtcgcgagattgctgtaggcctcatgcgagcgtggatcgagcgcaatcgcccgttcaagcaactgccgggcctcctccaggcgccggccttcatgtgcacacaagccgagcagatgcgtcgcgtcgaaatgctccggaagcgccttcaggatctcccggcagagcgcctcggcttctccatacctgccctggccataggcggccccggcagcggagatgacggcgtccgcctgcttcatcagtttcttctgcaatcgcgcgttctggaatgcgcgcgcgccggcgccgctgctctgcaaagtattctctccggaggatcgcccggagaaagtctaactgattcgcaggccccgccggccgcccgcgggaccggcctcgcctccggaatgtcccggtgctcagcgcctacgccgggccgcgttccgaggccgaggcgcaataatcgcgccagaactggcgatatcccgcctcgaccnnnnnnnnnnnnnnnnnnnnnnnnnnnnnnnnnnnnnnnnnnnnnnnnnnnnnnnnnnnnnnnnnnnnnnnnnnnnnnnnnnnnnnnnnnnnnnnnnnnnnnnnnnnnnnnnnnnnnnnnnnnnnnnnnnnnnnnnnnnnnnnnatagccttcatcgtcctcggccacccagtcctcgagaccgacggcagcgacgatcgacccgccggcgcgcgaggaagcgccgttgccgagcttggcgacgacgggaacgccggcatagagcgattcccaggtgctgatgccgccgttctgcgggaacgtatcaagcgaaatatcgacgtgcgcaaacacccgcagatgctcctcacgcggggtcgagcccatgcagacgacgttctccgcggcgatgccctgggccacgaacctcgcgatcaggcgatcgcgcagcattgggtcgtcgagcagcccgttcttgacgatgatcttcgaccctgtcaccgcccgcatcaccttcgaccacacccggatggcctcgtccgatatcttgaagatgcggttgaacacgccgaa

SEQ ID NO: 154 - DNA, 3010 bp, Bradyrhizobium colbertium
tgcgaatgggacgtagacgtcgcttacggacaacaggggcatattcaatatgagacgcatcaacgagggtcttctgactgcaacgatcgcaatctcaatgagtttgagcgcggcgaacgcctacgaattcgcacaacagcaacaaaagagcggaattctgattggggctagcgccgacgttcctcccgcgggaatctatatgttcaatcaggttttcacataccaaacgaatatcaccggaccggtcaccaatgtcataggaaacaagaccggagctcaggttgcggttgacgtccaaggatttctgttcgtccctggatggaccttcctcggagcaacgtacgatgcagtgcttgccctcccattcgcgatgcaaagcgttggaagtccggtcaatacacaggcctccggcgtgcataacacttatatcgctccggtggaattgagctggaaattggccgataccggattgaaggttaaggctggtctcgggatgtttgtgcccgacgggaccgttaccggggctggcgggacaggcaacgtcggtgcgccgtattggaccttccaaccagagtttgttttttcgtacttgaaggatggctggaatttgtccgccgccgtctacgaggagttcaacaccgcaaatagcattacaggctataccaccgggaacatccttcatgcagattttaccgccaccaagactatcggcaattggacggtagggccggtagcgtactacgtggggcaggtcagcaacgacacgtcgagcgcctactacagcaacctgattcagaacgccaatcgatatgacatctggtcggtcggcgggctggttggatataattttggagcggctaattttagtgtgtgggcaacccaagaagtctctgcgcgcgcatcgggagctgtggccggcggagtcgacgtgtcaggtattacaagaggcttcaccgcccttgcgactttaagctaccgcctctgggcgccggaagagaccccgccaaccaggccgcgccttttcaccaagtaggcgtccgcgccgtctcgatcaatttcgccatgcccccctcgagattggtagagagatgcaccggggccgcactaagcggccccggtgtgacaaggagcctgcctccggcctcgcgattcggtttactcttcgggcatctcctcaagcacattttggatttgttcgacggaggtatgcgagcgctccgtctacgatcagaatttctagcgctttaccggcttttagtttttccagcacgagtttcgcacgggcgaagcgacctgagcgattcgaggaagcgtcttcgcgacaaactggagcttcagctggccgagagtttaggggcggcgcgcacgggcgatcagcgcaatgcggacgcgcgacctcaagcgagtgcttcggcagtcctatttgagcatcgctaagcgtgcggccataatcgccgccgcaggaatttgcacaacatcatcaagagcccatcctacagttcgctcactgcgccctatggtacatttgagaatctgactactaactagtacgtcggtgatccgcagccgaatgtcgactgctaagcggtaaatttcttgccgaccacgagcgccggcggccttgaatcgacgctcctgcatggtcgtttcgatcttgcgtcgaactagcgttctgataacgttctgcctttggaagcttggcggtactattggtacccagtgcactgggaacttgagcagtgagtcgagcagatttgaagatcggcctcttagtgccccaagaggggccggcggggatttgggcgccgtcgtgcgaggcgagcgccatcttagctgtggcggagctcaacgacaaaggcggcattcttggacggcagcttgatctcgttgtggttaacgcgggggcgaccgatgccagcgccgccgtcgccgccgcaacggccgccggcgtagataaggtcgatgtcgttgttgcgatggtgacgagctctgcgaggaagctcgttgcgcgggaactgcacaagcgccgcgttccgttcgtctacacgccgcagttcgaaggaggggcgcttgatcccggggtcgtcacagtgggagagaccgccgaggatctgctgcggccgggtctttcttggctcgccacggaaaagcacgccacccgatttttcctcttgggcaacgactatgtctggcctctgcaatccatggtgcgggcatgccaattgatcggcgacatgggctgctttgtcgttggtagcgcggtggttccgttcggagtcgaagaccacgagcagctcttgagccagatttcccgcgcccgcccgcacgtggtcgtatcttggatgttggggcacgaggctgtcgttttcaacagagccttcgctgctgcagggttatcgtcacgaattctgcgtttcagcagcgcgattgacgaaacgatcctctatgccatcggtgaagcctgttccgcggatctctatgtcgcttcgggatatttctcctgtctccgctctcacaacaacgccgcgtttttggagcgctatcacacctattttggcgacacgccaccgcccatcaacgcgttcggtgaatctctctacgaaggtgttcattgtattgcggggctggtggaggcggcggacagcctgcatccttcggatcttcaccggaaagtcgggcgtgcggcgcaagaacggacggcgcgcggttttaagaaccatatcgttgcaggtgcggcccatccgatccacctggcggttgctgaggggcacgatttccgtgtgatcgcgcgccggtaagcggggtgctcgctgagcacttcactctgacggtttttggcggatagtccccggtaaggcactcaggctggagccagcgtcactcacgcatcagcccgcgcaataggcgggtaagctccttggcttttgtcgcgtccagccgctcgatcagattgcgctgctgtacgctcacaattccctttaatcgtaagcggcatgaggcacccacctag

SEQ ID NO: 155 - DNA, 4915 bp, Bradyrhizobium colbertium
ggctaggtgggtgcctcatgccgcttacggcactagcgcaggtctggaccgccggacgcgaattcaggattttgaggcggcagcttcgcgcgcaagccgctcggccctcagccgttccttgttggcgtaaaacgccttttgcgccgcttcatggtcgcgcatggccttctcggcctcgatccggcgtgccgcgtcgcgggcctggcgctgttcgggggtcaggggtttgcgtcggaaggaaaggtcttcagtcatggccatacaacccggcagcgagacaaaagttccgcatggccaggcggaggcatggacgcggacattgaaaccgcgaaacaaccccatgcacagtagccaagtcgctcgggatgcaagcgtttcaactaggcgcagcggtagttgacgtgtcgggcaaaacagccgggttctgacaccggaaaatcatcccgggcccgaccgatccggatgaccggcaccttccgtttgcggaatctcgatctccgcaatgaccggcagatggtccgaataggccctcgcctctccgtcggtccagactttcccgatccggctgtcgggcgtggcatagatccggtcaagccgcatcagaggcaggcgtgacgggaaagtccgcagctgcgtacggttgggacaggcctgtgcgagaacgcgccgcacggaccggacccagaaccagtcgttgaaatcgccgaggacgacggttctcaccggtttcaccaggctcacaagggcgcgtgcctgggaatagcgctcatgaatgctcaagccgagatgcgtggccaccacgcgcacatcgccggcaggcgtcagcaaatccgtcgcaatggcccggcgtggttcccgctcctgatacgacacgtcgacgatctcgggcacgctggagaacgaaaagcgactcagcagcatctgaccgtagtcgccatccttcgtgacgatcgacttggcgtgaacacggtgatcgccgacgacactcgccagcttcgcaaatggatcgtccgaccgggatcgcgaatccacctcctggagtgcgacgacatccggcgaccacttgcgaatgatggaacaaacaccctccagatcgaaccttggattgagattgaacgtaccgtgcacattccacgtcatgaatcgcacgggcgccatcagcgcctcccggcgagccacgtcgtaacgaactgcgcgccggcgcagagtgcgagccagccgaggaatgccagtgccagcagcaacatgttgctccaggacgcatttctggcgagttctgcgatctgcgagcccagaaccgccatggcgaggataccgggcgtgctgcccaacagagttccgaggataaagtcacgaagaggcagtgtgctcgcaccggccactacgttcactactgagaacggcgctacggggagcatccggatgacgacaaccgccacgacccccttcccaacgacacgctcctggatgcgcgcggcacgtcggcccaacagacgctgaaggcgttctcggccgaggacgcggccgatcgcaaaaaggatcaaagcactgaccaggacgcccgccatcgccgtgacgaaacccagccatgggccaagggcagcggcagttgctgcaatcagcacgagaactggaaagacgacgagcccgccaacgacaaaggccgcgactgccaatggcggcccccagatggactgcgaataggcagacagaagcgtcgaaagatgacctgcatcggcgaaatcgctcaaggaggtgtacgaccaggccatcgccagcccgaaaagcgccacggcgattgaggcgatcccgattaacgttttcgtgctccacatgcgagaggccgcgcgctccagatgaagaggcagctcagggtccgccaccggctgaaccagggtggccagcgtactggttagaaccgaagactcgactttccgcaacgtctgggggccacgagctttcgacacctcgtccagcagggcgaacaggcgatgctcgttctgcgtgatggcgtgttcgtcgagaccgcagaaatggccgatcaggcgacggcgcaccgaggtgatgaaatcccgatgctcctccgttgcagcttcaaagatcaggtcgcattcgctgtcggcgcccatcgaccgattgttcaggttggccgagccgatcctcaggatccggtcgtcgacgaccatgagcttgctgtggaccatcaccgcggcttccttgtttccgctgcgcgagaccgggtagacgaaacggatgcgatcggcgacgccagtctccccgaagcagtccatgaaggcgccccggccgttctgcattgcctgggattccagccacgaggaatgcagtttgggcgcaacgatcagagcgcgaagcgacggcacgcgacgcatctgctccgccagttcgcgcgccatcctggtcgcgctcgtgaattgattctcgatgtacacgaagttcgtcgccgaccggatgcctgcaatgaacgagcgttcgacctccctgatcgtcgagcccgcaggagagaccacatcggtcctggcaatacccacaggcaagtgctcggtttcgaccggtacattcgtcggccagcgagcgctcttcaggacgcgccgttcatcagcctgttggcccgccgcccgccagcgttcctcggcgagttcgaacagccgctccgcaacatccccgtcgaccaggcactgaacgtcgtgaaacggcgggtatcgcttccgctggggatcgcagcgcattgcattgtcggcgcggtggtcactcgtgtcccagcgcctgaccgtcagatcgagcccgccgacgaatgccagtgagccatcaacgcagacgatcttctggtgttgcgccgaaccaaacggaagcgtcgcgtcgaggtgaaaccgcacgcggtcgtccgtgtccgcggtgaacttcgccgccgaattccattccctctcggaggcgtagaacgagacgaaatcccagaccagaatgttgatgcgcaaggcgggacgtcgccgaacgagcgcgcgcaggaatggaccaagctgctccggcaatccgtcatccgcccgcccagacgcgccgaccagcggggtcttgctatggatatcccacccgatgatgtagacgacgtcctgcgcctccagcagcgtctcccgcagggccgcgaaatatgcggccgcatcgttcagaaccgctacgcgagcggcttcgcaccgccgccagacggtgtcgccggggatcagtgtcgatgcagtctgaagcaggtggacctcgcaactgggattcgcgtctaaacgcctcgaacaagcaacgggttccacgcctcaggggccggggttcaaccggcgcgatgccgcaggtccggcgcacatcgcacactgccctcatttggtgcggacagtctttgcgcccgcgctcctcaaggcatcggcgattttctccggggcgtcgccgtggaaatcgacggagacttcaatcacaccttcgagcttttgtcgcccctccggtgcgggcgcagccttgacgtcagggcccgccgggcgtgttcccaccgtgttcgcatcgccggcgggctggacgaagacgtcgcctcgcggcacgccgcattcctgcacgacgtgctcgaccgcgagctcggcgccgcggcgcgtgtcgaattctccgatgatggtcgtttccaaggaggctctccgtgtgatcgagtgcgaacaacgggcgagccggggccgagttcctgaagccgcgcgcgcagcatatctcgaagtcgaagatgacggattggcagtgagcggcgatgatcagaaccgaattattccgaacaggagcagcagcgccaccgtgatgaagccggagatcagcagcgaaccgagacatcccagccggttcgagaaaaagaagaacatgcgttgcccgccatgacgcttcttgtcaggctaatctctcagattggatcgcgttcctgtgcagcttcgtacgtcctggtggtcaggcccggcacgcttcggaccagtaggtcgttgaggcaggtcaatacaagcaagccggagttctggaattctgacgtggccaagtcaacggaggcggccatgtcacagcagagcagcatgcatcactatctgaattgggccaaggagcggatcgacgaaatggatgccgcgttggcctcgttcgaggtcaaggccggccaggccaaggttgagtccaaggcgaagaccgatcagttcctgttcgatctgacgaagcgccgcgacgagtttcaggagatgctcaaggccaaggcgcaggccggcgaagcggcctgggtggaggccaaagccgacctggaaaggcagtggaatggattcgaagcgcaggtgaaggcctacttcgaaggcgcgggcaaacagctcgagcagcagcaagcgacgttcaaggatattgccgctgcacaggccagggcctggcgggaggccgcagacaaaatcggcgaggccgcgggcaaggtggccgcagcccgcaccggggacatcgacgcggcgctcaagcagatgaaatccgatgcctccgaagccgaagcgcgccttcagaagctgaagcaggcaggcagcgagtcctggtcggtgatgagcgccgcgctcgccgaatcccggaaggcgttcgatcaggcgaacaaggccgcctgggaggcgctgaagggcgctgatacgaagagctgagacgcttgaagctaccagtcgtgagacgggtgcagccgctcaagacgcggtgcgaattatcagcgccccagaaggctcctgagttaaggtccgatcacggtcggcagagatgagcggatacgttgcgagaaatccgctgtgccatcggccgcatgtgctgctgcgttgatcaaggaccgccgcctcagttcatcaaacggcagcgtcgcctcgatccggcccgagtg

SEQ ID NO: 156 - DNA, 107544 bp, Bradyrhizobium colbertium
  misc_feature (27511)..(27520): n is a, c, g, or t
  misc_feature (74494)..(74503): n is a, c, g, or t
  misc_feature (93616)..(93625): n is a, c, g, or t
gccgatttgcccggctttccacacagcctggcaagccggggctttttgttgtgctcgtcgttctcggagcccggatggagcgcagcgaaaatccggggccgctccaagcgtggcacgaatcccggattgcgctgcgctccatccgggctacgcagtcgcaggtcttgttttgttcaaattgcgccgcaattgatgtatccagataagccaatggtcacgctgtgacggcacaacgcgcccagcctttcatttggagatattccgatgtcgctcgattcggacatcatcgtcgatcgccgcaggatccgccgcaagctgacgttctggcgcgtgatggctgcgctgatcgcggttgcggcgattgcaagctttgcgctgatcgcgacaccgggtgcgcgcggcaccttcgcgtccgtcggctcgatcgcgcgcgttcatatcgatggattgatccggagcgattccgatcgcacgcaggcgctggagcgcctcgagaattcccaagctgccgccgtcatcgttcatatcaactcgccgggcggcaccaccgccggctccgagcagctctacgactcgctcgtccggctgaaggcgaagaagccgctcgtcgtggtggtggagggcttggccgcctccgggggctacatcacggcgatcgcgagcgaccatatcatcgcgcagcagagttcgctggtcggctcgatcggcgtcctgttccaatatccgaatgtttccgagctcctgaagaccatcggcgtcaaggtcgaggaggtgaagtcctcgccgctgaaggctgcgcccaacggattcgagccgaccagtcccgaggcgcgggccgcgctcgacgcgctggtcaaggattcctacgcctggttcaagggaatggtgaaggagcggcgtggcatggatgacacgcagctggaaaaagtcgctgatggacgcgtcttcaccgggcgccaggcgatcgatctcaagctgatcgaccagatcggcgacgagaagacggcggtgacctggctggtcgagcacaagggcgtcaagaaggggcttccggtgcgcgattacaagctccagccgctttttggcgacctgccgttcctcaagacggccgccgccgtaatgctggaagcgatcggtttgggttcgattgcgcatcaaatcgggcaaaccggcctcgtacaggcggtcgatcgcctcggaatggatggaatgctggcgctgtggcagccggctgcgtcaaactgaccggcggcaggcgagtttcggagatttttcccgtctgacgcgtgccggggcagcccgctttttcggcatttgtcacgcattttcacgacactcagccttgatttagcgtcttgacagatcaaggtattttcacggaaatggtcatccgcacgcttccgggtcctatctctcgatgatcaaatccgaacttgttcagcgtatcgccgagcacaacccgcatctgtaccagcgggatgtcgagaacattgtgaatgcgattctcgaagagatcgtagcggccctcgcacgcggtgatcgcgtcgagctgcgtggcttcggtgccttctcggtcaagcatcgcccagctcgtgcagggcgcaatccacgcacgggcgctcacgttccggtcgatcagaagagcgttccgttcttcaagaccggaaaggaaatgcgagagcggctgaaccgcggccatccggatccgggggcggccgactaaagcgccatgttcgcgctttagttcatgtttgagcatggaaaactgctgcgcacctttgcggatcatgctccagcgacggcctctgggtttcccgcggtcgcgcatgatgcggcggcgagcttgatgtaggcgagcgaagcgagatgcgaaagttcctgaccgcgctgatcgtgattccgctgggcgtgatcctggtggcgttcgcggtcgccaaccggcatttcgttacggtttctttcgaccccttcatttccgaagatccgtcactgtcgatcacgttgccgctgttcctgctgctgatcctggtggcggccattggggtcttcgcgggaggctctgccgtctggttcggccagcggcgctggcggcgcgcggcacggcggaatgatgcggaggctcgggcggcccgggccgaactggccgggctgcgtgcccaggcgaccgcagcgaagcccgactccgagcgccttcccgttccctcgggggtgggcctgtacgggcccatcgggcgagacaagcagcgcgcgacgttgtagaagcggccgcaaccgaaagcccgatttccggccgctgacctgcggcctccatttgctttgtgaccatgtccctgctcgtcaaaatctgtggcctgtcgacacgcgagacgctcgacgtcgcgctcgacgcgggcgccgacatggtggggctcgtgttctttccaccgtcgccgcggcatctctccctggaactcggccgtgagctcggccgccaggtgaaagggcgcgcgctaaaggtggcgcttaccgtcgatgccgacgatgcgacgctcgacaacatcatggacgcgttgtcgccagatgttctccagctccacggcaaggagagcgtggcgcggctgcgtgacatcaagcagcggttcggccgcccggtgatgaaggtggtcccggttgcgacagcagccgatctcgccgtgctgccgggctatgccgcggtcgccgaccgcatcctgttcgatgcgcgcgcgccgaaggatgcgacgcgccccggcgggctgggggagccgttcgactggcacctcctggaaaagctcgatctcaaattgccctacatggtctctggcggattgcgcgctgacaacctcgccgaggccctgcgcgttacccgcgcccgcggcgtcgatgtctcttcgggggtcgagagcgcccccggcgtcaaggaccccgagatgatcaaggccttcatccgcgccgcgcgcgcaagccaagatgcaagtcaagaatcgagcgcccgatgaacatcgccaaaccaaactcctatcgcagtggcccggacgagcgcggccatttcggcattttcggcggccgcttcgtcgccgaaaccctgatgccgctgatcctcgatctggagaaagcctacagcgaagcaaaggctgacccggcattccaggccgagatgaacggctacctcaagaactatgtcggccgcccctcgccgctctatttcgccgagcgtctcaccgagcatctcggcggcgccaagatctacctcaagcgcgaagagctcaaccacaccggctcgcacaaggtgaataacgtgctcggccagatcatgctggcgcggcgcatgggcaagaagcgcatcatcgccgagaccggcgccggccagcacggtgtcgccacggcgacactgtgcgcgcgcttcggcctcgaatgcgtggtctatatgggcgccgtcgacgtcgagcggcagcagcccaacgtcatccgcatggagatgctgggcgccaaggtgatgccggtccagtcgggcacgcgcacgctcaaggacgccatgaacgaggcactgcgcgactgggtcaccaacgtgcacaacacgttctattgcatcggcacggtggccggtccccacccctatccggcgctggtgcgcgacttccagtcgatcataggtaacgagaccaaggcgcagatgcaggagatcgagggacgcctgccggattcgctgatcgcctgcatcggcggcggttcgaatgccatgggcttgtttcatccgttcctcgacgaccccgccgtcgagatcttcggcgtcgaggccgcgggccacgggctgacgcagcttcacgcggcctcgatcgcaggtggccgtccgggcgtgctgcacggcaaccgtacgtatctcttgatggatgccgacggccagatccaggacgcgcattcgatctcggccggcctcgactatcccggtatcgggcccgagcattcctggctgcacgaggtcggccgcgtgacctatctctccgcgaccgatgacgaagcgctcgccgcattccaactgctgtcgaagctcgaaggcatcatccccgcgctcgagcccgcgcacgcgatcgccaaggtggtggagctcgcgccgaagcggcccagggatcacctgatggtcgtcaacctctccggccgcggcgacaaggacgtcccgcaagtcggcgacatcctgaggggcaagaagtgaccacgcgtattgacacccgttttgccgagcttgccaagcaaggccgccccgccttcgtgaccttcctgatggccggcgatccggatccggcgacctcgctcgagatcatcaaggcgctgccgaagtccggcgcggacgtgatcgagatcggcatgcctttcaccgacccgatggccgatggcccgtcgatccaggccgccggtctgcgcgcgctcaaggccggcatgacgctgaagaagacgctcgagctcgtgcgcggcttccgcaaggacgacaacgcgacgccaatcgtgctgatgggctattacaacccgatctacatctacggcgtcgacaagttcctggtcgatgcgaagagcgctggtgtcgacggtctcatcatcgtcgatctgccgccggaggaggacgacgaactctgcctgcccgcgctgaaggccggcctcaacttcatccgcctggcgacgccgacgaccgacgacaagcgcctgccggccgtgctcgccaacacctcggggttcgtctactacgtctcgatcaccggcatcaccggagcggcagccgcggactccaccgctgtcagtgaggccgtggcccgcatcaagcgacataccaggctgcccgtgtgcgtcggcttcggcatccgcacgccggagacggcgcgcgctattgcctcgcatgccaacggcgcggtggtcggcaccgcgctcgtcgatgcgctcaagaacagcctcgacgccgaaggacgggcaaccgcaagaaccgtaaacgcggtcgcggaattgaccgcggccctggcccagggcgtcaagggcgcgcaacaggcggcggaataggccataattccgctcttgaggcgggcgacacggcggcttgccgggcagcggcccggccgccatatatcccttcaggcgatccgcgaggcgggttcgcacatcggagcaaaccatgaactggcttaccaacgtggtccggccgaagatccgcaacatgctgcggcgggagacgccggagaacctgtggatcaagtgcccggattccggacagctcgtgttctacaaggacgtcgaggccaaccagttcgtcattcccggctcgaactaccacatgcgcatgggcgcggtggcgcggttgaagtcgatcttcgacaacgagacctggttcgatgttgcgctgcctgaggtcacgcccgatccgctcaagttccgtgacgagaagaagtatgtcgaccgcatcaaggatgcgcgggcgcgcaccaatctcaacgatgcggtcaagatcggctacggcaagctcgaaggcgcagcggtcgtcgtcgccgcgcaggacttcgacttcatgggcggttcgctcggcatggccgcgggcgaagcgatcgtgcgcggaatggagctcgcggtcgagaagaagtcgcccttcatcatgttcgctgcatctggcggcgcgcgcatgcaggagggcatcctgtcgctgatgcaaatgccgcgcaccacggtggcggtgcagatgctgcgagaggcaaagctgccctacatcgtcgtgctgaccaatccgaccaccggtggcgtcaccgcatcctacgcgatgctcggcgatctgcacatcgccgagcccggcgcgctgatcggctttgccggtgcccgcgtgatcgagcagaccatccgcgagaagttgcccgagggtttccagcgcgccgagtacctgaaggagcacggcatggtcgacatggtcgtgcatcggcacgaattgcgccccaccctggcgcggctatgccgcctgctgaccaaggcgccggcgcaggacagcgcatcgaagccggtgcagccggtcgctagcccggcgcagatcgtatcggctgccgagacggcgccggctgcgccgcacgcgtgaacgcgtccgctgacagcggaaagacaccgcttcacgaattgatcgcgcggctgtctgccctgcatcagaaacgcatcgatctcgggctcgagcggatgcaccgcctgctggagcggctcggccaccccgaacgtcagctgccgccggtgatccatatcgccggcaccaacggcaagggctcgacgctcgcctatctgcgcgcgacgctggaggcggctggcctgcgcgtccacgcctatacctcgccctatctcgtccgcatcaacgaatgcttccggctcggccgcgtgggcggcggtgtgctcgtcgacgacgaggcgctgcgcgtcgcgctggaagaggtcgaacgggtcaatgccggcgagcctgcgacattgttcgagttgaagacggccgccgctttcctgctgttcgcgcagaacccggcagacgtggtgctgctcgaagtcggcctcggcggccggctcgattcgaccaacgtgatcgatgcaccggccgcctgcgtgatcacgcccgtcagcatggaccacatggacttcctcggcgatacgctcgcatcgatcgcgggcgagaaggccgcgatcatcaagcgcggcgtccccgtggtttgcgccgagcagatgccggaggcaatggaagtgatcgaggcgcaggcgaagcgcatgcgcgcgccgctgttcgccgcaaacgagagctggcacgtcaacgtcgagcgcgggcgtctggtttattccgacgatcgcggcttgatggatctgccggcgccgcgcctgttcggccgtcaccaattcgccaatgccggccttgccatcgcaacgctgcgtgccgttccgggcttcaaggtcaaccacgcagcgttcgaggccggcatcgtcggcgccgaatggccggcgcggatgcagcgcctcgcctccggcgagctgctgtcctggggcccgcagggctcggagatctggctcgacggcggccacaatgccgagggcgggcgcgtcgcggcggcggcgctcggcgatctcgaagagcgggtgtcgcggccgctggtggtcatcgcgggcatgatggccaacaaggacgcgaagggctttctggccaacttcgccggcctcacccgtcacatcatcgcagtgccgattcccgataccgaaaacgcgatgccggtcgaccgtctggcggatgccgcgcgcagcctcggcatgcgcgtggagcccgcgccgggaatcgaagcggccctgcgtgcattggcaaagctcgcctacgaggcgccgccgcgcatcctgatcaccggctcgctatatctcgccggccacgtgcttgcgatcaacggcacgcctcctgcatgagcctgcgcagcccggatggagcgcagcgcaatccgggtatctttccacgactgtcaaaatcccggactgcgctgcgctccatccgggggtacggtgcgtgcccatgcgttttgctgcgattgccgacatccacggaaactacctcgctctggaatctgtcctcgcggacatccgtgctcagggcatcagcgatatcgtcaacctcggagacatgctgagcggtccgctcgatgcgcggcgaaccatcgaggtcctcatgcagctcgacgccgtgcacgtgctcggcaatcacgatcgctatctgatcgaccgcgttccggaaaagatgggctcgtgggatcgtcccgcccatgcagcgctcgacgccgcgcagctcgactggctgcgcgcgcagccgatgacacgcgtgttccgcgatcgggtgtttctctgccacgcgacacccgagaacgatgaggtctattggctcgacactgtgcatcccgacggcgcggtggcgctgtcgccgctcgatcgcatcgagcagtttgcgggagggatcacgcagtcgctcatcctctgcgcccacacccatctcgcccgcgccgtccgcctgcgcgacggccgcgtgatcgtcaatcccggcagcgttggcagtcccggttttcgcgacaagcatccattcccgcatgtcgtcgaagccggcacgccgcacgcccgctatgcggtcctcgaacttgtcgatgcagcctggcaggtgacgttccgccatatcgtgtatgatcacgaggcgatggccgcgctggcgcgtcgcaacggccagccggaattggcgaacgcgctggcgacgggatggatcaagtagctgttcactacggacgcttcaacagcttcatcggatcggccaccttctgcttcagctgctcgaacgtgcattgtcgcggcgccttgtcgggacgccagcgcaggatcgaggtgccgtggcgaaaccgctcgccgctgaaatggtcgtagcagacctcgagcacgagcttcggcttcagcgggcaccatttcgccgagcgctcggtcgaccagcggcttggtccgcccggcgcgttgccggtgaacccgggctcgccgatcaacgcttcgagccggtcggtcagggctggtttcgcctccgccttgatggccgaggtaaagccgacatggtgcagcaagccgccatcgtcgtagagcccgagcagcagggagccgaccaccttgcgtccggcgatcctgttcgtggcgtagcggaagccgccaatgacgcaatcggcgctgcggaatttcttgatcttctgcatcccgtcgcgatttcccgcctggtagggcaggtcggtgcgcttggcgatgattccatcggagccgccgccggattgtgccagccatttcctggcggtggcgtaactcgctgtcgcgggagacagccggaaaatgctgtccttgaggtaggattccgcaaaagcgtccagggccggccgtcgctcgcgcagcgtcttctcagccagccctttgtcgcgggccgtcgcgagcagatcgaaggcgagatagagcgccggcgtctccaccgagagcctcttcacgcggctcgcagccggatgaatccgctgcagcagcgcgtcgaaggaaaagcttttgccgtgcggcaccacgagctcgccgtcgagcgtgaagtggtccgccttcagccctgaggcggcggcgacgacttccgggaagtagcgtgcgaggtcctcgcccgacttcgagcgcagatcgacgttgccgccgttgcgcgacagcaggcagcggaagccatcccatttcggctcgtactgccattccttgccgcgcgggatttcatcgaccgagcgcgcctccatcgcaacgagagaggccgatcttcgggcgcgcttcgcgggtggggctggcaagggcgggactcgtcatacgctgaatacgccccatcaacgcaaaacggccggctttggccggccgtttcgaaaataatcttcgaggtggatcagaccgcggaggtgatccactgctgcagcttcgccttcggcgcagcgcccacctggcgggaggccatctcgccgcccttgaagatcatcagggtcgggatcgacatcacgccgtacttggacgcggtcttcgggctctcatcgacgttgagcttgacgatcttcaccttgtcgcccatagcgccggcgatctcatcgagggcgggcgcgatcatgcggcaggggccgcaccattcggcccagaaatcgacgaccacggggccgttcgccttgagcacttcggtttcgaaatccgcgtcggaaaccttgccaacggccattgggagtacctcactcggttgaaagaagcggcgcgacctggaatcgcgcccgggatcatggatccaacctatgaacggcctcttgccgggtcaaggaggctcacgccgagatgaagggatgccagcgccgcgtccagcgcgggggccgaaatctccatgtattcaagggcctcggtccagagcagaacggccctgatcggggtttggggataaagctgcgacagcaccgcccggtacagcgcaagctggcggacgtaggccggcggcgcctcggcggcgctccttggagccgcctggttggtcttgaagtcgacgatcagcacctcatcggagcgaacgaccagccggtcgatctgccccgataccaaggccggggggcgacccggtcgctccagcctgcccgcgatggcgacctccgcccggctgccggggccgaagactgcggcgaaacgcggttcagcgatcaaggcgagcaccttgtcggccagcgcggtgcggtcggcctccggccagtccgaggcgttgcgggccatgaagccgagcgcggcctcgcgccggcgcgcgacggcgatgtcgggcagggattgcagcagccgatgcaccaatgtgccgcgctgcagcgccagtgcgcgcgactggattgattcgcctgatctcacgctgcggccttcctcggcggactggcccgaggggcgcacgggatcatcgtcgatggtctcgcgcggagccgttgtccgcagccagtccggcaacgcgatggtctggtgcattgatggcgcgggcgtgcccagcgctgcgacatcctccggccgggcgaatcgggtcgccttgcccagcggcgtctcgatgacctgcttgtccagtcccgagccggcgagcccggtgttgacgagatcgtaccagctcagcttgcggaccgtcttcatgttgccgggcatgcagccgccgacgatcagccggtcggccgcgcgcgtcatcgcgacatagagcaggcggcggtattcgtcctcggtctcctcgagcatcgccttgcgcgcctcggcgaccggcttgggatcatcggccttgcgcccggcccagaccacgaccttgccgccattgccgcgcggcacgtggatcaggcgcagccgctgcgaatccgcgggcgaggatgtggtgtcgaccatgaacacgacggacgcctccaggcccttggcgccgtgcacggtcatcacccgcacctcgtcgcgcgagatctccatgtcgcgcttcacctcggtgtcggccgagcgcagccaggccatgaagccctgcagtgaggccggcgccttgcgctcgtagttcagcgcgagctccaggaattcgtcgagcgcatcattggcctcgtgcccgagccggcgcaggatgcgcgcgcgcccgccgtccccgccgagcaaccatgcatagaacgcgaacggcgtctcctcgcgggcacggatctcgcaggcttccaggcgccgcaacgccgcggcgaacttctcgcttgtgcccgcatgttcgccgagcgcgcggcgcagcgagcctttgcggtcccaggccagcgtgaacaggtcgtcgtcgtcgagcccgaacagcgggctcttcagcgcaaccgcgagcgcgaggtcgtcctgaggcaacagcagcgcgtcggcgaggttcatcaggtcgatgatggcgatatgctcggtgagcttgaggcggtcggcgcccgcgaccggaacgccagcatgcttcaacgcctggatcacggcgtcgaaggcgttgccgcgccgacgcaccaggatcagcatatcgccatagcgcagcgggcggcgctcgccttcgtgtcccgtcagcgtgccgctctcgaccagccgcttgatctcggtcatgatgcggcgcgcgagcttgacttcagggctggtgaccgcgacgccgtcgaacggcgcgcgccagccctcgatgtcctgcctctcatcggcctctgcgagatcccacagctcgatcacgctcggccctgcatcggctagcgcattgtgcaggggatggccgatgtcgaccgaatggatgctcttgtagatctggggatcgcggaagacgtgatccactgaatgcaggatcgtcgcgcccgaacggaacgaataggtgaaggcgaccggatcgaattttagcccggccgccgtgaacctgcgatgcagctcgcgccgtcgcgcgtcgaattcgtggggcgcggcgccctggaacgagaagatcgactgcttctcatcgccgaccgcgaagatggtgcggttcaacccctcgcgcgcgccttcgccggccgtgaactccgagatgatgtgcgccacgatgtcccattgccgcgggctcgtatcctgggcttcgtcgatcaggacgtggtcgacgccgcgatcgagcttgtaatgcacccagcccgaggcgacgcggttcagcatcgccagcgtcttgtcgatcagatcgtcatagtcgagcagcccgcgctcctgcttctcgcggcggtagttcgcggcagcggcggtcgcgatatgcagcagggccgcggtacggtcgcgcatggttaccgcgcggcgcttctcgatcaatcctgcaaggcgctggacttccgcttcgaacaggcgcgcgacggacgggttgtggtcgcaaagcttcttcgtcagcaccgctttgcgcgggagtttctcgtcggtgaggaagacgcagagataggcatcgacctgagcgctgccggaaaagacctttgcctcgcgcagccgggcagcctggtcattgtccgacttgctgccgtcttccagcgcagcggcgatgtcgtcccagcgcgatcggggcaggaacgggccgtcgagaatctctgtctcgacgtcctcgatgcgatcgccgctgtcggcacccaggacggctgccatttgcgccgccgcggcctctgcgttaccagcctcgtcggtccaggccatgaaatgatcgcggctgagacacgcttcccgcacgacctccttgaaggtgacatccgcggcgctcgccatcgccgtcagcagcgcgcggccggtgacgctatcaggggcgcgtgcggcctccagcagcaccttcagattggcgcgttccatcatgtcggtctggtcgcgttcgtcgatcacggcaaagcgcgccggcacgttggcctcgaacggaaattgctggagcaggcgcgtgcacagggcgtggatggtctgcaccttcagcccgcccggcgtctccagcgcgcaggcgaacagctttcgcgcatcgcgccgcagttttgcgctcgggtgggggatgccgacggctcggattgccgcatcgagcgcggaatcgtccagcgtcacccaatgcccgagcgtggtgaacacgcgctcggccatgttggcggcggcggccttggtgaaggtgatgcagaggatcttttccggcgggacgcccgacagcagcaggcggatcacgcgctgcaccagcacatgggtcttgcccgagccggcattggccgacacgaaagccgaggcggtcggatccgacgcgcgcgcctgccgcgcgcgcacctcgtccgggatgggtcggggcgccttcaccattcctcgatccccaatccgccggccgccgaccattccttgatgcgggcgaggtcgtcataggtgccgtagcggttcgcccacatcggcagggtcagcgagggatagggttggctctcgtcctcgaaggcgcggaccagcgcttccagcttggcccgcgcttcggcggcggccgtatccggggggatcggttcgtcacctttatttatcttgagctggacgatccgctcttcgcccggcggattgttgccgctgagacggacatagacgagctgacttaccgatgaaccggcgtcgatatcagggaaaccgccttcgcgcaggattgcagcctccaacgtcaattgcggcgacagccccacgcgaacctgcttgtcgcttggtggctgtccggttttgtagtcgaggatggcataggagccacccttccgccgctcgatgcggtcggcgacggcagaaaggcggaagctgcggttattgtcgagcgcgatcgagatctcgccgcgtgtctcagccgcgatggtctcgatcgcatcgcgccgcgcggtctcccattcgccgaaccagcgcgcgatgcgctggaagcgcggccaccatagcgcccgtgcctcggggcgctccatcagcggcataaagtgcttctcgccgatggcgcgcagcacacgggcgggatcgtcgggcaaacgcccggcataagtcttggtgaactcgccaagagcctcgtggatggcggaaccgcgatcggcggccgagagcggcatgtcgacaggatcgagcgcagcgagacgcaagatgaactttgcgtagatcgtgtagggatcgcgcagccagtcctcgaccgcggtgaccgacatgcttgtcggccgcgttgcgcgtggtggccgcggctcgggttgcttgatcggctcgaccttggcgggctggtccagcgcggtggcgaactgcacgtatttctcgccggcgcgaatggccgccatccagaggtcgtcgcctgccaccgcttccagccggtgcaggaagcgcgaagccacggccggtgcgccgccggccttgccggaatgggtgaggatcacctcgtcgccgccgagcaactgcgcgaaatcatgcgcggacaggccgatgcggcgctccggcaggtcgagccccagttcgtgccgcatcggccggctgagccagggatcgatgcgcggggccggcggccagacaccttcgatcaggccaccgacgatgatgcggtcggcctgcatcaggcgggattccagcgggccgtagatctgcaagcgcgcgcccggtctgtcgcgccggcgcaccgcgcggtcgctgaacgccgtctggaagacgtcggggtaatcgggcagcggcaccatcaatccgctggtcgtgcccccgcgcaggaggtcgtcgaaggcattcgcgagtgcgagaccatcgcgatcctcgaaggcgaaaggaatcccctgctcgtcgcgggacagctcgatcatgacctcgcgatgccgatgcgcaatctcggcgaagtcgtatgatctcgatgaggggaggctctcgaccggcgccagcgccttctgcaagacctcgatgagcgcctggatgcgatcaagatcctccgccttgaggcgcgcgcgtggctcggccttatgcagcgcggacatctcgctgcgccacagctttgccagctcctcgccaaagcgacggaattcgcgcaggaggcctgcggtgcccgcgggtgggcgcgtgccgcgcaacagcgcgagctcgagtcccgcgatcgccgccttccatgcgccgggcgcgcggccgagccggcacagcggatgcttcagcatcgccaacagtgtcggcggctccaggcccttggtcgcggcctccgcagcgaggcgagcaaagacgccggccgacgtttccatcaacacatcgccgccggaatcatcgaaagcgagatcccatcgggtgagcgccgccatcacccgccgcgccaatgcgcgatccggcgtcaccagcgccgccgatttgtcgagatggcgcgcctcgcgcatggcgatggcgatggcgagcgcctccatctcggggttgggggcttcgacgaccgcaaggttcgtcatgccggcggcgatcctcgcggcgacatcaggctgcttcagccggtcgtgccagacctccgtcttggccgacggtcgcatcgattccgaggcgagcagatcgcggccacctttggccggcggctgaagaatctcgacatcgctgcgcttgatgccgaagcgatccagcagtgcatgcatggcgtattgcggatggtttgaggccggatgctccgcgaatttgccgagcgcatcgcgcacgccgccgatgctgcgccaggcatcgtcgtcgagatcggtgtcgagccccggcagcaccaccgctccatgcggcagcgatgcgaccgcgtggaggaatttcgcggtggcgggcatcgagccggtcgaacccgccgcgatcaccggtccgttcggatgcgcggtcaggcgccgggcttcggccgcgatcaggagatcgcgccgcgccgccggctcgatccggttgatctcggcgagatgactgggccaggcgatccgcgcgatccgcagaaactcgagcgagtgctgccaataacgatcgaggttgtcgggcacgagcccatcgagcgtgctccagtcgacgccgcgcgtgaccatgtcgtcgatcaggcgcgcgagatctccggccagcgcaagcgtcgatgcaggaccgccgacgaccaatggggacagcaccgggcccttggcccaggccgcgaccagctgcgccagcgtcagccggcgttcgagctcgccgagccgcggcggaatgtccagcggcgtcgcgccggagaactgctcgccttcatcggcgaaggcgagctcgtcctcgtcgatgtcgccgagcgcgacgatgcgcggcagcacgacggcgtctgccttcatctcgtcgagaaagatctcgcggacgacgcgcattgcgcgtcgcgtcggcaggtacagcgtggcatccgccagccgcgcaggttcattgcgggcctgaaagccctcgaccagccggccgtcgagcagggccgagacgaccgtgcgcaggaacggaactgagatggggacgctgaaaacgcgcatggactgcctgattcgaaggatcaggcaatataagcaggcgaggtcgaatggtcatgggtgcgggaggaatcgtccccactctcctgttgtcattccggggcgatgcggagcatcgaacccggaatctcgagattccgggttcgcacttgcgcgcgccccggaatgacagaagtggctacaccacgctctcgagaaacgcctcctctgccgcatgcacggcatcaggcgtgccgacatgcatccagacgccgtcgaggcgaaggccgaacagccgctcctgctcgttggcgcgatcgaacattctcgtcagcgagaattcgcccccgggcgcttcggcaaagatcgacggcgacaggatcgccgcgccggcatagacgaacggaacgacttccttctccttgcgcttgcgcagggcgccatccggcagcatgccgtaatcgccgcggccgctatagccgatgctggtcgcggtcggtgccatcaggagcaggatgtccatacgcgcggggtcgaaggtttcggcaagccgcgaaagattcgggcgcacaccgtcgatccatagcgtgtcggaattgacgtggaagaacggcgcgtggccgagcagcggcagcgccttgaccacgccgccgccggtgccgagcacctggtcgcgctcgtcggagatgatcacgcgcggatgctggcgcgatgcggtgtgattgatgatctggtccggcaggtaatggacattgaccacggcctcggtcacgcctgccctgccgagcttgtcgagcacgtggtcgagcagcggttggccggccaccggcaccatcggcttcggcatcttgtccgtcagcggacgcatgcgcaggccaaaccctgcggcgagcaccatggccttggtcggtttgacgggcatccttcgctttctcagacctttcgccttcgcagcaaccctaacacgaggctcgatcagccgcacggcatctcgaccgccttagccagccgccgtgacggttgtacgacgggtgttgccgtcacgctccaacggctgtggaacgcgcctttttcttcttgtcgcccaccttgaggaaattgacgccgatctggtcgccattgacccaggcaagctcgcagcgccgataggcgagcccggtcgacgacaacaggagaaagaattccttgaggtgcaggccttcgaccgaaccgtcgatggtcagcttggcaccgctgtcggagacgtcctccatggtgcagtcgcgccgccaggtgccgtcgattcccatcatctgggccggaatcccgcgttcgaaaacaacccggctgttgccgcgctggtccgtctttaccgccatctgcccgctccagccccgtaattctccggctccctcgccgccagaatatcggtgtcttggctaacggccggtaaatcgggccctgaatcaggcttgaggcggggggacgttggcgagataccaggcgcgcaaggttccgagcgcggggtgcgccagcgagcgctggagataggtccagattcgcggttggtgacgcagataatgcggcttgccgtcgcggcggttgagccgggcgaaggtgccgagcaggcgcgtgttccgctgcgccgacatgatggcataaagttcggcgaagccggcggcatcgaagcccgtgtcctgcgcacgccgtgccttgatgtagcgcgacagcagcgtcagctcgacggtctcgggcacgtcgatgcgggcgtcctgcagcagcgacaccacgtcgtaggattgcggtccgagcacggtgtcctggaagtcgatcacgccgacccgctcgatgccggtgcgatcttcgagccagatcaggttgggcgagtggtagtcgcgaatgacccaggtcttcggcgccgagagcggcttcacgagcaactcgcgccacatcgtgaagaactcggagcgcgcctcatcgctcagcggtgcgttgcgatcgggcagataccattccggcatcagcccgatctcgacaagcagcgcttcggtgtcgaagacgggaatggcataggtctgatccgcgagcggcaatgttgccggcagcgtcttgccatgcagcgtggccagcacatcggtcgcggcctcgtagcgctccgcgatcgggcgcggaggatcgccctcgatgacgccttcactgccgaaatcctcggtgatcaggaagccatgatcgagatcggaatgatggatcgcgggcgcggagatgccttgcgcgcgcaggccttcggcgatcgcgacgaagggtctgacattctcggcgagatgcacggcggcgctgtaggattttccgttgtagagcgccgcgccgtcgggccgctgcggaaagttcatgagaatgacggtttcgccctcgcgcagcagccgcgcataggagcgggtcgaggcgtccccggccatgcgcctgcgtgtcgcatccatatagccggatgcatcgaggaattcccgcagcgccttcagccgcgcgacttgcgcggcgcacctgccatggccggtgatgtcggcggcgcgtgcattcgagcccagtgccggccggtgcgtcagtgcgatgtcgatgcggtcctcaggcatcgccgacggcgcacgctcgggccattcgatcagcagcagcgtggcatcggggagcggcgacagcccgatctcctcgagctcgctcccgtcctcgacccggtagagatcggcatgcagcaccgggaagggcggcagctcgtagccctgaaccagcgtaaaggtcgggctcggcacttccagctcctcgtcgccggcgagatagcggatcaggctgcgcgccgccgcggtcttgccggcaccgaggtcgccggtgagagtgatgacgtcgccggggccgatcagcagcgcgagatcggccatcaattgcgcagtcgccgtctcgttgtggagcgcgaccgagaatgtgatgggcttgctcattcggcggcgtcgcgatgcgccgcctggtcggttgggaagtcgcagatcacgaccgtgccccggccgaccgtcgaatccacccgcaccttgccgccgtgcagctcgacgaaggagcgcaccagcgacaggccgagcccggcgccgcggtgacgcgagccctgcgagcggctttcgaaccagttgaacaccttgtccttcatgtcggccggtattccagggcctgaatctgtcacggtgaagaccacgctgtgttcggtgcgccgcgcgctgatcccgaccgtggaatcctgtggagagaacccgacggcattggcaaggaggttatagagcacctgcaccacacgcttctcgtcgccggtgaagctgccgacatccggcgcgatctcgaccttgagacggatacggtcggtggcgagccggtcctggataccctcggcggcgagctcgatggccttgctgacgtcgacctgcccgagttccagcttcatcgcgccggcgtcgatggtggcgagatcgaggatgttgttggtgagcgcgagcagcgcgttggtcgatttggtgacgtagtcgagatattcggcctgcttcggcgtcagcggcccggtcgagggatcgctgaggaaatgcgcaaagccgatgatggtggtgagcggcgagcgcagctcgtaggagacgtggtggacgaaatccaccttcatctggtcggcagcctccagcgcctcattgcgctcgcgcagcgcccgctcgacattctcggtgtcggtgatgtcctggaacgtcagcatggtggcgccgtcgggcagcggccggatcatgccgtcgagcacgctgccgtccttgcgctccagcttcagcggcacgtcggcgcggttctcgatcgaggtgacggcctcgcggatctgacgccagacgacgggatcatcgcagagctgatggcaccagccttccactgtctggatgtgcggctcgtcgcgcatggcatcgctcgagagcttccacatccggacgaaggccggattgaacagctgcgccttgccgttgctgccgaacaccgcaacgccctcggcgaggctgtccagcgtctcgcgctgaacccggatcaggccgtcgaagcggcgggcgaggtcgaggctttcggtgacgtcgtcgaagagataggtgacgcccccttccggattcggcgtggtgaccaccgaaagcgcgcggccgtcgggcaggaaccaggtgtccttggcggtctcgactgcgcgataggcttcgtgcagcttggctttccaggcgcggaagtcaggctgctccggcaatttgcgcgccgcgcggagctggtcgagcacgctggaatcgtcgggattggcgtcgaggaaggtgcggtcgaggtcccacagccgccgataggaatcgttgtagaaggcgaggcggcgctggccgtcgaacacggcaacgccggaagagagctggtcgagcgtacggcggtgcgcctccgccattcgcaccagcgccgagctcagcgcctccgcctcgctggcgtcgatcgcgatgccgacgctgccgcggccgacattgacggcgcgcacgtcgaagatgcgccgctcgccgccgatcacgatcggcagccgcgaagtgaagttggcggcgtccttcagcccccgctccatcgcggtgcggtcggcgctgtcgagcagctcgagcttgcgctcctgggcatcggtgacgctgttcgcctcggtggcgcgcacataggccgggttggcgtaggtcagtgcgccattctcgcccttggcccagatcggccagggtgcggcggcggcaaagccgcgcagcatctcggtttcgtcggagagtgccttgtagcgcagattggtctcggccaggtcgcggcggagaccggagagctcgcgaatccggacgatggcctggccgccgatggcgcggccgatcgcctccagcgtatggccgtgcgcggtggtcaaggtcagctggaacccgtcgccacgatcgcgcaacgcgtcgaccgcatggtccatctggaacgcgggctccggcggcagccaggttccgaacgcgagcacgcgctgcggcgaggaatcacgcggcagcaccatcgagatgtcgccggaaatctgcgcacggttgtcgcccgccggccaggagatcaggatctgcggctccgcgaacagcagcgcgccgaagcggtcggcctggagctgcagttccccgattcgggcacgcagccgcgcctcgctgtttgccgtgcgcacgcgcgtgcgcatcaagaggatcgcggccatgaccgagaagccgagcagagccagcgcggtggcgagcaccgcgatttcctgccggttgaaatccagcatgacggagagagtgtcgatgaggtcggcggcctgagccggcgcagccggcagcagcgctgcgagagcgccacccaccaagccgttgcgcgccaacgatgtgcacgacaacagcgtccgacgcatcgacacgatcacgcctgacatagttgccccaagaccgcacgaatctgcgcgcggcgacccccgtcgcgcgcgaatcaaaggacaataccctcaccgcgactccgccggtaagagtccagatcgtgaacgcaaaggcggccccacaaaaatgccgggcgcgttgttccaacacacgtcgttctctgggatgattcggctggaatcgtgctgggttagcggccggtcgagccgaagccgccggcgccacgatcggtcgtcgacaaggtggctacgggaaccagcgctgcctgcatcgccggcgcgatcaccatttgggcgatgcgctcgccgcgcttgatcacgaagggcgccgcgccgtgattgatcaggatcaccttgatctcgccgcggtagtccgcatcgatcgtgcccggcgagttcagcacggtaacgccgtgcttggccgctaggccggagcgcggccgaacctgggcctcgtgcccggcgggcaatgcgatcgcaaggcccgtcggcaccagcgcatactggccgggggcgagcgtcatcggctcattctccggcacggcggccatcaggtcgagaccggcagcctccgccgtctgataggccggcagcggcagaccttcggcgtgggcgaggcgctgcagttcgaccgtgaccgtcgtgctcaagatgccggctcccgggatttgtcggtcacgctccttgcgatatgcgcgaccagctcgatagcgacctgttcctttgtcattaccggccaggaatcaaccgcaatctcgccgttcttcgcatcgttcttgcggctgaggaggtggaccgtgttgcggtcgccgcccatcacgccagtcgccggcgagacgtcattggcgacgatccagtcgcagcccttgcgggcgaatttcgctttggcgttgtcgatgaggtgttcggtctcggcggcaaatccgatcaccagtggcgggcgcctgtcggtcagcttcgagatcgtggcgaggatgtccgggttctcgaccagctgaagcggcggcatgctgcctgcggtcttcttcagcttctgttcgccctcgttggcgacgcgccagtcggcgaccgcggcggcgaagatcgcgacgtcggcaggaagcgcggcctgcacctgctccagcatttgccgcgccgattcgacgtgcttcaccgtcacgccggggggatcgtcgagatcgaccgggccgctgaccagaatcacctcggcgcctgccgcctgcgccgcggctgcaatggcaaagccctgcttgcctgaggagcggttggcgatgtagcggacgggatcgatcgcctcgtgcgtggggcctgcggtgatcagcacgcgtttgccggcaagcggcttcggcaccggcggtcgcagcagccgctcggcagcattggcgatctcgatcgcttccgacatgcggccgatgcccgcttcacccgcttccgccatttcgcccgagttcggcccgatcaggaccgcgccatcacgctggagctgcgcgacgttgcggcgcgttgctgcgttgctccacatcagcgggttcatcgccggtgccagcagcaccttgcggttggtcgcgagcaggatggcgctggcgagatcgtcggcatggccgttcgccatcttggccatcagatctgcggtcgcaggcgccaccacgatcaggtcgcagtcgcgcgcgaggcggatgtgtccggcgtcgaactcgctctgagggtcgaaaaggtcggtgtagacgcgctcgtgggaaagtgcgctgaccgccagcggggtcacgaattgctgcgccgccttggtcagcacgcagcgcacctcgatgcggcgctccttcagcctgcggatcaggtcgagcgatttgtagcctgcgatgccgccgccgatgatcagggtgacgctggcttcggggagggcgccgctgcgcagaggcgtcggggcggcggacgctgctggcgggaccgcaaatggcgtcagcggttcctcgcggccctcgatcagctcccgcaggatgacccggacctcctcctccaccgatctgcggttcttggccgagcgcagccgcaaataggttttcacggcgtcgtcgagcttgcggatggtcaggcttgccatgacgcccctccagcgcggaatgatggcgatgctatcattcacatgattgcaatgcaatcatagattccggacggcgatcaggatgcctatgaaggtcgcggcgatgatccagagcgccacggtgcgccagcggttcttgcggccctcgctgcggcccatcgccgcgatgctctccggcgacagccttatgccgtcccgggtcatggtctcgagctgctcgagcaccttcaccgaccgttcggcgatctccggcaggcgcatcaggacccgtgcaatgtccccggttccggcgagcgcgccctgtacccggccgatgggtccgagattgcgctcgatccattcgcgcaccacggggtcggcaattttccagatgtcgagcttggggtcgaagccgcgcgccacaccctcgaccaccaccatggtcttctgcagcaggatcagctcgggccgcgtggtcatgtcgaacaggccggtgacctcgagcagcagcgtcaacagccgtgccatcgagatctcttccgccgttcgattgtgaatcggctcgccgatggcgcggatcgcttgcgcgaaattctcgaccgaatgatgcgcgggcacgtagccagcctcgaaatgcacctccgccacgcggcgatagtcgcgggtgatgaagccgagcaggatttcggcgaggaagcgccgctccttcatcccgagccggcccatgatgccgaaatcgaccgcgaccaggcggccggcatcatcgaggaacagattgcccggatgcatgtccgcgtggaagaagccgtcgcgcagcgcgtgccgcaggaagctctggatcaccttgcggccgagatcgggcaggtcaacttgcgccgctgcaaggcgcttgtggtcgttcagcgcgatgccgtcgatccactccatcgtcagcacgttgtgggtggtgcgatcccagtcgacatcgggcacgcggaaatcagggtcgtcacgcgtgttttccgccatctccgacagtgctgcggcctcgagccgcaggtccatctccatcgcgaccgagcgcgacatggtgttgatgacttcgatcaggcgcagacgccgcgcttcggaggaataggcttcggccttgtgcgcgacgaagaagaaatccgagagatcgcggcggaagcgcgtggcgacgttgggcctgagcaccttgatcgcgaccgacctgcgaacgccgtcgcgcaacacctcgccgcggtgcacctgggcgatcgaggccgccgcgaccggcgggccgaagcttgcgaagatgtccgtcagcggacgctccagcgacgtcgtgatcgcagcttccgcttcggcctgcgagaacggcggcaggcgatcctggaggctttcgaggtcgcgcgccatgatgacgccgaccacgtcggggcgcgtggccaggaactgcccgagcttgagataggccgggcccatccgcgtcagcgcgcgcgcgatccgcgggccgtgcttggtgccgcggcgttcgacgagtcgcgccagcttcagcgcgagctgtcccggcggcggcaccaggctcggatcgaccgagccgaacacgccctcgcgcgcgaacacgaacgcggcgcggatcaggcgcgcaatgtgggtgaaggcagagatcacaaacgccagcccgaatgcagtgcgacgatgccgccggagagcgtctgccagctaacgcgggcaaagccggcctcgcggatcatgtcggcgaacgcagcgggccttggaaacttgcggatggactcgacgagatattggtaggattcggcggggccggtgaccatgcggccgagcggcgggatcaccttgaacgagaacagatcatagagcttgtcgagcccgggcatctcgacggtggagaattccaggcagagaaagcggctgccgggcttcaacacgcgataggcctcgcgcagcgccagatcgatctgcggcacattgcgaatgccgaacgcgatcgtatatgcgtcgaagctgcggtcggcgaagccgagcgcttcggcattaccctcgacgaaatcgacccgggtgtcgagatgctgtttggcggcgcgctcgcggccgaccgcgagcatgtcggaattgatgtcgcagaccgtggcatggaagccggggccggccgctctggcggcgcggaacgcgatgtcgccggtgccaccggcaacgtcgagcagggcgaacggccgatcgcccctcggcgggtcgagtgccgtgatcatgatgtccttccagacccggtgcaggccaccggacatcaggtcgttcatcagatcatagcgcgaggccacgctgtgaaacacgtcgttcaccagcgtctgcttgtccccgaggggaacgttcctgaagccaaaatgcgtggtttcgcccggccgatccattactctactccactgggcggaccatagcgcgcccgccgcaatggcgctatcacaccgccctcataaggtgaatgcctgaccatgcctgaattgcccgaagtcgagaccgtccgccgcggccttcagcccgtcatggaaggtgcgaaaatcctcgctgcggaggcccgccggccggatctgcgctttccgttccagcccgacttcgtggcgcggctcaaggggcaggtggtcaccgggctcggccgccgcgcaaaatatctcatggccgatctcgcctcaggcgacgtgctcttgatgcacctgggcatgtcgggctcgttccgtgtcatcaagccggacaacagcctgcagcccggcgagtttcactatcccaggggaaaggactccgcgcatgatcacgtcctgtttcggatgtcctccggcgccgacatcgtgttcaacgatccgcgccgcttcggctacatgaaggtgatcgcgcgcaatgcgctcgaagacgagccgctgctgcgcgggctcggccccgagccgctcggcaacgaattcgacgccgcgatgctggcgcgctcctgcgccggcaagaccaccagcctgaaggcggcgctgctcgaccagcgcgtggtggccgggctcggcaacatctatgtttgcgaggcgctgcatcgctcgcatctgtcgccgcggcgcattgctgcaacattgtcgaccaagaagggcgaggcaacggaccacgcaaaacgattggtcggtgcgatccacaccgtgctgaacgacgcgatcaaggccggcggctccagcttgcgcgaccatcgccagacctccggcgagctcggctatttccagcattcattcaaggtgtatgaccgcgaaggcgagacgtgcacgacgccgcgctgcggcggcacggtcaagcggttcacgcagaatggccggtcgacgttctggtgcccgaaatgtcagaagtgagaaggctcgcagccgggaagtcgtgagccgcggcgaggccacgagccctgcaggtcattgcagggagcccttgcgacgaagcaatcaatagctcttccgcggtgaaggcctggattgcttcgctgcgctcgcaatgacnnnnnnnnnntgaataggagcgatctaacgcgaagcgaagcaatccggccgggctggtgaccggattgcttcgtcgcccgggctcttccaccggacagcgaagagcccggatggcgtctgagcgattgccccgctcaggacgcgattgtggtggtctcgtccgcggcaaggtcggcggcgagatgcaacatgccgtcggcagccgacatcacctggtcgatcagcagatgggtcttggcttcgagctctagccgcgtctcgatccagcgccagagcctgcggatctcgtcggccgacttgccgttcggtgcgaattcgctcaccgcgagacctttcgccagcgcgtcctggtggtcgttgcggattgcgatcagcggccgggcgagtacatcagcaaggtcgagcgcggcttcctcggcgagggtattggcggcgttgtcgatgcgctggccgcggatcggcgcctggttcaatacgaagctgtacggccgcttccaggcgcgagcgacgttgagagtcgagacggtcgcctcgatatcggcgacggtcgggcgggccgggatcaggcagaagtcggaatggcggattgcggcggtggttgccgcgctgaggccggccgcagtgtcgacgatcgcgagctccaggccgctgtcggccagcatcgtcaggcgcggctcgatgttggcggcttgatagatcggctcgacgacgacgtcgtcattgttgcggcggcgctgccagttggagagggtgccctgcgggtcggtctcgatcaggcggacagtgaagccggcctgcttggccgccagcgcgaggccgatagcgagcgtgctcttgccactgccgcccttttgggtggccagtacgatcgtgtgcattgtggatcaatcctttggagtgcctgggatcttgggtaacgccacgcgaacgtgcatcggttctcgatgctgagctcttctcgctcaggacgtgccctgcccgatccaaagcggaccgcggatgtccgaatcaaccaaggcgatggtggcagaattgggaatgtcagctaatccgtaccaatactggacccgtaatcgtgcgtatgatgtgctctccgccgtgaaacaagaagggcaggcagcatgggcggaaactggcgcgaccggacggcaaccacttttgactgccagaagatgccggcggtctcgagccgcggcatggtggtcagcaatcatccgttggcctccagtgccggtgccgagatgctggcggccggcggcaacgcaatcgatgccgcgatcgccaccctgttcacgttgacggtggtcgagccgatgatggtcggcatcatcggtggcggcatggcacatatccggctcgccgatggcagccaccgcttcatcgacgggcagagcaccgtgcccgcggctgtgcgcgacaccacctacctctcgaagcccggctcggcgcatgacgttttcgacaccgtcggcaacgagaacctcaacggaccgaaggccgtcgcggtgccgggctcgctgaaggcctggtgcgagacgctgcgccggttcggcaccatgtcgctttccgacgtgatgcaacctgcgattaagcatgccgcacgtggctatgcgacgaccccctatctgcatgaatgcatcagcgagagcgcagacgagatgcgcaaggacaggacgatcgcgtcgatcttcctgcctgatggcgagccactgaaggtcggcgagcgcgtggtgcaggccgaatatgcggacacgcttctctacatcgccgatcacggcgagaaggcgctctacgagggggctctcggcgatgtcctcgtcgactacatggagagggccggcggcttcatccgccgcaacgatctcacgaactacaagacgatcgaacggcagccgatccgcgccgactatcgcggatggactatcctcggtccgccgccgcccgccgcgtccggcgtgcatatcgcgcagatgctcaacattctggagggttacgacatcggcgggctcggcttcgggacgtcggaggccatccaccatctcgccgaagtgctgaagattgccttcgccgaccgcgccgccgccagcggcgatccggattatgtcggcgtgcccgtggagaagttgacctcgaaggcctatgccgaggagcgccgccgcgccatcgatccagcacgggcgcaggcgtggggtgcgggcgtgtcgcagctcgaaggcgcgcacaccacgcatgtgacggcggcggacagcttcgggaacgtggttgcgaccacgcagaccatcaacagtctgttcggcgccaagatcatgatcccgggcctgggggccatcgccaacaactacatgaatttgtttgatccgcgaccgggccacgcgctctcgctggcgccgggcaagcgtgtcaccacctcgatgtctccgatgatggcgctgaatggcggcaagctgcgctatgcgctcggcttgcccggaggcaagcgcatctttccgagcgcgatgcaggcgctggtcaatctgatcgaccacggcatgagcctgcaggaggccgtcgaggctccgagggtctggaccgagggcaacgcgctcgaggtggaacagactgtgccggagagcgtgcgcgtgcagctcgcggcgcttggccacgaggtgcagccggtctcgaccgtcgcgggcggcatgaacggaatcgccttccaggacgacggcaccatgattggcgccgcctgctggcgcgccgacggtacgccgatcggcatctccggcggtcttgcgaagagcgggatcaggttcaggctcgcctgactgctctcatttctgagcgccgctgcccgccatgtccgcggcggcgcgcgcgaccaggtctgctgcgcccgcattggtctgcagcgatcggaccttgacgtcgatcgcgatcaacttccattcgccctccgacacggcgtagtccagcgcgtagctcagctgcgacggtgccgtttcgaaatggccgcgcaacaacagcgcgccgttgtcgccgatcctcggggcttccgtgcttatgatcggcatgccggcaattgcgtcgatgtgatgtccggcaaaggtcgcgaatgcctgcttcagcgtggcggctgaaaagcgttcgcgaaacggtctcgccatctttgcatggaggacactgtagttgccggtgaggttggcgtcgttgagcgtcagcagcgccactttcaccatcacctcctccactttcggcgttggcagcgccggcgattgtgcccaagccgaaaagctcagcagcgcagccgctagcgtcggggacagagagacgagacaccgcaacatgctacttccgcacgcagatcacgcgtacgactgcggctttggcgtcggtcgacgtgccgttcgccgtgatctgcctggtcttcaggaaatcacgcaccgcatccgccgataccatcacggcctgcgaggccggcaccgaggtcgcaggacccgccaccattgccggcttcagcagcgcaatgccggcgaacttgccgtcggcgtcaacggccgggctgccggagaagccgaccgacggcgggggagacagtgcggaatcgcccgatgggcctggcgccagcgtcgccttgatgctcgacacgccggcggcaccgccctggctctgcggatcggcgatgccgatgacgtcgacgttcgtcttcgctgcaccgccagcgaggctgagcggcttcagtccgcgggcgccgtagatgtgcagcagcgcgagatcgtgttgcttgtcttcagcgagtcggtcggcgcggccatgacctgcgatcgtgatcgcaaggcagccatcggcgacgaggcgatcggtgacgatcgcaccgtcgtcgctgacgacgacgccggtcccgtattccaccgtcttgcgcggcggcggtccggccagcggtcccgacgggaacgcattgaacgcgctcgacatcgcgatcaccaccggctcgacgacgttctcggtcgcctggtcgtagaggatcgtcatggtgcggacctcgtcgcccttgaaggtgccgcgcacgtagaatttcttcaggccctgcaatcccgagagcacgaagaagtcaggcttcaccacggtgtagtcgatcttgcgtccggacggctccttctccagatcggcgagcttcgccgaggtcgggttcacctccttgcggcggctgagcagcacctgcacggttccggtcggcgaggtccatttcgagccgttggcgtcgcttgcctgctgcggcaccagcttggtgggaatgccgagccgcgcgccgctggtcggctccgtcacgatcttccagccgacgctctcctgcttcttgcgggccgcttcggcgagcgcagcgcgctcctgcggattgagcgcgccggtcggcttgccgcccttggccttctggtactccttgatggcgttgaccatgcgttcgctgacgtctccggtaatcgcgccgttgtatcggccggcccaggcgagatcggattggagcgccagtcgctctgcttttgacatggcatcggcggtccccgagggcgtctgcgttgcgggaggctggatcggcacggtctggaccgtcttcggcttggtgccgggcacttgtggcgccgtcgtctgggcgtgtgcgccggtggcggccgcaaacatcaaggttgccgcaagcatcgatctcatgacaaatccaaccagcccattgaacgcagtgccattgaagcacatctcgttggtcgcgaacaatgttggggtggttcaggtccgaggtcgagccgcgaactcaggccgtcatcctgaggagcgggcgcgatggctcggtaggagagacgtgcgacgatgctcagcccggacgaactcgaacgctatgcccgccatatcgtcctgcgcgatgtcggcggtcccgggcaggccgcgttgaagcgggccgcggtgctggtgatcggtgccggcgggctcggcgcgcccgcgctgatgtatctggccgccgccggtatcggcacgctcggcgtcgtcgatgacgacgtggtgtcgctgtccaaccttcagcgccaggtgatccacaccacgcccgatatcggccggcacaaggtcgagagcgccgccgagcggatatcggccctcaatccgcatgtccgcttcgtcggtcatgccacctggctcaacgctgacaatgcactcggcctgatcggcgactacgacctcgtgctcgacggctccgacaatttctcgacgcgatatctcgtctccgacgcctgcttcttcgcgaagcggccgctgatcacggcggcgctcggcaccttcgacggctcgctcaccaccatccgtgcccatgagacgaacgagcagggcgagttcaacccgacctatcgctgcctgtttccggaaccgccgccgcccggcacggtgccggcctgtgcggaggccggggtcatgggcgcgctcgccggcgtgctcggttcgatgatggcgctggaggcgatccgcgagatcgtcggcttcggcgacggcctcgtcggccgcctcctcatgatcgatgcgcgcgcaatgcgcttcgagactctgcgctacgcccgcgatcccgccaatcccctcaatggcgacgggcccgtgatcagcgatctcagcgcccatcgcacctgatcggagccgctacctggtggccggcttctcgctgtcgagatgggccatctgctcggccaccacccgcagcgtcgcgctgaccgaggcggggaattgctgctgtcgcgcgtggcgccagcgctgcgtgacgtgggcgatgcgctggaccaggtgcggggcctgcgcgaggtcgctgcgggccgcctgcgcatcaacgcaccgccgccggcggtcgatctggtgctggcgccgatggtcggcccgtttctcaccgcgcatccacaggtcgatctcgacatcgtctccgagagcggcttcgtcgatatcgtcagcgccggctttgacgccggtgtgcgctatggcgagcacctcgcgatctcgaccaatatgagccttgcgatgcgcgccgcgcgcgacggtgtcggcatctgggcgacgctcgacggctatgccgacgaagcgctgaagtccggcgcgctcgtcagcctcatggaagattggtgcgagccgtttcccggctccttcctctattatccgagccggcgccaaacgccgcctgcgctgcgcgctttcatcgatttcgtcgccgattggcgcaagcgcgacaagcgcgggcagtagaactcagagcatgctcggcagcacgcgatccggcggcttgtgagcgtcgaggaaggtgcggatgttgatgatcaccttctcgcccatctcgacgcggccttcgatcgtggcggaacccatatgcggcaacagcgtccccttgccggccttggcgagccgtaccagcttcgggttgaccgcgggctcgtgctcgtagacgtcgaggcctgcgccggcaatctcgccgccctcgatcagcttgatcagcgtatcctcgtccgtcacctcgccacgcgcggtgttgacgatgtaggcatctttgcggatcagcttcagccgccgtgccgacagcaggtgataggttgcgggcgtgtgcggacagttcaccgagatgatgtccatccgcgccagcatctggtcgagactttcccagtaggtcgcacccagctcttcggcgatgacgggcgccactgggcggcgattgtgatagtggatctgcaggccgaaggcgcgggcgcgacgcgcgacggcctggccgatgcgccccatgccgatgatgccgaggcgcttgccgccgatgcggtggccgagcatccaggtcggcgaccagcccgcccagggttttccttcggtcaggatcgaggcaccctcgatcatccgcctgggcaccgcgaggatcagcgccatggtcatgtcggcggtgtcttcggtcagaaccttcggcgtgttggtgacggtgatgccgcgggcatgggcggctgcgacgtcgatattgtcgacgccgttgccgaaattggcgatcagccgcagcttgcagtcgggctggttcacgacctcggcgctgatgtgatcggttaccgtcggaaccagcacgtcggcggttcgcgccgcttccgcgatctgctcggccgacatcggcgtgtcctcgagattgatccgcgcgtcgaacaattcgcgcatgcgcgtctcgatcgaatccggcagcttgcgcgtcaccacgacgaggggctttttcttcaccgacatgtcctgctctcatgaggcgtcgcaggccgcctctgtcgccaaaggccggtcgttgaggcctcattaacccggttgttcgacactgcccttgccgtgtccgtccccggcgtttcctccaagctctcccgacatttccggccggaaaatcggggcaaactggttgttcaagtgcccgtcctctctagcagaaggccgggccaagacaagaaccacgggtcaaggcttcgggaacacccgcatgggacgggaggggcggacgcagcagcgttttggaattgggtgaggatccggttcgtccgggtcttcgacaggagacgggttgatggcgttggggcggttctgttcggtgatggcgcttgtttgcacctggttgagcgcctcggtcagcccctcgcattcggcgaaggataccccgcagactgccagcggcttgccggtgccgcgctatgtcagcctcaaatcggaccacgtgaacgtccgcgccggcccaaccaaggacaatgacgtcgcctgggtctacacccgcgccggcctgccggtcgaaattaccgccgagttcgagaactggcgccgggtgcgcgattccgagggggccgagggctgggtctatcactcgctattgtccggccgccgcaccgcggtcgtcaccatgaagcacaaggacgagttcgccccgatctatgaccggcccgatcccgacagcgcggtggcagcaaagctccaggccggcgtcgtcacgcaggtgaagaagtgcgctgcaaactggtgccgcgttatcggaaacggctttgacggctggattcagcaggagcgcctctggggcgtctattcggacgagcaggtgaattgacccgaagggtcacccagagcgatgcgaagcatcgaatcagggacatcgagattcgggtgcgggagtgcgcaccctagctcggcgctgcacaccgctccgggatgacggtccaaaagatgatggccgggacgagcccggccatgacgatcccagttcgatcttaaatggatctcagcgcttcttgcgcagtcgcaccaccatgtcgatccgagagatctcgtaaccctcgggtacctcaggcatcttggatagcaccaggtgcggatcctcgatgtcgaccagctcgtggctgttctcaaggtagtagtggtggtgggtggtgacgttggtgtcgaaataggtcttggtgccgtcgacactgacctggcggagcaagccggcatcggtgagctggttcagcgtgttgtagacggtcgccagcgataccggaaccttggccagcgtcgcttcctcgtaaagcatttcagccgtgaggtgccgcgcccccttgccgaacagcagccagcccagcgccatcctctggcgcgtcgggcggagcccagcggactggagcatttcgttgacgtcgtgccaggggcagccggtcagcgccggctggcggccggacaagagggccgcggcatggacgtcgtcgtcgtgatgggacgcggtattctcgttcatttccagatttcgggcacgcgtgaacaatatctctctgtaacataagaacagaaagatgcagatgcaagtatctcgcaactagagaggttctaatcaggtctggaaccgcgtggggatcgcgtcattttaccttcatggacgcgctttgctacccgaaatggcctgtgttagagagcccgcggttccgcttacccgactctgacgcagccgagtatgaaggctggggtcatccggggcttgcgggagttgcgcctgacggtggcagttagcgttgctcttcgatcgaacggggcccatttcgccaggaaacgccgctcaatcggcatttgaacagaggctcgtgaatgctgaacaggcgcaacggttatgaatacgaagatctgctggcctgtgcccgcggcgagatgtttggcccgggcaatgcccagctgccgctgccgccgatgctgatgttcgaccgcatcacggaaatcaccgacgatggcggcgagttcggcaagggcctcgtgcgcgccgagctcgacgtaaagcccgacctttggttctttgcctgccatttcaagaacgacccggtgatgcccggctgcctcggcctcgacgcattgtggcaaatggtcggcttctatctcggctgggtcggcggcgaaggccggggccgggcgctcggcctgagcgagctgaagttcgggggacaggtgctgaccgaggctcgcaaggttgtgtacaacgtcgatatcaaacgcgtgatgcgttcaaagctcgtgctcggtatcgccgacgggtggctttcggtcgacggccagattatttatcgcgccaaggacctgaaggtcggcctgttcaagcagggcacgagcctgggctgagcgcatcaccacgagacaacgagcaagaagacaacgagcagggcgaggctgtcatgaggcgggttgtggtcaccggaatgggcatcgtctcgtccatcggaaacaacacccaggaagtgcttgcgagccttcacgaggcgaagtctggcatttcgcgggctgaaaaatatgccgagctcggcttccgttcgcaggtgcaaggtgagccgacgctcgatccttcgacggttgtcgatcgccgtgcaatgcgtttcctcggccagggtgcggcgtggaatcacatcgcgatggagcaggcgatccaagactccggcctctcgcctgacgaagtctccaacatccgcaccggcatcatcatgggctccggcggtccctcggcgcgcaccatcgtcgaggctgccgacatcacccgctccaagggtccgaagcgcgtcggcccgtttgcggtgccgaaggcgatgtcctccacggcctccgcgacgctcgcgacctggttcaagatcaagggcgtgaactattcgatttcctcggcctgcgcgacgtcgaaccattgcgtcggcaacgcctatgagacgatccagatcggcaagcaggacgtcatcttcgccggcggctgcgaggaactggactggacgctctcggtgctgttcgacgccatgggtgcgatgtcctcgaggtacaacgacacgccggccacggcctcgcgtccctacgacgtcaaccgcgacggcttcgtcatcgccggcggcgccggcgtcctggtgctggaagagctcgaacatgccaaggcgcgcggcgcgcgcatttacggcgagatcgtcggctatggcgcgacctcggacggccacgacatggtggcgccgtcgggcgaaggcgccgagcgctgcatgcgcatggcgatgtcgacggtgaagaccaaggtcgactacatcaatccgcatgcgacctcgacgccggccggcgatccgccggagatcgaggcgatccggaaggtgttcggcgtcggcgagaagtgcccgccaatctcggcgaccaaggccctgaccggccactcgctgggcgccaccggcgtgcaggaagcgatttattccctgctgatgatgaacaacggtttcatctgcgagagcgcgcacatccaggagctcgatcccgtgttcgccgacatgccgatcgtgcgcaagcgcatcgacaacgtcaagatcggcaccgtgctgtcgaactccttcggcttcggcggcaccaacgccacgctggtgttcagccggctggacgtgtgacgtccttgcggacgcgccggtagtttttcgtcatggccgggcaaaagcgcgaagcgcgtcttcgcgaatgatgtccggccatccacgtctttgctattggtgccggaagaacgtggatgcccgggacgagcccgggcatgacggacagcggagagtaatcgcgacatggacggattgatgaaaggcaagcgcggtctgatcatgggcatcgccaatgatcactcgatcgcctggggcatggcgaggacgttgcatgcccatggcgccgagctggccttcacctttcagggcgaggctctcggcaagcgcgtcaagccgctggccgagcagctcggcgtcgatctggttctgccttgcgacgtcgaggacatcgccagtgtggatgccaccttcgctgcgcttcgcgagaaatgggggcgcctcgacttcgtcatccatgcgatcggctttgccgacaagaacgagctcaaaggccgctacgcggacaccagccgcgagaatttttcgcgcacgatggtgatctcctgcttctctttcacggaggtggcaaaacgcgccgccgagctgatgacggaaggcggcagcatgatcacgctgaccttcggcgcgtcggagcgcgcgatgccgaattacaacgtgatgggcgtggccaaggcggcgctggaagcctcggtgcgctacctcgctgccgatttcggaccgcgcggcatccgcgtcaacgcgatctccgcaggcccgatccggacgctcgcgggctccggtatcggcgaggcgcgtgcgatgttcgccttcatgcagaagcattcgccgctccgccgtggcgttacgctcgacgacctcggcggctcggcgctgtatctgctgtcggacctttccggcggcgtcaccggcgagatccattacgtggattccggctacaacatcgtcctgatgccgaggccggacgatttgaaggcgtcggagtagcgcgaacagcgccgaaaggcgcaccccttcgaaccatccccaccacgcgctggcaatggtcaaacgccgcgtcgttttctcccgtcccacgatcatggggctgactcggcgatagaatcatgcatcctgctcccagatggcgcagcggggtcgtaccctctgcggttggggaggagtgatcgttccgatggtgcatgcgatgtgccgcgcgagcgcgctggcgttcgttgccggcgcgatgctgctctgtggcggctctcgtgcccttgcccagtcgacggtgtgggattcgaccctttccaacacgaactggtatgttccgactgcgcaactgctcgcctatgctgcaccgagaaccggtttttccaatcccatcccgatcggcgaccagaccctttggtcgctcgcgagcgcgaccaacggctccttcaccggcacgagcgtggcacagctcaagatcgggcccgcgcttctgaccgacacgtccacgatccaaggattcgtaaacaccgcgggccagatcacgatgctgttcacgccgacttccggcggcacagtgaccgtgggcctcggccacatgcggacggttggcggcgtgacctcgatggagatgcagatgatcacgggcgacagcgtgctcgtgacgcattgggcatacatgcttccttacgatcccgcgaccttcaccccgcccgcttcgcagcccgttcccgccaactccgtgccgcaatgggagtggacggccggaacgccctggcggatttccagcaactccttgttcggtacgtcggctcccgggcgtttcgtcatcaccgattacaagaacggatatttctggggggcaggcatcgcgccgactgggagcagcgccgccaatttcaccctgctgggctcggtgacgcccgagggcagcgttctcttcaacacgctctcgcgcggcacgctcgcaagtctctatggcgcggccagcggcaatgcatcgggcgcgcagatgctcgtcagcacctacgatctatcgggcaatccgaccggcggcgtcgcctatctctcactggtgcggccctacgccgaaacgctccaggcccagaacagccgcgtcggcttgggcgcagccgacatgctgtatcgcctgtctgcgacgccgctcggctggaccggcagcatggcgaccggtttcaccgcgctcgacaatctcggtggttccggtctcgtcaactcgatcaaccagaccctgcctgttctgacgggagctgcatcgcaggcgacctatgccacgcagcgcgccttccaacaggcgatgacggggcgattggatgaggtgttcgggctgaatggggccgcgacacgcgagcggaacttctggatgaagccgctcggcggtaccctccggcagggcagtgtcgatggcgtccccggctatcacgcctccggcggcggcatcgccgtcggtgcagacgcgatgatctccacgcgcgcgaggctcggcggcgtgttcgcctactcgcatcaaagcatcgccggaagcgaggatgccgttccgaacaggctggccgtcgattcctatcaggcggggctttacggcgcctatgctctcggtcagggcgttcaggtcgatggccagctcgatggcgcgttgaacgacaatggcgagagccgctcgctcaccttcatcaacggcaaggccggcgccggctatcgatcgtatggcggtcatgcgggcgttggcgtccgcaagctgatgccgatcaagccggacctgacggtcgcgccgtcgctgcggctggattatgggcagcttcgctcgccggcctatcaggagggcggcgcgggcggcttcagcctcaacgtggattcgcagatctatcgtgagctgacgctgacggcaggactgaagagcgcctacaggatcgcgaagcaggtgtatctcacaggcgatgtcggcatcggttacaacacgctgaatcagggacttcagatcaagtcggcctttgccggcggtggcgaagcgttcgtcaccaacggtcttgcgttgtcgccctggatctactcgacagcgctgggcctggccgccgccgacggcaagggccttgatctcggcatccgctacggcgttgcggccacatcttccgggctgctccagcagtccgggcttgcagttctcaagatcaagctttgagcgcgtcgtctcaaccggccgcgatcttctccgcgcgctggaacgccggccgcgccatgcagcgcgcgagataagcgtcgaaggccggccgcgactgcaccatcttgaacaggcgcaccgcaaaattcaggcccgagccgattgcgatgtcggctgcggagaattcgtcgccgagaatccacggtcccttctcgagcgcggcttccagcacgtcgaacacctgcgtcgcgctgccccacgccgcggtcgaggtcgggatctcgatcttggtgaagatctggatgatcgcgggctcgatgcagcccggtgagaagaacagccattgcagatagcgcgcgcggcgcggatcggtcacggcaggcgccagcttggtttcgggatagcggtcggcgatgtaggcgcagatcgccgcggcttccccgagcgcggcatcgccgtcggtcagcgccggcaccttccccatcggattgatcttgagaaagtccggcgccttctgcgctcccgtcgaaatgtcggtcagcacgcgctcgtaaggcaggccgctctcctccatcagccagagcgtcgtgaacgagcgcgaacggggcgaccagtatagcttgatcatgaggcgtttcccttgatctgttaacttcgcgagctgcgcacgctgtgaccagcccgcaccttgccggccgacaggcacaccacctcggagatctgcagcagctgccgcgccagcggactggtcttgcgccagaccatgccgatggtgcgcgagggttctgggtcgcggaagcgcgccagcgagaccgaggccgatcgcgtctcgaccggcaccgccatctccgggatcaacgtgacgccgatcccggcgctgaccatctgcaccagcgtggacagcgagttcgcatccagcatctcgcgcggcggcgccgactgcatgttgcagaaggagagcgcctggtcgcggaagcagtgcccctcctcgagcagcagaagccgcatctcgcgcatcatctcgcgtgacggcgccggtgtgccttcatccgcgcttggccgcaccagcaggaatttctcctcgaacagggcgacctcggtgagcgagggctccgacaccggcagcgccacgatggcggtgtcgaggcggccctcgaccagctcctggatcagccgcggggtcatcgtctcgcgcacgcggatgtcgagctccgggtgcatgcgcgtgagattcttggtgatggtcggcagcagatagggcgcgatggtcgggatcatgccgatgcgcaggcggccggcgaagcggtcctgcgaggcgcgggcgaaatcgccgagctcgtcgaccgagcgcagaatgtcgcggacgcgctgggcgagctcctcgccgaaccgggtcagcgccacctggcgcgcgctgcgctccagcagcaggccgccaagggtctcctccagctccttgatctgcatcgacagggccggctgtgagatcgagcaggcctcggccgcgcggccgaagtgaccatgacgggccagcgcatcgaagtaccggagctggcgtagcgtcacgttgagcatcagaaaatcctatcgcagcgatcaccaaagtcaactttacctgatcgaacctcgcgcttagagtggttctacctggtcaaaggcgcgagttcgacgcccaccagaggaggtattcatggacgacacttcgaagtgcccgttttcgggcggaaaacgcacgcgctcaaaccgcgattggtggccgacgcagctcgatatcgaggtgctgcacaagaattccgagaaatccgatccgatggacgaggatttcaactatgccaaggaattcaagtcgctcgacctcaacgcggtcatcaaggacctgaccgcgttgatgacgaattcgcaggaatggtggcccgccgatttcggtcattacggtggcctcatgatccgcatggcctggcacagcgcgggcacgtaccgcacgaccgacggtcgcggtggcgccggtgcgggtcagcagcgtttcgcacccctcaacagctggcccgacaacgccaacctcgacaaggcgcgccgtctgctgtggccgatcaagcagaaatatggccgaaagatctcctgggccgacctgatggtgctcgccggcaacgtcgcgctggaatcgatgggcttcaagacctttggtttcgccggcggccgcgtcgacgtctgggagccggaagagctctattggggacccgaaggcacctggctgggcgatgaacgctacagcggcgaacgccagctctccgagccgctcggcgccgtgcagatgggcctcatctatgtcaatccggaaggcccgaacggcaagccggatcccgtcgccgcggcgaaggacatccgcgagaccttcttccgcatggcgatgaacgatgaggaaaccgtcgcgctgatcgcgggcggccacaccttcggcaagacccacggcgcgggcgatccgtcgctggtcggtccggagccggaagccggtgcgctcgaggatcagggcctcggctggaagagcaagcacgcgtcgggactgggtggcgattccatcaccagcggcctcgaggtgacctggtcgcagacgccgaccaagtggagcaatcacttcttcgagaacctgttcaagtacgaatgggagctgacgaagagcccggccggcgcacagcagtggagggcgaagaacgccgagccgtccatcccggatgcgttcgacccgtcgaagaagcatgtcccgaccatgctcacgaccgacctctccctgcgcttcgatcccgcctatgagaaaatctcgcggcgtttcctggagcacccggatcagttcgcggacgctttcgcccgcgcctggttcaagctcacccaccgcgacatgggcccgatccatcgctatctgggaccgctcgtgccgaaagagacgttgatctggcaggatccgattcccgcagtggatcatgagctggtcggcgagcaggacatcgctgctctcaagtcgaagatcctggcctcgggcctcacggtgccggagctggtctcgaccgcctgggcgtcggcttcgacgttccgcggctcggacaagcgcggcggcgccaatggtgcgcgcatccgccttgccccgcagaaggactgggaggtgaacgagccggcccagctctccaaggtgctcggcaagctcgaagcgatccagaaggacttcaacgcgtcatccggcgcgaagaaggtctcgctggcggacctgatcgtgctcggcggcaccgccgcagtcgagaaggctgccaaggacgccggcgtcgacgtgaaggtcggcttcacgccgggccgcatggatgcctcgcaggagcagacggatgcggcctcctttgcgccgctggagccgcgggccgatggtttccgcaactacatcggcaaacggcatcagttcatgcagcaggaggaagctctcgtcgatcgtgcccagctgctgagactgaccggtcctgagatgacggtgctggtcggcggcctgcgtgtgctcggcgccaacgcgaacggttcgaagcacggcgtgctcaccagcaaggtgggaacgctcagcaacgacttcttcgtcaaccttctcgacatgagcacgcagtggacgcccgcggcggacggcagctatgagggacgcgaccgcaagaccaacgcggtgaagtggaccggcacgcgcgtcgacctgatcttcggcgcccactcccagctccgcgccttcgccgaagtctacgcggcctccgactccaaggagaagttcgtcaaggacttcgccaaggcctggaccaaggtgatgaacctcgaccgctacgatctcgcggcgtgagctcgatcagcatgcaagcgatgaagggcggccatgaggccgcccttctattttgtgatctctgatcgtcctcacacgccgagtgtgccggccttcgcggcggcgtagcgctcgcccacgaccttccaattcaacgtgttccaccacgccttgagataatcggcgcggcggttctggtagttcaggtaataggcgtgctcccagacgtcgttgccgagcagtgcccgcttgccgtccatcatcggattgtcctggttgggtcgcgtctcgatcgcgagcttgccctccttgctgactgtcacgaacacccagcccgagccgaacacgcgtcctccggcagcgttgaaatccgtctgcaatttctccattccgccaaggtcgctgtcgatggcggcgagcagggcaccgtccggcttgccgccgttcggtcccatgatctgccagaacatggtgtgattggcatgacctcccatgttgttgcggaccgcggtgcggatcgcgtccggcaccgcgccaaggtttccgagcacctcgccgaccggcttctccgcgatctgcggattgtccttggcgaaattgttcaggttggtgatgaacgcctgatgatggcggtcgtgatggatctccatcgtcttggcatcgatgtgcggttccagggcattcgccggataggacagcggaccgagcttgaacgggcctgctggcgccatggccgcctgcgcaaacaccaagcgcggggcagcggcagccgcaacgaggccgcttgctgcgaacatgagacggcgccgggatatggatgacatttggttctcctgtctggacgatccgctggttgaagctatggcggtacaaacaagtacgtggctgcagccactatgggtttcgatcggggtcgccgtgacggtgcggcggaatcgcgcatggcgttcgacgatgcaggacgcaaacggccaagaaaaagggcggcctttcggccgcccttcggtgtttctggctgtggtgcgagagctactcgcccgctgcttcgcgcggggccttctcgccctcggcggccttctccttggcctcgaggtcttcgcccgtggtctgatcgaccaccttcatcgaaaggcgggtcttgccgcggtcgtcgaagccgagcagcttgaccttgaccttgtcgccttccttgacgacgtcggaggtcttctgcacgcggttcgccgcgagctggctgatgtggacgaggccgtccttcgagccgaagaagttcacgaacgcgccgaactccatgaccttgacgaccgtgccgtcatagatctggccgacttccggctcggacgcgatcgacttgatccacttgatcgcggccttcatggcttcgccgtcgctggaggcgaccttcacggtgccgtcgtcctcgatgttgaccttggctccggtcttctcgacgatttcgcggatcaccttgccgccggtgccgatcacttcgcggatcttgtcggtcgggatcttgaaggtctcgatgcgcggcgcgtactcgccgagctcggcgcgagcattggtgagggccttggccatctccccgaggatgtggatgcggccttccttggcctggccaagggcgacgcgcatgatctcttcggtgatgccctcgatcttgatgtccatctggagcgaggtgatgcccgcttccgtgccggcgaccttgaagtccatgtcgccgagatggtcctcgtcaccgaggatgtccgagagaaccgcaaagcgcttgtcttcgaggatcaggcccatcgcgatgcccgccgtcggccgcttcaacggcacgcccgcatccatcagtgccagcgaggcgccgcagaccgaggccatcgacgaggagccgttcgactcggtgatctccgagaccacgcgcaccgtgtaggggaattcatggtgcggcggcagcaccggatggatcgcgcgccaggccagcttgccgtggccgatctcgcggcgcttggtgccgccgaggcggccggtctcgccgaccgagtagggcgggaaattgtagtgcagcaggaacgtctctttgtacgttcccgacagcgcgtcgatatattgctcgtcctcgccggtaccgagcgtggtcacgaccatcgcctgggtctcgccgcgggtgaacagcgccgagccgtgggcgcgcggcagcacgccgacttcggcgacgatgttgcgcacggtcttgctgtcgcggccgtcgatgcgcttgccggtgtcgaggatgttccagcgaacgatcttggcttccagttccttgaacacggctgcgatgcgcagcttgtcgtatttcggctcctgcccttccgggaagtaatgggcgatcaccttttccttgaccttgccgaccgcggcgtagcgttcctgcttgatcggaatggcgtaggcggcgcgcagctcctgctcgatgatgccgagcatttccttctcgagcgcggcattgtcgatcacggtgacttcgcgcggctccttcgcggccttctcggcgagctcgatgatggcgttgatgaccggctggaagtgacggtggccgaacatcactgcgccgagcatgatgtcttcgttcagctccttggcctccgattccaccatcagcacggcgtcggcggtgccggcgacgacgaggtcgagctgggtgtcgaccatctcgtcgagcgtcggattgagcacatattcgtcattgacgaagccgacgcgggctgcgccgatcgggcccttgaacggagcacccgacaaggtcagcgccgccgacgaagccaccagcgcgacgatgtcagggtcgttttccatgtcgtgcgacagcaccgtggcgatcacctgggtctcgttgcgccagccgtcgacgaacagcggacggatcggacggtcgatcaggcgggagaccagcgtctccttctcggtcggacggccctcgcgcttgaaatagccgccgggaatgcggcctgccgcgtaggtcttttcctgatagtcgacggtgaggggcaggaagtcgacaccttcgcgcggcgccttcgccgcgacgacggtggcgagcaccacggtctcgccataggtggcgacgacggcgccgtcggcctggcgggcgatcttgccggtttcgagcttgagtgggcgtccgccccagtcgatctcgactgaatgcttattgaacatagaggtcttctttcatgggttctcgaaagaagggacgcttcgaaaaacaaaaaccatgcgcaagattgcgggacgctgatcggagcggatgatcagcgtcctgcgatcctgccatggtttttggatttcggatggcgtccatcctttcgggtcatacgggcgccttgcccgttgtgcccagccgccggattgctgctggactgtcagtcggcacgaacgcgagcaccgaaccgcggtgttcgctcttcatgcccggatgcagatccgtcaacggatcgcatccgacgcgcacgcagtttcgatcaaaaaacctttaaggaagcgctttcgttcgaaaccacacgcgaaaacgcgcgccagtggcgcgcgcataaacattaacggcgaatattgtgcttttcgagcagcgccttgtaccgcgcctcgtccttcttcttgaggtagtcgaggagcgagcggcgggtggagaccagcttcaagagcccgcgacgcgaatggttgtccttcacgtgggtcttgaaatgattggtgaggttgttgatgcgttccgaaaggatcgcgacctgaacctcgggcgagccggtgtcgccggccttggtggcattcgtcttgatgacttccgctttgcgttctgcggcaatcgacatcgtcagtttctctcgttgcgaccggcactggcagtcaggccggtcaggttgaacacacgcttggggatgatttcgccattgccaacttcagcaagcgccaaaagacggcctgccaccgtgacatagactgtgccgctacaagtgggcgcatcccgtccgcgcaacaaaacggcctgaccccgatggagccttgccgcatcagcccgagtgacggccagtgccgggatgtcgtccagcgcggtctcaacgggcaaaagcgcgtcggcgaggctgccctcgccggacgcggctctatcgcacaaagcctccaactgatccagcggaatcatgtcgttttcgccaaatgggccgaccagggtgcgccgcagcgcgcaaatatggccgaaagtgccgagaattcggcccatgtcgcgggccagcgctcggacataggtgcccttgccgcattcggcctcgaacacggcccggtcgttatccggttgatccacaagggttaaatggtgaatctcgaccggacggggcgccagctccacgacctcgccgtcgcgggcaaggtcataggcccgctcgccctgcaccttgattgcggaatagcgcggcgggatctgctcgatcaccccggtgaagcggggcaggagggcgagaatcgcctcccgggtcggacgctggtcggaggtcgcggtcacccggccctcgatgtcgtcggtgtcgcgctcctcgccccagcagaccgtgaactggtagcgcttgcggccgtccatgacgaagggaacggtcttggtggcttccccgagggcgatcggcaacccgcccgaggcgagcggatcgagcgtgccggcatggccggcgcgcttggcgttgaacaggcgcttgagcacggcaacggcctgcgtcgacgtcatgccgatcggcttgtcgagcacgacccagccatggacgtcgcggcggtcgcggcgaacctggttgcccttctgctgcttggcgcgtggatcgttgttgacgcggcgcggctcctgaggcggccgcgcgttgcttcccgaatccgcgaaatcattcgtctgcacatcgcgctgatcggcctcgttgctgtcgatcgtgccgtgagcggggtccatcgtcattgctcttcttcccgatccgaagccggattctgttccaggtccttctgcaccgcaggtgttcgcaaaagcttctcgatccgttccgcttcgtcgaatcgttcgtcgacgcggaagcgaatgtcaggtgcaaatttcaggttaacgcgtcgcgcgacttcgccgcgcaggaacttcttgttgcgctcgagcgcagcgatcacgatctcggtgtcgcggccgccgagcggcatcacgtagaccgtagcgagcttcaggtcgggcgacatccgcacctccggcacggtgatgatgtgaccttcgagatccgcatcatgcacgttgccttgcgccagaatatcggccatcgcgtggcgaacctgctcgcccacgcgcaactgacgttgcgagcctccgccggctgcggaactcttcttctgatgatggcgtggcattctcgaaaatcacctcgtcatgcccgtgcctggagcgcgggcatcgtcatttgtcctgttgaaacgaagaggggtggatggccggaataatccggccatcgcactcccgcaatttcagttcaaaaaggtccgaacgcttcggtaagatttggacttacagggagcgctggatcgtctccacgcgataacactcgatcacgtcaccggcacgcatgtcgtgatagttttcgaaggccatgccgcattcctgaccggactggacttccttcacttcgtccttgaagcgcttgagcgtcgacagcttgccttcgtgcaccacgacgttgtcgcggatcaggcgcacattggcgccgcgttccacagtgccgtcggtgacgcggcagccggcgaccttgccgaccttggagatgttgaagatctccaggatctcggcattgcccagcatggtttcgcgcaaggtcggcgcgagcaggccgctcatcgccttcttcacgtcgtccacgaggtcgtagatgatgttgtagtagcggatctcgatgccgttgcgcttggcggccgcagcggcctccttgttggcacggaccgagaagccgatgatcgcggcgttgaagccttcggccagcgtcacgtcggattccgagatgccgccgacgccggcatgcagaatgcgggccgccacttcgtcggtaccgagcttctccagcgacccgaggatcgcttccagcgagccctgcacgtcggccttgacgatcagcgggaattccttgcggcccgccgtcttcaattgcgacatcatctgctcgagcgagccgcgcatgcccgagatcgaggccgccgcgttctcacgcttctggtgcgcacggtagctggtgacctgacgggcgcgggcttcgttctcgaccaccgcgagacgatcgccggcctcgggcggaccgttgaagccgagcacttcgaccggcaccgaggggccggcctcctgcaccgtctcgccctgatccgagatcagcgcgcgcacacggcccatttcagcgccggcgacgatgatgtctccgacgcgaagggtgccgcgctgcaccagcacggtcgcgaccggaccacggccgcggtcgagcttggcctcgatcacggtgccttcggccggacgctgcgaattggtcttcaggtctaggatttcggcctggagggcgatcatctcgagcagcttgtcgagattggtcttgttcttggcggatacctcgacgtcgacgacctcgccgccgaaggactccacctgcacctcatgctggagcagctcggtgcgcacgcgctcgggcttggcatcgggcttgtcgatcttgttgatggccacgatgatcggcacccgcgccgccttggcgtggttgatggcctcgaccgtctgcggcatcacgccgtcatccgccgcgaccacgagcacgacgatgtcggtgaccttggcgccgcgggcgcgcatcgcggtgaacgcggcgtggccgggcgtatcgatgaaggtgatcttcttgccgctttcgggcgacaccacctggtaggcgccgatgtgctgggtgatgccgccggcctcgccggagacgacattggcgtggcggagcgcatcgagcagcgacgtcttgccgtggtcgacgtgacccatcacggtcacgacgggcgaacgcgtctcggtgtcggtggaatcgtcgacggtgtcgaacagaccttcctcgacgtccgacgcggcaacgcgcttgacggtgtggccgagctcctcggcgatcagctgcgcggtgtcggcgtcgatcacgtcggtgatcttgtgcatcgcgccctgcttcatcagcatgcggatgacgtcgaccgcgcgctcggacatgcggttggcgagttcctggatggtgatcgcttccgggatcgtcacttcgcggatcagcttctccttcggctcgttcgaggcgtggcccttcaggcgctgcgtgcggcggcggaacgatgcgatcgaccgctcgcggacctcgtcggcattgagcgccgtgacgaccgtcaggcgaccgcgctctttctgcgggccgggcttgtgggtggtcttgggggctgccgcaggacgcgcggcgccgccgggaccgcgacggatctggcgcggaccgtcgtcctcgtcggggccggccgcaattgcgggagcgcgccctgcagggcccgccggccgctgtggggtcgttgtcggacgtgcagtggtggtcgccgcaggtcgcgccgtgctcggcgcggaacgcggagcgctcgtcaccggagctgccgttgccgggcgcgcggcagcaggctgctcgccttccccaaagcgcttcttggcctcggtctcggccttccgcttggcctcgtcctcatggcgatggcgctcttcctcggccttgcgacgggcttcggcggcctcgcgctcagcccgttcggcggcctcgcggacagcgcggcgctgggcctcttcctcggcctggcggcgctcctcgacttcacgcagcttggcgtccgccagcgcgctggcgcgggccgaccgctcgtcctcggtgagcgtgcggagcaccacgccggaaccggcgttgcggggcggagcggctttcggagcgggacgcggcgccgcagcgggagtagccggcgcgggcttcgcgacctcggcaccctgcggctcgggagtgccgtcgatccggcgcttgccgcgcttctcgaccacgacctgcttgctgcggccatggctgaagctttggcgcacagtgcccgtttcgacgcgcggcttgagcgatagcgtcttgctcggaacgctcagcttcttgtcgccaggggtcttggtatcaaccattcagcagtcctaatcctgatttgtcagtgttgtgcgttgccgcaccgtccaatcgggtcgtcgtgtctctcagaaatcctggccgggcttttcggcagtcttgtcatcgtccgccatccggtatcggaccagcatctggctacgtgacaggaatgacttgctcgccgggcccgcgagcagcgcagcatgtatcacatttgaccgggtcagtgccaaatccaattctatcgatttcagtacggtgatgacgggaatctgcggcttggcaccgccatttccggcattttgacgcgccagcatgtccaatttgcggattccgtccgcggccccgtcgctggcgtggatcaggacctcgaccgtaccttcccgaagggcgctctcgaccttgccgaaaccggtcaagacctgacgcgccttggcggcgatcccaagcgcttccatcacgctccgaaccaagagcgcctcgatatcggtggaaagcgtctgaggggggcgcagctcgcgcttgaaggtcttgctaaattggtgacgccgcacggcttccgcaaccacctggcgcgaggcggtgagccacatgccccgtcccggcagcttgcgcttgaggtcgggaaccacctcgccctgcggcgagacgacgaagcggatcagctcgtcgatcggccgaacctcccggctgaccgcgcacatccgcatggtcgcggacctttcggtccgcggcccatggtcgagttcgctgtcagtgctggcgagcatccgggcgacatcctccttggccttctaaatcgcgcgttctttacgcaaagccgctctccacgcgtgccgaacgcgcgttacgccggctggtcttcggccgccgcggcctcctcgggcttggcgagatcggcctcggtgatccagccagccttgacgcgagcctgcatgatcatcgcttcggcatcgtcacgggatatgtcgatgccgtcgagcgcgccggcgtgcttggtcggctcgctgccttccttgcgctcggtccagccgaccagatcgtcggtggcgcagccggcgaggtcgtcgaccgtcttgatgtcgttctcgccgaacttcaccagcatcttcgaggtcacgccgggcacgtccttgagcgcgtcttccacgccaagctccttgcgccgggcttcgagctcggcctcctgctgttccagatattcccgggcgcggttctgcagctcttgtgcggtttcctcgtcgaaaccctcgatgccggcgagttccttgacgtccaccatggcgagttcctcgaccgaggtgaagccctcggacgccagcagctggccgacgacttcgtccacgttgagcgattccatgaagacgcgggtggagttctcgaagtcggcctggcggcgctccgattcctcctgctcggtcaggatgtcgatgtcccagccggtgagctgcgaggccagacgcacgttctggccgcggcggccgatcgcaagcgaaagctggttgttggtatcaggcaccaccacctcgatgcgctcgcggtcctcgtcgatgacgaccttggaaacctcggccggcgccagcgcattgactacgaaggtcgcgatgtcgggcgaccagggaatgatatcgatcttctcgccttgcagctcgttcaccacggcctgcacccgcgagccgcgcatgccgacgcaggcgccgaccgggtcgaccgacgaatcgcgggaaatcacgccgatcttcgcgcgcgagccgggatcgcgggcgaccgccttgatctcgacgatgccgtcatagatctccggcacctcctgcgcgaacagctttgccatgaactgcggatgcgtacgggacaggaagatctgcgggccgcgtgtctcgcggcggacgtcgaagatgtaggcgcggacgcggtcgccgttgcggaacacttcgcgcggcagcatttcgtcgcggcggatgatggcttcgccacggccgagatcgacgatcacgctgccatattcgacgcgcttgacgacgccgttgacgatgtcgccgatgcggtccttgaactcctggtactgtcggtcgcgctcggcctcgcgcaccttctgcacgatcacctgcttggccgattgggcggcgatacggccatattccagcggcggcagggtgtcggcgatggtgtcgccgacctgggcaccgggattggcgcgctgcgcatccaccagcgagatctggttggaagggttttcgaccttgtcgaccaccagcatgtggcgcgacagccgcagctcgcccttcttcggatcgatctcggcatgaacgtcggtttcgctgccgtaacgggcccgcgccgccttggcgatggcgtcctccatcgccgcgatgacgatgccgcggtcgatggacttttcgcgtgcgacggcgtccgcgatctgaagcaattcgagtcgattggcgctgactgccatggctagtctccttggtcaggctcggtctcgccgcgccgcgcgcgttcggcggcaaggcgatgtttcttcgtgttggtcggtgccggcttctttttcggcttggtgttctttgtgatcttcgcactgatctctgcgtgcggtgcagccggcggctccagtccgagatccctgcgcatcttgcgctcctcggccttgccgcggcgcatggattccgcgatcagctcgtcggtcagcaccaggcgcgcctcgccgatatcctccatggtcaggagaatgtcggcttcgtcgcccggcttgacgtcgtcgcgatgcagatggacgcgatcgccttcgactggaccgagcgtgccgcggaagcgcttgcgcccctcatgggcgaccgccatctcgattttcaccagatggccggcatagcgctcgaaatcggagcggcgcaccagcggacggtcgatgcccggagaggagatctccagccggtaggcgcgatcgatgggatcggcgacgtcgagcaccggcgacaatgcccgcgagatcgcctcgcaatcctcgatctgcatcgagccgtccggccgctcggccatgatctgcacggtgcagccggcctcgccggaaatgcggattcgcaccaggcgatagcccatgccctgaagcaccggagcagccaccgccgacacccgtgccgcgacgccaggctcgaccacgagccgcggctcggccagcagttcggcatccgtggaaccaggggtcggctcagtcatgtccagggtcagggcgctcgatggttaaggctcgtttacgtttcaagcccgcttcggaactctcccgacagtgtcgggccgcatctctcgccaagccgcttcaggtaacaaaaaagagcgggtccttgcgggcccactctcactacgcggatcgtatgagaagatgaattagcgctgatatagcgctttccgcacccccggacaaggcccattgcagcgggaatggggcctttttgcgcggccgcggaccccgcgcaacgcttccttcatcaagcaagcctagatttctggattgtggggcggcttgaaccaaggcgcacccgcggcgtgccccgttcgagttgcgttttcatgaccgttgccacgtcgctcatcccaggactggacgatattgtcaggcgcggcgatccgcggcgacgcggcgagatcgcgcgcgctgtcgcacagttgtttctccaggatgcggagaagctccgccccgaattggtcgccctcttcgacaatgttctgatcgatctcgttccgcatgccgagctggcctcgcgcgtcgatctcgccgagcgcttctcacgcctcaacaacgcgccaccgcacctcgtcaaccagctcgcgcgggaaaacgagatttccgtggcgggtcccgtgctgcgccgctcgcctgtgctcgacgatgcggccctggtcgagatcgcgcgtttgaagggccagggccatctcctggccatgacggaacgtcccgccttgtcgcccgtcgtcaccgacgtgctggtcgagcgcggtgatcgcgacgtggtgcgccgtgccgcaagcaatgccggtgccgcgttctcgccaagcagctattccgagctgatcaagcgcgccgcgcaggacggtgtgttgacgctcaagatcggccagcgcaacgacctttccggcgagcacctgaagcagctgctcgacggcacgctcgacgtcatccgccgccgcctctccagcgtggtcaaccccgcgcgccaagccgaaatcaagcgcgcgatggcggcgatcgaggaggctgcccggccgccgggaccgcgccgtgattactcggcagcacagcgcaccgtgctggcgctgtaccgcgaaggccatcttggcgagagcgcgttgcttggcttcgccaaggcgaacaaatacgaggaatcgatcgccgctctctcggccatgtccggcgttcgcctctcggtgctcgaccgcctgatcgcgggcgatcgctacgatccgatcttgatcttgggccgcgtgctgaatctcggctggcccacggtgcgcgcgctgatccggctctggtatggcccgcaacgcgcgcccgccgacgccgacatcgagaccgcgcgcgtgaacttcacgcgactgatgccgacgaccgccgagcgcgtcgtgcatttctggcgcaaccggcagacgatctgaatctctcgcttgtcgtttcggggcgatccgcagcatcgaaccatggtgcgcacttgcgcacctgagaagctcgagattccggttcgcgctttcgcgcgttccgaacgacaatcatatccgcctgaaccgcaaataagccgccttgcgtccttctcgcgcggccttccgtccgtagcgtgtcatggtgtagcccggccatggctgccggaaatcgtcggcgcgttcggcaagccacacgaagtcctgcgagcgtgcaagatgcgacagcgtccaggcgcagtaatcgtcgatgtcgcagacgaagcgaaattcgccgccaggcttcagcacgcgcgccatcgcggcgatggtcctgtcctggacgaagcgccgcttccagtgccgccgcttcggccagggatcgggatggatcaggtcgatccgcgacagcgcccccttcggcaaccaggccaagagctctgcggcatcgcccgcgaacaggcggatgttgccgatgttggcggcctcgatctgcgcgaggatcttcgccatgccgttgacatagggctcgcagccgatgaagccggtcgtggggaagttctgcgcctcggcagcaagatgctcgcctccgccgaagccgatctcgagccgtacgtcgtcggctgcgggagcgaagatcgcgcgggcatccaccggcgcctcgccgttgatgtcgagcgcgagatgcggcagcagatggtcgatcagctcggcctgatgctgccggagcttgtgacccttgcggcgcccgaagaaggcgcgctcgctgtcgtcgcgaccgggatctgatttgcgttcgctcatcgcagggtctgatacagccgatggagcagccgcgcgcgtggcgcgagcgacgagacgtagagctgctcgaaatgagtgtgtgcgcccttgccgtcgacgccgagcccgtcgagcgtcgcggtgtgcgcggcggtgaaattgccatccgagccgccgccggtatgggtgtcgatcagctcgaatccgatctccctggcgagcaacctcgcatgttcgtacagggaggcccccgcgttgctcttctcgtagggcggacgattgagcccgccggcgaccctgacggtgacgccgtcggtcttcgctgtcagggcgagaatcctgtcgacgtactcgtccgcgtccttcaggctcacgacgcgcagatcgacttcggcgtaagcctcttccggcgtgacgttggggcgcgtgcccccgcgcaccaggccgacattgactgtgacgccgcgcgcgggatcattcattccttcaagcgccaggatgacgtggccgagctcgcggacggcgctgcggccgtcttcgggccgggagccggcatgcgcgggcacacccttgatgtgcacctggaagcgaccaacgcccttgcgtccggtgacgatcttgccgccgtcgcgtgccggctcggtcaccagcacatatttggccttgcgcccttccttctcaatcagcgcacgtgacgtcgggctgccgatctcctcgtcggaggtgaacaggtgcgtgatgccgagcggcgagcgatcgccggtggcgcagagcgcgccaaaggcatgatgggcgatgtaggcgccgcccttcatgtcgtagatgccgggtccaaacgcgacgtcgccttcgaccttgaacggcaggcgctcgatgaatccaacgggatgaacggtatcgaggtggctcagcaccaggatgcctggccggtcctgaccccaattcgtgcgcgccacaagatgatcgccgcagccagccacgccggcgacgcgctcgagggtgacgggcaggccgcggtattgctccgcgaccaaggagaccagctcgttgacttgctcaggtgattccgtcggcgtctcgatctccacccagcggcggatgccgtcgagaatggtttgggaatcgaaccaattggagctggtcatggatgcatctgtgcctttgaatcgcatcatcgaagcggaggtgcatcaatgcgcggtcgcaaatgacgacataggccagatttgacgcagtctcaaatcgcgcttgagacggcccttcagcgcttgtcgggaccttcgcgggccgcgatctgctcgacgagatcgacgatcgagcggcgcatcttcgaatcggtgattcgcgtgaacgccttggtcaaggcgagcccttcggaggtcgcgagaaagtccgagacgtaagagggcgaggcgccttcgctgaagccttccggacccggcacgccgctcgggccgccctcgaacaggaatgagaccggcacctggagaatttcggcgatctgctggattcggctcgcgccgacccggttcgtgcccttctcgtatttctgaatctgctggaaagtcaggcccaaagcttcaccgagcttttcctgactcatgcccaacatgatgcggcgcatgcgcacgcgactgccgacatatttgtcaacagggttgggcgcttttgacatttcctcagccctccaaacatcaccctcggcgcaatcatcgcgaatgcctcgggtgcagcatcgtcaaaatcaaaccctgttattgggaaacattgcggagaaatttagcaatgcccactgtcttttgcagcgggtgcagaatgaggaggccatgtgcagtctgtcaaccgtgagactacggttgtcaaaggattctggccgcgagcgcggacatggcgcgatcaggtgtgccgcttggcgacgcgccgccggaccgccacaatcactgcgagcgcaacgagcatggctgcaggcgcatcgccgacgcgcgcatagacggtcggcggcagtgcggccggcaggtttgcatccaagatgccttcgatgccgagaccgaggctggcgatggtgcgcccgaccggatcaatcaccgcggagatgccggtgttggcggagcgcacgagcggcaaaccaagctcgatcgcgcgcatccgcgattgctcgagatgctgataaggaccggtcgaaatgccgaaccacccgtcattggtgaggttcacgatccagcccggacgttcgttgcgccctgccacctcgccgggaaagatcgcttcgtaacaaatcaacggcagcgcaggcggcgcgccggcgaccggcaacgcatgccgcacggtgccgggaatgaagccgccgcgcacacgcgtcagctgctcgaaaccgagcttctccatcaatgcctgatatgggagaaattcaccgaacggtaccaaatgcagcttgtcgtacactgcgagcacactgccgtcgtgatcgatcacgtagatcgagttgtaggcgcgcgtgatcggcgtgccgcgcggcaggtcgggcgcgcggaccgagcccgtgatcagcacggtgcccttgggcaggaggtcggcgatctgcgccatcgcgccggcttcgcgggtcaggaagaacggaaaggcggattccggccagatcaggatggtggcatcgcgcacgccggtcgattgcgggccggaggcgcggtccgacagcgcaaggtatttcttcatcacctccgccttggcggcgtagttgaatttggcgtcctgctgcaggttcggctgcatcaggcgcagcttggcgcctgagaccatcgcggtcggatggagcgacaggcggattgcgccgaagatgctcatgacgatcagaagtgcgacggcggcgcttggcacgcgccattgcgggcggcggtcgggcgtgcggtcgatcagcgtcgccgggcttgcgaagatcgcgacggtcaggaacgtcatgccccataggccgatcagcgacgccgtctgtgccagcggcagcggctcggacagcgcgtagccgaacgtgttccagggaaagccggtcagcgcatgaccgcgcagccactcgctgatggtgaggctcgcggcgagcgccagcacacgcgtggcgttcttggtccagagcaggcgcgccagtgcaaagccgatggccgtgaagatggacagataggcaggcaggccgagcacagcgaacggcgtcagccaggcgaacacatcggcgtcgacgaagaaggcatagccgatccagtagaggccggggacgaaatagcccagcccgaaccagtagccggtcaatgcggcggcggggacgccgccatgtcggccggccccggcgccgtcgatcagccagaccattaccgggaaggtgatgaacagcaccgggaagaggttgaacggcgccagcgccagcaccgacagcgcccccgccgccatggcgatcaccgcgcgcttccatccccaggtgaggatgatggcaagcgcgatctgccggagtcgctgcaatggactcactgttggctggtcccgtcgctcggcgacgtgggcgtttcgcccgccggcggctgacctgcgtcgggggccgcctcgcggcggcttctctcgcgctgggcgcgcggcgcggggcgctccttccgcgtcgagatacgcagccgcttgacccggcgcggatcggcgtcgagcacctcgacctcgtaggtgccggggcccgagatcacctcgccgcgcaccggcaggcgccccacgaagctgaccagatagccgcccagcgtctccacctcctcgccggcctcgccggtcaggaagtcttcgccgatcaccgagcggacatcgtcgaggcgggcgcgggcgtcggcgatgaaggcgttgtcgggcaggcgcacgatcgagggtggctcgtcgctgtcgtgctcgtcgtcgatctcgccgacgatctgctcgacgatgtcctcgatcgagaccagcccgtcgctgccgccatactcgtcgaccaccagcgccagatggatgcgcgtggcctgcatctgcgcgagcaggtcaatagcccgcatcgagggcggcacgtagagcagcttgcggatgatacgcgcttcatgaagcggcagcgcgagatcgacggcacgcaggtcgagccctgccggcagcggcttcttgcgcttggtcttggtgacttccgacacccgggcgcgcgcggtcatgaaggcgagcaggtcgcggatatggacgatgccgacgggatcgtcgagcgtctcgttgtagaccacgaggcgggagtggccggcgctctcgaagcggtccatcaactcgccgagcgggatgtcttgcttcactgcgacgatgtcagcgcggtgcaccatgacatcggcgatgcggcgctcatgcaggccgagaatgttgcgcagcatggtgcgctcgacggccgagaagccggtgtcgtcgggcctcgttgcgtcgagcacgaccttgaggtcgtcgcggaccgatcccgccttccagccgaacagcgtccggatggcgcgcagcagccagccgtccgccgtcggacgcatcacctcgccttgtgtcaccacgaccggcaaattggccgtgttgcgcgggttgtcctggattggatcggaatccggcatatcagtgtgtccccgcgcggtctgcatagggatcagggatgccgagatgcgccaggatctgcgtttccagcgcttccatctcctcggcgtcgtcgtcgttctcgtgatcgtagccgatcaggtgcaggaagccgtgcacggcgagatggctcagatggtgatcgaacggcttgtgttcctcgtccgcctcgcgccgcatggtctcataggcgatcgcgatgtcgccgagcatgcgcggcgcatcgcccggcttccggtcgccctcctgctgaagcgcggggaacgacagcacgttggtcggcttgtcgatgccgcgccagttgctgttgagggtgcggatgccggcatcatcggtcagcatcacagccacttccgcatcggcaacgtcctcgtgaatgctctcggcggcagcggccaccgctcgctggatcacggcttcggaatcgggctcgcgctgccagcaatcggcgacgacgaggacctcggtcatgggaagattgggatgggacattgtgttgtctgggacgaggggcgccgtggtcgcgacctctggagtccggtgttgcctcgtcaggattgaccggtggtcggccgctgcggcggcccttcgtaggcggcgacaatccgcgccacgagttcgtggcggatcacgtcctcggccctgaaatgaacctgagcaatgccttcgacgccgttcagaagacgcgttgcctccgccagacccgaggtctggccgttcggcaggtcgatctgcgagggatcgccggtcacgatcatgcggctgttctcgccgagacgcgtcaggaacatcttcatctgcatcgatgtggtgttctgggcttcgtccaggatgatggcggcattggtgagggtgcggccgcgcatgaaggcgagcggcgcgatctcgatctcgccggtctggagcgcacgctcgacgatacgcgcgtccatgaggtcgtacagcgcatcgtagatcggccgcagataggggtcgaccttctcgcggagatcgccgggcaggaagccgagccgctcgccggcttccactgccggacgcgacaggatgatacggtcgacctccttgcgctcgaacagctgcgcggcgtgggcgacggcgagccaggtcttgccggtgccggccgggccgacgccgaacaccagctcgtgccgcttcagcgcacggatgtaagagtcctgcgcggccgtgcgcgcgcgaacggggcgcttgcgcagattgatgctgtcgaacgccgatttggcggacttggcgtcgaactcgaacagcgagccctgggcgatcacggcgcggatcgcgccctcgacctcgccctggtcgagatcctgtcccttcgccgcctgcgcatagagcatctccagcacgcggcgcgcggcgtcgcagccgtcgcggctgccgccgatggtgatgtggttgcccttggaatcgacgacgacgccgagccgccgctcgatctgcgcgaggtgctggccgtaggggccgaccagcgcggaagcggcgcggttgtcgtcgaagtcgatgacgacctgggtctcgggcggaacttgcatgtcgcgatcaaatttgcggctgggagcgaacgaagacgaatccgatgcgctttttggcaagggttcaggctccagtggcttgcgataaagcgtgctcgcgcgcgccacgcggcgtcacgagttcgccgagaaaactgtagcgctcgaggcggtcgatgcgcaccggcaggatttgtccgatgatgtcgggcgaagccatcacatgcgccggctggaggtaggcggtgcggccgacgatctggccctccttgcgggccggacgctcgaacagcacgtcgaccgtcgagccgatcgcagccttgttgaaggccgattgctggctgtcgatcagttcctggagccgctccaatcgctggtccatctcggcgggggataccgtctcctgcatgtccgccgccggcgttcccggccgggcggagtatttgaacgaataggctgcagcgtagccgatttgcgcgacaagtgcgagggtggcgagaaaatcttgctcgctctcgccggggaagccgacgataaaatctgatgaaaaagcaatgtcttggcgtgcagcacggaaacggtcgacgacgcgccggtaatcatcggcggtatgtttccggttcatggcggccagtatgcggtccgagcccgattgcaccggcaggtgcacgaacggcatcagggcatcgagatcgcgatgggctgcgatcaggctgtcgtcgacgtcgcgaggatggctggtcgaatagcgcagccgcgcgatgccgggaatggccgccagatgttcgagcagccggccgagcggccaggttttcccgtccggaccctcgccgtgataggcgttgacgttctgcccgatcagcgtgagctcgcgcacgccgttgtcggcaagacgcttcacgtcatcgacgatcttcgccacgggacgcgacacctcggcgccgcgcgtatagggaacgacgcagaaggtgcagaacttgtcacagccttcctgcaccgtgacgaaggcggaaatcccgcgcgcgcggatggcgtctggcttgggctgggccaggaagccgaacttgtctgccgcagggaattcggtctcgatcgcacggccttcactgccggcgcgtttcaacagctccggcagatgatgatagctctgtggcccgaccacgacgtcgaccgccggcgcgcggcgaacgatctcctcgccctcggcctgcgccacgcagcccgcgacggcgatctgcatcgcgcggcccgcgcgcgcggcttcgtccttggccacgcgcaggcggccgagttcggaatagaccttttccgaggccttctcgcggatatggcaggtgttgaggatgacgaggtcggcatcctccgcgctggccgtctccacgaatccttccggcgccagcgtatccaccatgcgctgcgcatcgtagacgttcatctggcagccatatgatttgatgtgcagcttgcgcggcggcgtcatggaacccggaatggaggtggaggacggccttcagatataggctgaaggggggaaaatccagcgaatggaggcatttggattgtgattccggggtgcgcgcagtcgcgagcccggaatctcgcgccaaaacccctggattccgggttcacgcgctccgcgcgtgccccggagtgacacaaagagcggaattagcccgccagggccttcgctcccgcacgccggacaagctccggcagctgatgcatgtcggcaaaaatcaggtcggcgccagcctcgcgcagcgtctcggcataaccgggccggcaatggctgcccccgtagaagccgaacaccgtcatgcccgcggcccgggcgccggcgatgccggccaggctgtcctcgatcacgacgcagcgctcgggcgccacgcccatttcgctcgccgccagcagaaacaggtccggcgccggcttgccgttcttcacctgcgaggccgagaagatgttcggcgccaggcgctcgtagagaccggtacttcccaggctcacgcgcatacgctggtgcgagccgctcgaggcgacgcagacagcttgcgtaacgacatcgagcacgtcgcgaatgccgcggatcgcttcgaggtcggccccgaacgagcggaacagctcgtcctgaagatcgccgtgataggcctcgggcagcttgcggccgagctcggtctcgatctcgagattggcctgccgcgtcgagcgtcccaggaagcgttcgaacacctgctccgaggtgatcggatagccgtgccgcgtcagcacgtcggcatgcgcgcgacaggagatcacctcgctgtccacgagtacgccgtcgcaatcgaagatgatgaggtctatcggcaccaaatcaggacgtcggcttgtcgtcgtcgagcggcacgcaatagagctcgagccggtggtcgaccagcttgtagccgagcttgcgggcgatttccgcctgaagcttctcgatctcctcggaggtgaactcgatcaccttgccgtcgcgcagattgatgaggtggtcgtggtgactgtcgcgcatctgctcgtaacgcgcgcggccctcgcgaaaatcgtggcgttcgatgatgccggcatcctcgaacagcttcacggtgcgatacacggtcgagatcgatatcttgtcgtcaacggcgacgcagcggcggtacaattcctcgacatccggatggtcggcagcctccgcgagcacgcgggcaatgacccggcgctgctcggtcatgcgcatgcccgtggcagcgcagcgcgcctcgatatcggacgctttggatgtggaggagggtttcaatgcggtcataggtttgtctgcctggcggaggcgttttctgccaccaatgttacgacaagtcacgccgcatcagaagggcgttcaattgttccccgttcggctgcttatagtagcgttcgcggcgtccgaccaccgtgaatccggcccgctcgtagagccgccgcgccggctggttattttcctcgacctcgagaaatattgtgcgaacgccgcgtccggcgagatggccgagatgggtcatcaacagcgtgcgggagaggccgcggccgcgataagccgcgtcgaccgcgatcgagagaatctccgcttcgtccgcgccgacccgcgacaccgcaaagccgatcgtcttgccgcccagacgcaagcgatgcaccagcgtgttgcgctcgctgatcatgctctcgaactcgccttcgccccagccgcgcgcgaaggacgcgccgtgcagctgcgcgagccgcgcggcatcgcgcaaggtcgcaggctcgacgacggcgctgccgccgcgccaccattcggacagccatcccatcatgaggtcgcggcttgtgctgcgaggtgcttctgcgccgccggctttgcgtccggcgccttcagatagaacggccgcgccggggtggtgtcgggattggcagctgcaccaagccaggcgatccagccgatgtcgggcgcaggttgcgcgtcgaccgcgacaggctgcggtccatccttgggccagcgatcggcgaggatgcttgcggcattgccgaccagatgcggcgcgccgaattgcgaggcggcgatcgcctcgtcgatcgaggcgacacccggtcgcaccagctggctgccgtccccggccacgatctggaaaaagacatggtcgtgccgcgcatcgattgcggagagcacgggcgccggcttgttctggctgacgatggccgcggcataggccgacagtgtcgtcaatcccaccgcgggcttgccggaggcaagcgccagtccgcgtgcggccgagatgccgacgcgcaatccggtgaagctgccgggcccggtggtgacggcgatgcggtcgagcgcggtgaagccgagctcggccgattgcatcacccgcgcgatcagcggcatcagggcttcggcatggccgcgcttcatcggcagcgattcgtgcgcgcgcagctcggccgtttcggtgtcgagcacggcggctgcgcaggcgtcgagcgcagtatcgatggcgaggatcagcatgaaaaagcgaatggcgggtggcgaatagcgggcagtctagccgatccgagttccattcgccattcgcttgctcgccattcgcgctccaatcacatcggccggacttcgaccacgtccggaacgaagtgcttcagcaagttctggatgccgtgctggagcgtggccgtcgacgacgggcagccggcgcaagaacccttcatgttgagatagacgatgccgtccttgaaaccgcggaaggtgatgtcgccgccgtcattggcgaccgccggccgcacccgggtctcgatcaggtccttgatcatgtcgaccgtctcggcgtcggcctcatcgaagaactcgtcctcgtcgtcgagatcggcatcgccttgcgctgtgccgtcggcaagcagcggcgcgcccgacatatagtgctccatgatggcacccaggatcgcgggcttgagctgctgccattcaccgttcgccttggtcacggtgatgaaatccgatccgtagaacacgccggtgacgccgggcacgtcgaacagcttttcagccagcggcgagcgcgcggctgattcgcggctcgaaaactccatcgggttgccgtcgaccacgacgcggccgggaatgaacttcagcgtggcgggattgggagtggcttcggtttgaatgaacatggctttctccagacgtcgccggttcaaggccagcgcgtacctatccactagcagatggcgagggggaacgcacgatcaaggggcagggcgagcatttcaaagccagatcagaggcttaggcactagattgcccttccctggatggggccctccagggaagggtaggaggcaccgcgctacgacagcagatccacgctctggtcgctcagcgcccccgagatgatcgtcaccggtattggaaaggttccgaccgcctgcgcgagcatcgcgaccagcggtcccggcccttccgggccgggattggcggccagcaccagcatggcgatatcgggatcctcgtcgatcaccgcgagcagctgttccatcggcgcgccctcccggatcacccgctccggggtgattgcggcgatgccattggcccggccggcggcgcggtcgagtgcggcttcggcggcctcctgcgcttccgcgcgcatgatgtcggcaacgccaagccattcctggctctgctgttcgggctcgatgatgcgaagcatcaccacgccgcccccggcccgaatcgcccagcggctggcgtaatacaccgcgcgatcccattcggcggtgtcatcgacgatgacgaggcatttgggcttgtggcccggctcgtagcaaagtcgcttgctggtcatgcatgtcccggaatgtgcacggccggcatgctgccacactcgccttcgctttgggagagggggcgccggacggcgtcacgagagcgaaggtcagcgccggcggatgaagccgacgatgtccttcgagagcttcatggtctcgtcggcgatggcgcgggcacggtcggagccgtcgttcaggatcgcgtcgatatggccggggtcggcgacgaggcgcttcatctcaccggcgatcggcgcgagcttggtgacgcacagctccgccagcgcgttcttgaagctcgagaactggccgccgccgaaatcgcgcagcacatcggctttggagcggccggagagcgcggcgaaaatgccgacgaggttgtcggcctcggggcgggcttccaggcccttttcctcggtcggcaacggttccggatcggtcttcgccttgcggatcttctgcgcgatggtgtcggcatcgtcggtgaggttgatgcgcgaattgtcggaggcatccgacttcgacatcttcttggtgccgtcccgcaagctcatcacgcgcgtcgccggtcccgtgatcaggggctcgggcagcgggaagaacaggccgtcactggcgccctgggcacgaatggaatcgccgaaatcgttgttgaacttctgcgcgatgtcgcgcgaaagctcgagatgctgcttctggtcctcgccgaccggcacgtgagtggcgcggtacagcaggatgtcggccgccatcagcacgggatagtcgaacagcccgaccgacgcgttctcgcggtccttgccggccttctccttgaactgggtcatgcggccgagccagcccatgcgcgcgacgcagttgaagatccaggcgagctcggcatggcccgagacctgactctggttgaacacgatgtgcttcttcggatcgatgccggcagcgatgaacgcagcggtgacctcgcgggtgttgcgcgtgagctcggccggtccgccccagacgtcgacgccctgcgtgatcgcgtgcatgtcgacgacgcaatagatgcagttgtgggtttcctgcatcttcacgaagttgacgatcgcgccgagataattgccgaggtgcagattgcctgtcggctggacgcccgaaaagacccgttcaacgaatggcatggtcagccttcccataggtattcgcgccgtcgtttccaacagcggcgctgccccgtcaagggtatttcgccgggcctcgtggtttagcggggccgtttcaacgcgccgaccgcctcatgccaggaggtgacgccgaggatccgcaggagcaggccatagacggcgatccccgccgcgatctgcacacccagcgcgacgaacttgatgaagccttggctctcggcaggcaccagacctgtggtcagccagagcaggccgcccatcgcgatcgcggccagcgcgatccgcggcagccgcgtgcgggcgctcgcatcgaccgcgaagccgaactcgctcgtgcccttgcggagcagcgcgagcgcgctgctccaggcgccggccgcgatgcttgcggcgatcccgctcgcgccgaagacatggccgagcagaagcgcgagcacgaccgtcaccacgaagccctgggccgtggccagcagcggcgccatggtgtcgctgcgggcatagaacgccggcgacagcgccttgatcagcacatgcgccggcaggccgagcgccagccaaatcagggcgttcgccgtcgccgcgctgtcctgtgcgccgaaagcgccatgctcgaacaacagccgcacgatcggctcggccagtacgatcaggccgagggtcgccggcagcgtcagcccggtcgcaagctccagcgcgcgcgattcggcgtgcgccaccgcgtcgcgatctccgctgcgcacggcacgcgtcagctccggcaccagcaccgttcccatggcgacgccgacgataccgagcggcagctcgatcagccggttggcgaaatagagccaggacaccgcggagggcgtcgccgaggcgatgatcgcgcctgcgaccatcagccattgcgggcccgagcttgccagcatgccggggatggccttggcgaagaagccgcgcatctccttgtcgaagctggcgcgcagcggcgtcgcaagacgcgcgcttcgctgcgacagcagcatgagaagctgcagcaggccggcgatgccgacgctggccgccaggatccacgcggcgaagcttgcatctgcgcggtccagcagcagcactgcgatcgcggcgatcagcgcgatgttgaacagcagcggcgagaacgcggtgagggcaaagcgcccttgcgcattgagcagtcccatcagcaccgtgaccggaccggcaaaggcaaggtagggcagcatcagccgcgcattcgcgacggcgagatcgagcgtgccgctgccgaggaatcccggcgcgatcaccgtgatgaccagaggcatcagaagtgcgatgacgatcgagatcgcgatcagggccgcgctgaccgtgccgagcacgcgccccgcgaatgccgcggcagcccgctgcccgtcatggtcgcggatacggagccaggccgggatcagcgccgcgttcagcgcgccttcgctgagaagccgccggaccacgttgacgagctgaaacgccgccagaaacgcgtccgccacggcgccggtcccgagcagcgccgcaatcagggaatcgcgggcaaaacccagcagccgcgaggccaatgttcccgtcgagacggtcaggaaggagcggatcattgccgtcgagaataccgttgcttgctcgtgccggcccggtcgtgataggccgcgagccggatttcaggcgcacaggaagcggattttcgcgggtatcgcaatccgccaaacaggatcaaggtgaatggctgacgtgaaatacgacgttctcggcatcggcaacgcgctgttcgacgtgctggtcaggaccgacgaggcctttctggccaagcatggcatgaccaagggcagcatgtccctgatcgacgaggcgcgcgcggccgccatctacaaggacatggggccggccacggaagtctcgggcggctcggccgccaacaccatcgtcggcatcggcagcctgggggcacgcgccgcctatgtcggcaaggtcaaggacgaccagatcggcaagctctatgtccatgacatccgcgccgccggcgtcgccttcgacacgcccgctgccaaggatggccccgccaccggctgctcctacatcctggtcaccggcgacggtgagcgcaccatgaacacctatctcggcgcggcgcaggatctgtcgcccgccgacatcgacccggccgagatcgcggcagccggcatcgtctatctcgagggttatctctgggaccccaagaacgccaaggacgccttcgtcaaggcggccaagatcgcccatgacgccaagcgtaaggtggcgctcacgctctcggattccttctgtgtcgaccgctatcgcgacgaatttctctccttgatgcgcaacggcaccgtcgacatcgtcttcgccaacgagtccgagctgcactcgctctacatgacctcggatttcgacaccgcgctgaagcagctgcgcaacgacgtcaatctcggcgtcgtcacccgcagcgagaagggctgcatggtggtgtcggtggaagacgcggttgccgcgcccgcattcccggtcgacaaggtggtcgacacgaccggcgccggcgatctcttcgctgcaggattcctgtatggtttggcgcgcaatcttgcctacaagcagtgcggcgagctcggtgcgcttgcggctgccgaagtgatccagcacatcggcgcgcggccgcaagtgtcgctgaaggagctggcggagcagcgcgggctgacggcgtaaggctctcgccactctttccgtcatttcgagccaacgggtccgcgcgaagcgcggccnnnnnnnnnngggctcagcgaagcaatccagtctgtctcagcgcaaagactctggattgcttcgctaggctcgcaatgacggtgtagctcacgccgtcttcgccgccttcaatcccagtcgctgctccaccgcatcccgcatcacgaacttctggatctttcccgtcaccgtcatcggaaactcctcgacgaactccacgtagcgagggatcttgttgtgggcgatctggccgtcgcagaaggcgcggacctcctcggccgtcagcgtctcgcccggcctgccgcggatccaggcgcaaagctcctcgccgtagcgggtgtccgcgacgccgaaaatctgcacgtcctggatcttggggtgacggtacagaaactcctcgatctcgcgcgggtagaggttctcgccgccgcggatcaccagatccttgatgcgtccaacgatgttgcaatagccctcgtcgtcgatggtggcgaggtcgccggtgtgcatccagccatgggcatcgagcacatcggccgtcttttccttctcttcccaatagcccagcatgacgctgtagccgcgcgtgcagagctcgccgcgttcgccgcgcttgacgatcttgccttcgagatcgacgaccttgacctcgacatgggggtgaatgcggcccacggtcgagacgcgccgctccagcgggtcgtcggtcgcgctctggaagctgaccgggctggtctcggtcatgccataggcgatggtgacctcgcgcatgttcatctcggtgttgacgcgcttcatcacctcgatcgggcagggcgcgcccgccatgatgccggtgcgcagcgatttcaaatcgaacgtcttgaactcgggatgatcgagctcggcgatgaacatggtgggcacgccgtacagcgcggtgcatttctcctgctcgaccgcgcgcagcgtcgcgagcggatcaaagccctcgcccggatagaccatggtggcgccgagcgtgaccgaggccagattgcccatcaccatgccgaagcaatgatagagcggcaccggaatgcagatgcggtcctgctccgtcaggcgcatcgcgcgtcccgtgaagtagccgttgttgaggatgttgtggtgggtcagcgtgacgcctttcggcgaacccgtggtgccgctggtgaactggatgttgacggggtcgtcgaactgcagcgcggcgccgagcgcggcaagctgctgacgatgctccgctccgctcatgcgtgcgacgttgtcgaaggggatcgtgcctggggccgccgggccgccgatctggatcaccatccgcaaagccggcaaccgcgctgcctgcaaatgtccaggtttcgcccgcgccagctccggaagcagcgtgttgagcatctccatgtaattgctggtcttgaacgcggtggcggtgacgatcgccgcgcagccgacctttttgagggcgaattccagctcgctgagccggtaggcggggttgatcgtcaccaggatcaggccggctttggcggcggcgaactgggtcagcgtccattccggccggttcagcgaccatatgccgatccgctccccccgttcgagcccgagcgcgagaaagcccgcggcgagcgcgtcgacccgctcggcgaactctttccaggtccatctgacgccgtggctgggcgagacgagcgcctcgcgatcgccccagcgccgcaccgcgtggtccaggctgcgaccgatcgtgtcgccgagcagtgacgtgtccgagataccgcagacgtagctgtccgccttgtcagccaaattatcagccaagtcgaaatcctctcgtcaaaatacccagcatggtcttcagtcgccatgcccgggcttgacccgggcatccacgtctttggcgcctgcggctgcacgtggacggcccggacaacaagcccggccatgacgggtgatgagagtcgcgccccttaggccgccttctgcccgctcccggcagcatcgagcccggcatagaccccgcgttcgaatcccgcgaacgcttccaggcatttcgcatcggcgaacggcagaagctgcatcaggatcacgccggtgacgtcgcgtgcaggatcgatccagtaataggtgttggcgagccccgcccaagcgaggctgccggcgctacggccctcggcggtcttggcggtgttgatcatgaagctgaggccccacttcttcacctgctccggatacagatcgacgtcgttggtgtacatcggggcggccgtcgtcatcttgcccatggcgagatcgccgatgtggttctgccccatcgttgcgacggtctcggccttcaacacctggttgccgttgccgcggcccttgttcaggatcatctgggtaaacctgatgtagtccgccgccgtcgaatagaggccgccgccacccatgtggaattccggctcctgctcgagctcgaacgggatggcagccagctggccgtcctcgccgcgcgcgtgcatgccgaccaggcgcttgcgcatgtcgtcggtgatcttgaacgccgtgttgctcatgccgagagggttgaacagattgtcgcgcagataggcgtccaatcgcttgccgctggcggcctccacggccttgccgacgaaatcgatgttggtgccatattcccagcgcgtgccggggtcggtcatgatcggggtcttcagcgccgcgttctggcaggtggtgatggcgggaatgccgttcttgtccagatagaccgcgagatcgccgttccacatattgtagcagaagccggcagtgtgggtcatgagctggcgcagcgtgatcgggcccttggcggggcgcagctttgcctcgccattggcgtcgaaaccttcgagcacctgcggattggcgagatcgggcaatacatcgccgatcggcgcatccagcgacagcttgccctgctcgaccagctgcatcgcgcccgccgtggtcaccgccttcgtcatcgaggcgatccagaacacgctgtcgtcggtcatcgcatccggcctggacaggtcgcgcttgccgaacgcgccctgatacagcacgtcgttgccgctcgcggcgatggcgacgacgcccggaatctccttggtctcgctcttctgccgcagaatctcgtcgatgtcagctttgctttgcatggcgttcctcaggtttgattattgttggaagcagccgattgtcctcccggatggccggcgcggcaagcgcatctatgtacctgaaccggtcgcgatgtcgtgacttgacggtcttgatctagcgcaggacgacaacgcggctgagcgcctacgctctttcacaatctgcggtggatcgacgtgcctcgccctcaccttggacgggcttcaggccgatatgcttcgtggttgtcgaacccttgaaacatttcgtgagctgccgcgttcagcacccggtcccgatcgaggggccgataagacttaatgcaaatgttgccggccgtgtggatgggcggcgagggggcctcggatgatttcgacctggagcgaatggaagcgctatccccgtccgggacgcggcgagaacctggaggcgccgatttcgccggggatctatgaggtgcgcgtcgccggcaccggcgcactctactcgttcggggcggtggacaatctggcgcaggcgctgtcgctgttgccggtcggctcgaaatcatggttcggccgccgcgacacctctcatgttcccgatctcgaataccggacctgcgcgacctcctcgaaggccgacgccaaggccgcggccgagcggatgatcggccgtcgcgagacctatatgagcggcgcggcctgaggccgctgccagtttagctgccacctgacgtgcgtttgcggggcggtgcattgcgcaccgtctatctctatattgcggccgatccgatcgccgccagggagaaacgccaatgacccagaccgccgccgctcgcgctccgcaagccacctccaatctgcgcgaccggctgaaggacccgtcgctcctgaaggaggcctgttatatcgacggcgcctgggtcggcacgccggtattcgccgtcaacaatcccgcgaccggcgtggagctggcaaaagtcccgcagcttggcgcggacgacacgaccaaggcggtcgaagcggccgagcgcgcctttccgggctgggccaagcacacggcaaagcagcgctccaacatcctgcgcaaatggttcgagctgatcatcgccaaccgcgaggacctcgcgctgatcctcacctccgaacagggcaagccgcttaccgaggctctgggcgaggtcgatatcggcgccgcctacatcgagttctttgccgaggaagcccgccgcgtctatggtgagaccatcccgacgcagcggcccgatgcgcgcctgctcgcgatcaagcagccgatcggcgtctgcggcgccatcacgccctggaatttcccgaactcgatgatcacgcgaaaggtctcgccggcgctggccgccggttgcaccgtggtgctgaagcccgccaatgagacgccgctgtcggcgctggcgctcgccgtgctcgccgagaaggcgggcatccccaagggcgtgctcaacatcatcacgggtgacgcaccgccgatcggcaaggtgctgtgcgagcatccggccgtgcgcttcgtcggcttcaccggctcgaccgccgtcggcaagatcctctaccagcaggccgccgtcggcgtgaagcggctcggcctcgagctcggcggcaacgcaccgttcgtggtgttcgacgacgccgacattgacgctgcggtcgaaggcgcgatcgtctcgaaataccgcaacatgggccagacctgcgtttgcgccaaccgcctctatgcccaggacaagatctacgacgagttcgtgcagaagctgtcgaagaaggtcgcgtcgatgaagatcggcgacggcaccgagagcggcgtcacgcaaggacccttgatcaacatgaaggcggtcgacaaggtcgagcgccacatcgccgatgccgtcaagcgcggtgccaaggtcgtcaccggcggcaagcgcagcgagctcggccgctccttcttcgagccgaccgtgctggccgacgtcaagccggattcgctggtgtcgcaggaggagacctttggcccgcttgccccggtgatccgcttcaaggacgaggcggacgtcatcgcgatgtgcaacgcctcgccattcggcctggcctcgtacttctactcccgcgatctgggccgcgtctggcgcgtcgccgaagcgctggaatcgggcatggtcggcgtcaacaccggcctcatcaccacggaagtcgcccccttcggcggcgtcaaggaaagcggcctggggcgcgaaggctcgcgtcacggcatggaagaatatctcgagatcaaatacgtgatgatggcgggggtgtgaggcaccattatctctccacgtcattgcgaagcgaagcaatccagacgatctccgcggagggactctggattgcttcgcgacgctcgcaatgacggagcgagacgcgacagtcgaggctaaatcttcaactccgatcccgtcacgcgccggtacgcttccagatatcgcttgctggtcgcttcgacgacgctcgccggcaatggtggcggcggggcgtcgccgttccagcggccggcgcggcgctcggcgtcgagatagtcgcgcaatggctgcttgtcgaagctcgcctgcggctggccgggcttgtaggtgtcgaccgcccagaagcgcgaggaatccggcgtcatcacctcgtcgatcagaatgatgcggtcgtccctgtcgcggccgaactcgaactttgtatccgcgatgatgatgccctgttcgcgcgccagctcctcgccgagcgtgtagatcgcgcgcgtcatgctttccagcgtataggcgacctcgtcgccgaccacttcgcgcatcttcgcgatcgtgatgttctcgtcatggccactctcggccttggtggcggggctgaagatcgcaggctccagcttctcgctctcgacaagcccggccttcagcttctcgccggcgagcgtgccgctggcggcatattccttccaggcggagcccgagagataaccgcggatcacgcattcgatcggaaacacggtggtgcgcttgcacagcatggcgcggccgaggatctcggcgcggtgcggcttcagtgccggcacggccgcaatgatctcgtcggtgtccgcgctgatcatgtgatgcggcaccacgccttcgagctcattgaaccaccacgcgctgatttgcgtcagcaccgcgcccttcatcggaatggtttcgcccatcaccacatcgaaagcgctgatgcggtcggtggtgacgagcagcaggcgctcatcgtcgacggcatagatatcgcgcaccttgccgcgtccgatcttgggaagcggcaggtcgctggagagcatggtggtcatgggcaaggctttcgcaggctttcaggcaggcatccggccgtgcctgatggcattggccggagaccggattagcctattccggcagcggaatgaactcatgttcctgcggaactggcgcgaaacggccggttttccagtcctgcttggcttgctcgatccgctccttgctggatgaaacgaaattccaccagacatggcgtggaccttccagcgcatcgccgccaagaaacatcatccgggtcgccttgagcgccttcaccgtaatgcggtcgccggggcggaaaatgaggagccgcggcccttcatagcgctcgttcgcgatctcgacctcgccgtcgacgacataaatcgcgcgctcctcgtgatcgggatcgagcggcacgctcgcgccggcgagggcagtcacctcggcgtagaaccagggcgacaccatcgatacgggcgaggtgatgccgaacgaggatcccgcgatcacgcgcgcggtgaaatcgcgttcggtgatcatcggcaggtcgcccgccccgtagtgttggaacgacggcgcgatttcttccgatccggccggcagcgcgatccagctttgcaggcccagcatcttctggcccgaggcacgctgtgcatccggcgtgcgctcggaatgggcgatgccgcggccggccgtcatcaggttcatcgcccccggcgcgatctcctggacgttgccttcgctgtcgcgatgcatgatcgcgccgtcgaacagataggtgacggtggcgagcccgatatgcggatgcggccgcacgtccatgccttttccggagacgaactgcaccggtccgaaatggtcgaagaagatgaagggcccgaccatctgccgcttgccgtgcggcagcgcccggcgcaccgcgaagccgtcgccgagatcgcgcgtccgcggcacgatgacgagatcgagcgcatcgcaggacatgggatcgccgagcacgggatcgttcgagggctgccagctcatgggggactccttgtgtatttcgcgagcctgattgtagcaggataccatgccgcagtcgcggcaaagcccgacctcatgcgcttgtgacttgggaatgttcgatatgtcgcagcggtcgccatgccgggacaagccggtcatgcatggcgcagcatacgggcagcggcaaacggatggttactgacgtcccagctcggtcgcctgcgccacgcggtcgaagcgctccagcgtcatgatcgcgtccgcgaatttctccgcccgcgcgttcagcacggggcgggccagcgtcaggaatttctgctgcatggcctgcgcgtccgggaacgaggtcggctcgccggagggatcggcatagagccgctcatgcacgccgtcgtcggtggtgatgctgacgcgcgccccgaacgggtgggtgcggccgatctcgagccggtcgtcctgcaccacgtcgaacttgtccgcgagcgcgtcgatcgcggcatcgccaagccggttgtagtcgtcccagccgaacgagccctggtcaagcgcgagcgcgccggtgaagaacatcgagaactggccgcccacgatcgagcgcggatggcgcttggtcgcggcatctccggtgagcgtgatgccgttgcggtgcaagccgatctcgactcgcttgacttggtcgggagtcagattgtgctcgcgccgcatggcgatcagggcgtcgatcgcggcatgagtgtagcggcagctcggatagggtttcacgccgatcttcatcgtctcgtaggtcttgccaagctcggcgaccgctttgtccggatgcgcgtcgtcggtgtagccggcgagcaggccgtgcttgccctcgatcgattcggtcgcgccgacgaaatcgttgcgggcgagcgtcgcggcgatcacgccgttcatcgcggccgcgccgacctggtagcgcttgttccaggcgccgttgaccaggaattgcagcgaacccgcggcctggctgccggacacgccgaaggccgcgatcagctgcttctcgctgaggccaaacagttttccggccgctgcggcagcgccataggtgccagccgtcgcggtcggatggaagccgcgtgcataatgcgaggtcggatcgagtgcgttgccgaggcggcagcagacctcatagcccgcgacgatcgccgtcagcacgtcgcggccggacgcgccgaccatctcgccgacggcgaaggccgcaggaaccaccggggcgctcggatgcagcgaggaatcggcgtgcgtgtcgtcgaaatccagggaatgccccagcgcgccgttgagcagggccgcgactgccggagtccaggtcttggtatcgccgaacacggtggattcgcccttggtgtcgagcgcgagcgcctccagcatcttcagcatcgacggggtcgattccgcctcgcgccttgcccggatcgcgctgccgagaaagtcgagcgtcagcactttggcgcgctccagcacctctgccggaatatcctggtacttcagattggagacataggctgcgagcgttgcggtttcaaaggccatcgtgtttcctcgttttggccggcaagttaggcgggctcatttcgcctttcaagcggccttgcggccgcgggcatcagctatgctcctggcagcttcgaccggatcgggacgttgacgatggcactcgcaggacagctgttcgacaggatccgggcgcgaaggacgcagctggggctcgcgatccgggtcacggtggcggcgaccgccgcctacgcgatcgccaccgcgctgcacctcttgctgccgctctgggcggtgctgacctcgctgatcgtgacgcagatgagtgtcggccgctcgctcaaggcgacgcgcgactacatgctgggcacgatcggcggcgccgtttacggcggtgccatcgcgatcctgataccctattccagcgaagcgggcctgttggggctcctggtcctctcggtcgccccgcttgcgttcatcgccgcgatcaatccgagcctcagtgccgccacggtgaccgcggtgatcgtgctgctggttccgaccatgcaccattccgatcccctggcctcggcgatcgatcgggtgagtgaggtcgcggtcggggcggtcacgggattgctggtgtccttcctggtgctgccctcgcgcgcggtgcggcagatccgcgccagcgcggccaagctgcttgaattgatcgccgacgctttcaccgagctgcttgcgggcctgacgcgcggccgtgacaacgatgcgctgcaccggattcaggacgggatcggcactgcgatggtcgatctcaacgcgatcggctccgaagccgagcgcgagcgcgccgcgcatctgtcgagcggcccggacaccggccccttgctgcgcacgatcctgcggctgcgccatgacgtcgtgatgatcggccgggccacggtggtgccgctgccgatcgaggtgcagacgcggctggccggcccgttgacggaggtctcgacggtgatcgcccgtttcctgcgttcggccgcctcggccttgcgcgaaggcgcaggcgcgccgccgatccatccggtccacgtcgcgctccagcactacgccgaagcggtcgcgtccgtgcggcaggacggcctgattcgcggctatccaggcgacaccgccgagcgcttcttcgcactcggtttctccctggagcagatgcaccagaatctgtgcgatctcgatcgtgtcgtcggcgaatggtcagaggcggcgagcaagtccgcgcgcattgcagactgaatggtgttacagatcgaagaacgcgagctgcgtcgcatcgcgccgctctatgccctcggtcagcgcgttcaatgcggcatcgaagcttggctgaggttgctccagttcccacgccccgtcatggtcccattgaaaacactgaccatagcgcgttccgggctcgacatggaggaggagacaacggctgagctgcgatggttccgcaatcggcaccaggtgctttagcgacacgccgtattgcttgcgaaaatgggcgcaggcttcctcgagcacttcctcggaataggcgatgaaatcgagcaggcttcgatgctgcgtggcaagctcatccggtccatagaagcgaagctcggaggaggactcgggcagccgcaccagcagctccgtctcgccgcgggtcagcaggaagtcgcgataatcatcgggcagtctgactccgagggcccgctgcgcagcactcacatcggcttcgctcgctggcgtgccgggcctccagcgccagctcctggccgatcccgccttgcgccggctttcgtactcagcatagccgggaaacgcaatgatgtcctcgtagccgccgaagcgcgaccattgataggcatcgtctaaggcttcttcccgccgctcggggaaatatccgcagacaatctccgcgcgcttgaggatgtgttcatggttcggggcggtcctgcacaggtgctcggcggtcttcagcgccgcatctgcatcgtcggcatagagataggcgtcgcacagcagctcgagaatgcgctcctcgaggtcgttctcggagatggaccacgcatagtgcggctgtccggatgcgcgccgcgcgcggatttcattgtgtgcctgttcagcaaggcgcaccgccccggccgggtcgtctccggcagcgtaatcgcggcgtgcggcgtgccagagatacagcggctcgtgctcggccggcgtgcccttgagcaggtcgagttgctttgcctgctccgcgagtgggccgctgagcgccagcatcatcagctcgtcgagtcctttttgccagtccggctttgcctgcggatcgggcaggagattgcgcaacgtataacgcgtgtggtgggtctcgacgtaaccgtgcgctaccagttcggcggcatggcgacggaaggctgcggcggcctcggcaatgtccggaaattcctcgcgcagatattgatccgatccgggttcgtcgtcccggttcatgcggatgccgatcaccatgggctcgctgcccgggatcagcatcagctcgcgatcgtcgtcgcccggtgcgcgatggaagaattttgccagatgcatgcgacctccggacgcgccgccggtattggtgcggggcgcctcgtctcagtcgtcggctcgaagacttgggttcaggtcggcggtcttaccgccgcgtcaggcccttgctctgcatgcgccagaccaggagatcgacgcggtcctggccgaagaacggctcgttctcgaatacgaaggtcggcacgccccaatggcctgacgccgcgtggtccgtctcgttctcagcgatcacctgctcgtagcgatccgggtcggctgtgatcgccgcatccattgcggcgagatcgaagccggctttctcggccgcccgcgcgagatgatcgccttcgttccatccggcgaccgagccgtcccaaagcacgcgggcgatcgcgcaggtgaatgcgagcgagcggccttcgagctgcgccatggcacccagccgcgtcaggcggtggatgtagggctgctcggccgcgacctccagcgtcgtcatgtcctgcacgatcggatcgggccgcggaaaacggaacgggatgccctcgtattccgccacgcggatggaatcgcgaacgacgtagcgcgcaaactgcgggttggccttcttgaaaaagccgggcacgcgcaccgcgagcggatagaccggccgcaggttcacggccagatcgtagtcttcgacgagtttttgcgtcttgggcagcgccagatagctgtaggggctgcggaaggagaagaagaggtcgacggcgagggtcatcgtgctggctccacaatccgccccatcatgctgcggaccacgagcttgtggaagggcatgatcagcatgagataggtgcggccgagcagattgtgcgtgcgcaccagcgtggttgacgtcacctcgcggtccgccgccgagcctgcgacatcgaccacgatgcgaaaatcgagatggtagtcgttgaaaccagcgaccagccgttcgggcgtttcgctgagcaccggaaacaggccgatcaacccgtgcggcgccggagcgccttcgcccgatgtcctcagtccgaacggtttcaccagaatgttgcgcaggcgcagcagcgcgtcggtccagcgcggcccgtggagcaccatcctggtgcaggcttcgcgggcatcgagcgccgccgcgccgatctccacgcgaaacgcgtcgatgaactgcgcgcctgccagcaccgtttcgacatcgacattgggagtgatttcgcgaactgtcccgttcatgccgccaatctgcgcgcgagcatccggaagcgcaagatcaggagaccggcatagacgaacgtaccgaccgagaatccgatccagacaccgatcgcgcccaaccttgtgtggaacgccagcacccagccgatcggaaaggcgatgcaccaatagccgatcgccgcgaacagcaatgtcatcctggtgtcgttgatgccgcgcagcgcgccgcccatgatggtctggaggccgtcggcgatgaagaagctggcgccgaccagcagcagagtcccggtcagttcgaccgtcgccgcgctttcggcgccgccgccgaaaaacagccggccgagctggtagcggccgattatgatggcgatggtcagcgctgagaccagcgcgaggccgagcacggcagcgaccagccccgcgcgcttcactgccgccggatcattgcggccgaaggcatggccaacccgcaccgtcgctgccatgccgatgccgagcggcaccatgaacagcaccgccgtgacctggagcgcgatctggtgcgcggcaatcgcagtggtcgagatcaatcccatcagcagcgccgccgaggagaacaggccgtattccagcagcagcgagaacgagatcggcgcgccgatcgcaatgagctggcgcatcaagggccagtcgatccgccacaggcgcgcgagcggatggtaatccgcaaacggctcgcgcagcgccgcgatcgcgagcgcggcgaggaaggtgccgagattgaccagcgtggtcgcgagtcctgcgccgaacagcccgagctccggcaggccgaacaggccgtggatcagggcatagaccagcgcggcattgatcgggatcgccgccacggtgatccataggggcgcctgtggccggttcaccgcgctcatcatgccgcgcagcgcgatgaagccgagcgccggcgcgacgccccaggcgaggccgttcaggtagcgctgcgccagcgccgccgattgcggcgcctggccgagcgcgagcaggatctgctcgccgtagagcggcgaggccatcatcggcagcgagatcaggagcgcaacccacaggccgacgcgcaaggagcggcggatcagcctgacgtcgccggcaccgaacgcctgcgcggccagcggggacaccgcggacgtcaatccgagcccgaaggtgaagctgacgaaatagaccgtatgggccagcgccgcagcggccacggcgtcctcgccgagccggccgatcatcgccaggtcggtggtgatcattgcgatctgcccgagctgcgtcagcatcaacggcacggcgaggcgcagcgtctcggccaactcctcggcgagatggttcggcggtgcatccgagcgtgcgtggcccggctgttcggtgtccagaagttcagtcatggcaaggccatagcagcctcgatcggcgaagtaacggcaaagaagcgtgagggcgggtcttgccaaaaaaagtgcgtgcgcaggcgaaggaaagttcggcttggaccgtattcctcatgtgcgcgtccggcgccggtctcacatgggggaagccgagcatgacaacgagattcagaatgacgttcgccgcgctgctcatcgggtctgccctcacgggcgccggcgccgctgcagcggccgacctgaggttgcccgcatcgccgcccccgcaagcccaggccgcatctgcggccctcttgagctgggcggggccctatctcggcgtgcaggccggctacctgtcgggccgcactgagacctcgtttcccgccaccggggaatttcacttcgtcgatcccaagggggcgaccgtaggtgcaacggcaggcttctccgcgcaatggggccgtatcgtcgccggtatcgagggcgacgtgaactttgtcgatgcgcgggcgacggtcgacaccggctttgccccgaccccttccgtcacccagcttcagtccgcggtcaattggaatagccatctgcgtggacgcgtcggctacgccttcggccggacgatgctgtttgccagcgggggcctcgccgttgcgggggtcgaaagcaaagcgttcgacaatgcgagcggggcggtcgccaactggaccgatacccgtgtcggctggtcgatcggagcaggcagtgaattccgcttcgcaccgaacgcgtccgcccggctcgaatatctctatgacaattacggctcaagaaccctcggaagccagacggttggagccgtcagtttcaccgaacgcgcgtccaggctcgatacccataccgttcgagcaggcgtctactggcgcttttgacccgttgtcgcgacttgttgccgcggatgatgcaattgaggcggtgccgcattccggagatgcggcatatcctcatgaccgggaccggctcgtaccgcatagccatcatggccgcagtccaaggcaccagatcgagatgatggaagaaccatcggacgagaccttgatgtcggaggtttcggcgcagcggcagcacgcgtttcgcatcctgatgcggcgtcacatgccccgcgcgctgcgggtcgcggagcggatcgttcgcgatccggccgaggccgatgacatcggccaggaggcgttcatgcgtgtctggaccaacgcggcctcgttcgatccgaaggtcgcgaaattcacgacctggctctaccgcatcgtcctcaacctgaccttcgaccgcacgcggcgccgaacgtttgagcctctcgaagaggccggcgaggtacctgacaccgggccgcatgccgtcgagcggctgatcgccgacgaggagctcagccttctcaaccgcgcgatggccggcctgtcggaccggcagcgcggcgcgatcgcgctcttccacatggaggggctgagcggcgaggaggcggcgaaggcgatgaatctcagcgccaaggcgttcgaatcgctgctgggccgcgcccgcctggcgctgaaggcaaatgttcgaaaaatacaggacacggggagctacgcatgacgcccgatcagttcagggaattggccgagacatggggaggcgacgtcgagcgctggccggcggcaacgcgcgaggccgcgcggcgatttgcggcgagcgcggaaggcgccgccgtgctggctgagcaggagcgcctcgaccgcctgctcgctgtcgccccggagatcgagacgacgcgggcggaccgttcgagctttcttgtcctgcagaggctcgccgccgtcccgccgcagcgtcggccggcatggcatcagcgcctgttgcgctggccggcgctcgttcccgccgcaagtctcgcctgctcggtgatggtgggcgtgtggctggcgggagcgatgccctatgcccacgcgccgtcggacgtcttgtccgtcatgagcggcgtcttcgacgtctacgcaatcggctatggatcggtgccatgaagttctggcgagaatggtccactccctggcgtgcgctcatgctgctgtcgctgtgcgccaacgtcgtccttttcacctatgtctcggtgcaatggctgctgcccggcggcttcaggcccggcgcgggcgtgccgatccgcatgatcgagcgtgtcgccgagagattgccggcagaagacgcagagatcctgtggagcatctatcgcggcaaggaggccgagctgctgccgctgcagtccgaataccggctcgcgctgatcaaggccatgaagacggcggcacagacgaacctggacaaggcggaactggaagcggccgtgaaggatgcccgcgacaagcgggtgaagataggcgacctcgtcgtcgcaaccttcgtcgaaatgctggaacgaatttcaccgaaaggacgccgccaactcgtcggcggctattttcgctgagccgcgcagagtgaacgagggattcggtccgtccagacgtatcacctacatcgatgtctgcgaattggtggagatgatatggtgcaacgatttggcaggacggcaagcgggacggtagtgagcttctcgcggcgtacggccgtctatgtgcgtgcggctctcgcggccgcgagcttgatcgcccttctcgtgctgttcctctcgcaagcttccgcggaggacgcacggaacgaagcgaagcaggcctgcaaggcggattattcgcgcctctgcgcgggaacgatgcccggtggcggccgcattcgcaaatgcctcagcgacaattacggcggcttgtcggcagcctgcaaacaggccctcgatgcacgcccgccgaaataggatgggctaagtccgtgccggcacgcgcttgatcttcgcaccaagcgcgttcagccgctcctcgatgcgctcatagccgcgctcgatctggtcggcgttgttgatggtcgaggtgccctcggcgcagaccgccgcgagcagcatcgccatgccggcgcggatgtccggcgaggtcatggtcgcgccgtgcaggcggctcggcccggcgatgatggcgcggtgcgggtcgcacagcacgatccgcgcgcccatcgcgatcagcttgtcgacgaagaacatcctggattcgaacatcttctcgaacatcaggatcaccccctcgcattgcgtggcggtgacgatcgcgatcgacatcagatcggccgggaaggccggccagggctggtcctcgagcttcggcacatggccgccgaaatcgtcctgaatcttcagcgtctggttcgagggcacgatgaggtcgtcgccttcgacgcggcagatgatgccgagccgctcgaaacccattcggatcgagcgcagatgctcgacgccggcgcgcgtgatgcgcagcggcgatcgcgtcacggcggcgagtccgatcagcgagccgacctcgatgtgatcgggctgaatcctgtaggtcgcctctcccagcgtcgccggcccgtgcacgatcatggtgttggtgccgatgccttcgattctggcgccgagcgcgaccaggaaattggcaaggtcctgcacatgcggttcggaggccgcgttgcgcaaataggtgacgccgtcggcggcgaccgccgcgaccagtgcattctcggttgcggtgacgctcggctcgtccaggaacacgtcggctcccgcaagcttgggcgcgcggaattcgagccggtcggtcgcggtgacctttgcccccagctgctccagtgccagcacatgcgtatccaatcggcgacggccgatgacgtcgccgccgggcggcggcagcatcacctcgccgcagcgcgcgagcagggggcctgcgagcaggatggaggcgcggatgcgcacgcacagctctgggtcgaggtcggccgcgcggatgctcttggcatggatctgcagcgtattgcgggcactccattccgccgacgcaccgaccgagcggaccagctcgaccagcgtctcggtgtcgcggatgcgcggcacgttctccagcgtgaccggatgctccgtgagcagcgcggcggcgatgatcggcagcgccgaattcttgttgccggacggttcgatcgagcccgagagccggtgaccgccctcgacgatgtattggatgggcgccacgtggttctcgctgtcctgttgctgggcggctattcgggcggaaactacagagaatcgagcgcgggagcaattggagcgggcggtggttcgtggcctgttcgcgagcccaggcgaggctactgatcctttggtgaggagggcggaacgcgcgccgcgaacgatgcaggctccccgcggccatcccttcgagacgcacgctttcgcggtcccctcaggatgaggccgcgagcttgtggcaggcggccctcaaaacagcccgatgatattcccgatcacatagaggagcgcgatcaggatcagcgcgccgatcatgaagaaggagatttcgatcgcgatggcgccggtgccgagcgcggcggcgacggcggcgagaagccgttcttcccggaagatcagcgagagcaccgaaagtaggatggcgagcaggccgagcgagatcgcggtgaccgacgcgatttcactccagcttcgtccaggcgatttgtcggacctgggagcctggtaatccacgcccttcacctttgcgacgatgcggtccttgatgcggtacccggtgtcgacgatcaccttgtccgccgggggcggcgggaacacgatcggcacgacccagtgcggcagcaccgccgccataagcgcgagcacgccgacaatgctgccgatgatgccgaggcggcgtgatggcgcagcggaactgggcgtcgcagaggcgatcatgacgtgaggcttcccggccggaataggccaacgggttcatgccacttcgtcgcgatggcgggtggggaggttcagggcggtgccgcatgaagctggtgcgctccctcccccgcttgcgggggagnnnnnnnnnngtctccgcaacgggacaatcccctacaggagaaagccctcacccgccacgctctgcgagcgtgtcgacctctccggcaagccgaggagaggttgcagcgagtgcttggctagcagatcagacccaagtccatccggcctcagatatcgatcgtcgcgctcagcgagtgttcctggatgaagtcgcggcgcggctcgaccacgtcgcccatcagcttggtaaagatgtcgtcggcctggtcgacctccttgaccttcacctgcaggagcgagcgcgcctcggtgtccaacgtcgtctcccagagctgctccgggttcatctcgccgaggcctttatagcgctgcaacgtgatgcccttgcggcccgcgtcggtgacggcttcgaacagatcggccggtccgtagaccatgtgctcgacatccttgcgccgcagcttgccggggcgggcatacacgtcctggagcttgacggtgtactcgtcgagcttgcgcgcctccgcggatccaaggaaggcatcgtcgataatagcggcttccttgacgccgcgcacggtacgctcgaactggaagccctggccctcggcatactgtccgacccagccgcgctcgacctcctcggcctggttgtccagccggctcgcgatgtattgcgccgcagccgcagccttttcggggtcgccgtagatcgccttgttcagcacaccggtgatggcggcctgctcgatgaccttgcgattgtagcggctgtgcaggttgcgcaagatgctgcggaccacgcgggcatcgtcgaccagcgcccgcaggtcgcggccggtgcgatcgccacccgtgccgggaatgaagacgcagtcgtcgaggccggcgtcgatcagataatcctccagcgcccgctcgtccttcagatattgctcggacttgccgcgtgagaccttatagagcggcggttgggcgatatagagatagccgccgtcgatgatgtcgcgcatctgccggtagaagaaggtgagcagcagcgtgcggatgtgggcgccgtcgacatcggcgtccgtcatcacgatgatcttgtgatagcgcagcttctcgatcgagaactcgtcgctgatgccggtacccagcgcggtgatcagcgtgccgatctgttccgacgacagcatcttgtcgggacggacgcgctcgacgttgaggatcttgccgcgcagcggcagcaccgcctggaattcgcgattgcggccctgcttggcgctgccgcccgccgagtcgccctcgacgatgaacagttcggacttggcgggatccttttcctggcagtcggcgagcttgccgggcagcgaggagaccgacagcggactcttgcgcgtcagctcgcgtgcttttcgcgcagcttcgcgggccgccgccgcctggatcaccttgccgacgatcatcttggcttcggaggggtgctcctcgaaccacgcctgcagcgcttcgttgaggacgttctcgaccacggggcgcacttccgaggacaccagcttgtccttggtctgcgacgagaacttcggatcgggcaccttcaccgagagaacggccgtgaggccttcgcggcagtcgtcgccggtcagcgcgatcttttccttcttggcgttggcctcggcatagccgttgacctggcgcgtcagcgcgccgcggaaaccggccagatgcgtgccgccgtcccgctgcgggatgttgttggtgaagcacagcacgttctcgtggtagctgtcgttccaccacagcgcggcctcgaccccgatgccgttggcttccgcgcgcaccatgatcggcgccggcacgatcgggctcttgttgcggtcgagatatttgacgaactcctcgacgccgccggaatagtgcatctcctcgcgcttctcgaccgcatgccgcatgtcggagagggcgatgtggaccccggaattgaggaaggcgagctcgcgcagccggtgctcgagcgtggcaaaatcatactcgatgttcttgaaggtttccgtcgaggccaggaacgtcacctcggtgccgcgcttgcccggggcatcgccgaccaccttcagcggcgccacggaatcgccgtgggcgaactcgatgtagtgttccttgttgtcgcgccagatgcgaagcatcagcttgctcgacagcgcgttgaccacggagacgccgacgccgtgcaggccgccggagaccttgtaggagttctggtcgaactttccgccggcatgcagctgggtcatgatgacctcggccgccgagatgccttcgcccttgtggatgtcgacgggaatgccgcggccatcgtcgcgcacggtgacggaattgtcggcgttgaggatgacgtcgacgcgcgtggcatggcccgcgagcgcttcgtcgatggcgttgtctacgacttcgtagaccatgtggtgcaggcccgagccgtcgtcggtgtcaccgatatacatgcccgggcgcttgcggacggcgtcgagacccttgagcacgcggatcgattccgcgccgtattcgctcgcggtggagggctcgttttcggcaagcggctgccgagcaggttctgtcatgagaggccttcgagatgtcgcccgaatcagcggcgcaaaaggcgctgatttgcagggctgttgtgccacgaaaggtggattgcgcctagcgtaaagtatccgcccgcaaccccttgatcagataggagttttaggccggttttcaaggctttggaaagccgtttctgggcgctgcaaaaagcgcgattcgacggctcgcccgaggcgtcgaaaaacgtggattcagcgcggcggaaaggcaggttccgaagtgcctggggagctgcttcggaccccgctccctcgcccgccggcgggtgagggagtgcacgttgttggtcgcggctcaatacatctgaagcggcagcacgtctccgctcggcccgaccatgaggccccaggcctcgccggcggccacggcgagggtctcggtgcgggccgggtgcccgtccacgcgcagggcgtactggtacttgcctggcggcaggtcgaggatcggccccttcggcgattgcgggccgccggcgccggccgcgatcttcacagtctgcctgttgatcgtcagcgacgcctctttcggtcccatatttccgaacatgagcctggcctggcccggctttggcatcatgtcggccttggccgcagcatccgcgttcttctgcaccagagtgaccgtggtctcgcccttggcgcggccaagcttgagcacggccgggccttgcggcgaggtgaactcgatctgcgcatgctctgcagacgcggccgcgccgttggtcttttcctgccagcccagcttggacagttctgcacggtagaaggcaaggacgtcgtcgagcggcgccgggacgctggcggtcagctcgcggcggagcggcgcatcgctgcccggaatcttcgaagtcccaagcgatttcgacgaacgctgcgtcggtactggaagtggtgattcggagtcgggcttgaggggctcggagggcttggcctgcgcctcggcgctgctcgcagctttggccgcttcggtcaccaggcccgatccgtcggcacggacattcaccttcgggcccatctgcatcacggtcatcgagatcgatttgccgcccttggagaaagccatcaccgccatgttgggctggttgatgaccgagggctgctccttccagcccgagctcttcaacgccgagcgatagaaggtgctgagtgccttcacgctcgaagccgaggagaactccagccggccgttgccgccctcgaagttcacgctttcggcgttctcgggcagcggcaccggcgtcttgctgtcggatagtgcattgagaggcgcatccgacagggaagcggattgtgccttgcgcctgctctcgtcggcggcgatgagctgctgggccgcactcaaggcatcgccgaggaatctcgcgtcggcctccttcttggccctggcgcgggcggcgagcgctgattccttcacctgggcggtcacgttgatcatggtgaaatcatacttgcggccaagccgtagcatgccggtttcctccgccgaggagatcctgaccgcgacctcgtcgccggacgcgagcggggcgttgccgtcctcctgccagccgcgcgccgcgagctcacggcgatagaaggcgagcacggcgggcagctcggccatcgctgcggccgacatctcgcgcttgttggagttcgtgctgccaagtcccctcgcagatctggtcggcttgggtcgcggcaggccggccatgtcgtcatcggcctcgagcacctcgggcaacgcaaacggcgccacccggatttcgacattggtgcgaccgtcctcgcgccgcgtcagtgtcagcatcaccggcttctgcttgtagaattgcgtcgtgtcgccgccgggatgctcgtagaagacgcgcaccccgttcggcactgtctcgccgagatccgcattcggccagcgtgccgccgcttctagcgtcagcttgcgccagccgattgtcgccatctccctggtgaagaaggccgctgtcgcatcgagcgtgccgggcgcgatgcagccgagatagggccgcgtctcgtcgaacacgagttcggtcgcaccgtccggaaacggcacgttggaatagatccggttcggcgtgtaggacacggcggactgatcgggacggccgcgcgtctgcgtgaaggagacgcgcagcccctgccgtcccttcttgaagctcagcgatgtgcttttctcgtccagcgaatagacatagggcacccagccctcggcgctcagcagcttcctggccgcgtcggacgtaacggtcacggcggtcggtacggaatagaccacgcgatggggatcggcgcgcgaagtgtcttccgttgcgccttcgagccgcggcagcttatggacgtcgacgatgccttcgtcggccccgcgcgcgggacctgatgcgcccgccatcgcgagaatgccgcaggcaagcagcagccatcttgccgggacttgcgtcccgcgccggatcatcggcatcgtcgaaactcctggatgttcgcgcgggtcatgccctgcgcattggcgggctgcggcgccgcggcgcgcggcctcagacgaaaagtcgcggcgggaaccggagaggttcaaaaggggcgtccggccagcgccgggcgtggacagaagcgcggctcaggctcaatacagctggagcggcggccacggctcgccgtcgcgccccaccgtgagctcccaggtatcgccggctgcgacgtcaagcatgttcgtgctggctgggcggccgggcacgctcacgccgtaggcgtatctgccgggcggcaggtccagcgcgacggcgttggcgccggcctggcgcgagatggatcgttcgtcgatcgtgagcacggcttccttttcgccgatattgctgaacaccagcttggcccggccgggctcgggcagcacgttcgcgcgcgtcgcgacctccgaattcttctgcacgagctgcaccgccgtgccgccgtccttgcgcgcaagctccagcgccgccggcccgatcggagagacgaaggcgagacgcgcatgatcggtgccgacccatgcgacgtcctgctgctcctgccagccgagctttccaagctcggcacggtagaaggcgaggacgtcaccgagcgttgcgggcacgcgggcttcgagcctggtccggagcggagcttcgatgccgggtatcaccgtggtgtggatccctcgatagctgtagcgggtcggcgcgggcaacctggcatcgggatcgcgcgtgagcgcggccgaaaacagcggcggcagattcgacacgaaggcgccggcgctggccgcaagcaggcagcttgcgaggagcgcaaggccgcacgcaacaagttgccatcgtgccggagcttgcgctccacgccccaccgccgccatgctcatgctccaaggatgtcgcgctgtccgacatccagcgcgatgaccgctgctcgcggcctcaaccagctagtcgcggccgtcaacaagcgggttcaacgcaagggcctatctgcgggccgagactcgtccgctctcgacgtcaaacacttcgccgcccgcgccaatctcggcgaaggcgacagggtccgcaccggtcagccacacctgcgcgccgagcttcttcagctcatcgaacagcgcggcacggcggctcggatcgagatgcgcgaccacctcgtcgagaagcagcagcggcacgatgccggtcatttccgccaccaacgtcgcatgcgccagcacgaggccgatcagcagcgccttctgctcgccggtggaggcatcgcgcgccggcatgcccttcggcgcatagacgacctggaggtcggtgagatgcggaccgtcggtggtgcggccggcaatcgcatcgcgcgggcgattgtcgcgcaggatctggcggtagcggtcctcgaccgaggtcgcggtctccgtcagcagcgcgttctccatccagccgtcgagcgcgatctgggcagatgggaaggcggattgttgcgcgcgcgcgttgagcatgccggtgagacgcgcagcagtctggccgcgcgttgccgcgaccgcgaccgcaagctcggcggtctcgcgctcgatcgcgccgcaccaatggtcgtcgtaattgcgtgtctcgagcaggcggttgcgcgaacgcagggaacgctcgagtgcgttgatccggctggaatgctcgctgtcgatcgcgagaaacaggcggtcgaagaagcgccgccgttccgacgcagcccccatgaacagcccgtccatcgcgggcgtcagccagaccatgcggatatggtcgccgaaggcgctggcggaacctaccggctcgcggtcgatgcggcagcgccggctgaccgcggtatcggcgcgcggggcgtcgatgccggtgccgagcgtcgcgagccccagcgcgccctcgacttgcgcggagacagcccaggagccgtcgccctgattgtcggcgacgtcttccagcgtcgcccgccgcaagccgcgtcccggcgacaggaacgagatcgcctcgatgcaattggtcttgcccgccccgttcggcccgaccagcgccaccatgtcagccgccgtctcgagccccgccgcccgataattgcgaaaatgcgtcagcgtcaggcgatgaatgcgggagggggtcatcagttctttatcatgaacgcgattcttcccctctccccttgtgggagagggtggcgcctcacgaagtgaggcgacgggtgaggggtatcttaccgcgcgccgagctttgcaaggagatcctccaacacagaagcgggctgttgcagcacgtcattgttccagtagcgggcgattgagaaaccttcagcggaaagtgctgcgtctcgaactgcgtcgcgctgcgatccgcgtgctgactgccgtcgatctcgatcacgaggcgtttctcgaagcagacgaaatcgaggatgtagttctcgatcgggacctgtcggcggaatttgtaagccgatagccggcgatccctcagcaatcgccacatagccgcttccgcgtccgtaggctcgtgccgcatgttcttcgcgaactggcgaagatgattggcaatcggccgatgatgcgggtcattcggcatcgggtgttcattctgaaaggtgttggggcgcggtgccttcaccctctccctttgcgggagagggtgccgacgcgaagcggcggcgggtgaggggttgcctccacatagaaggtgccgcgagaggacccctcacccgagtgatgtcttggccgatagcggagatgccctctcccgcagggggagagggcgcatcaacgagcatcgcgttcgattctaaaggcagtctccgccgggaagggaccacgcccctcacacccgcatcggcatcagcacgtagagcgcgctcttgtcgtcgcggtcttgcaccagggtcggcgagccggggtcggcgagcttcaggacggccacgtcgccttcgatctgggcggcgatgtcgagcaggtagcgggagttgaagccgatatcgagggcgtcggaggcgtattcgacctcgagctcttcggtcgcgctgcctgaatccgggttggtcaccgacagcaccagcttgccggccgacagcgacagcttcaccgcgcggccgcgctcgctggagatggtcgagacgcgatcgaccgcgttctcgaaatccttcttgtcgacgacgagctccttgtcgttgttctgcgggatgacgcggccgtaatcggggaaggtgccgtcgatcagtttcgaggtcagcacgacgttgccgatcgtgaagcggatcttggcctgcgacagctcgatcgtcatctctgcctcggtgtcctcgatcaggcgctgcacctcgccgacggtcttgcgcggcacgatcacgccgggcatgccctcggcgcccttgggctgcaccaggtcgagctgggcgaggcggtgaccatcggtcgcgacgccgcgcagggttgcggccttgggcgtgccggcggcgtgcagatagatgccgttgaggtagtagcgcgtctcctcggtcgagatcgcgaactgggtacggtcgatcagccgcttgacgtccttggcggcgagcgagaacgaatgcgacatgtcgccggcggccaggtccgggaaatcgttctctggcagcgtctgcagggtgaagcgcgagcggccggcacggatcgccagcaccgcgcggtcgccgtccgcctccagcacgatctgggatccgtcgggcagcttgcgcacgatgtcgtagaacatgtgcgccggcacggtggtggagccggccgtcgcggtttccgccggcagcgtctccgtcacctcgaggtcgaggtcggtcgccttcagcgacagtttcgcgttctcggcgcgcaccagcacgttgccgaggatcgggatcgtgttgcggcgctcgaccacgcggtggacatggcccagcgacttcaacagttgcgcgcgttcgaccgtaaccttcattgcactactcgcccgatccccaaggaaaacacagcgttgagaaggccgggcggcgggacgcgcgccacggcaccgaagaccccgaccaagccggatcatccagccgatatgaccaaagctgtcagggccgcacaaggtggcccggatggcccacggattcaagggatggagggcagttcccccacgatttaccgcccggaacgaagaccgccgcccgggcaagccggagcggcgggagaatggcggaagcctgggcctttattcctgaagctggcgcttcagcgactccacttcctcggagagcgcggtatccttggagaccagtgcctcgatcttgcgcaccgcatgcagcacggtggtgtgatcgcgtccgccgaagcggcggccgatctccggcagcgagcgcagtgtcagcgtcttggcgagatacatcgccacctggcgcgggcggaccacgttggcggtgcggcgcgaggagagcaggtcggagcggctcacattatactgccgcgccaccacgcgctggatgtcctcgatcttgatccgcttgggctcctgcggccggaccaggtcgcggacctcgtgctccgccatttcaagcgtcaccgggcggttgttgagcttggaatgcgcgagcagacggttgatcgcgccttcgaggtcgcggccgttatgggtgatggtgcgcgccagataaagcagcacctcctcgggcacctcgaacgtcgcatgatgggcgcgggccgctgcgacgcgcgacttgagaatgccgtggcgcagctcctcgccgagcgagcccatctcgaccacgagcccgcccgcgagccgcgagcgcacgcgatcgtcgaggctttcgagatcggacggcggacggtcggctgcgatcacgacctggcggccggcgtcgatcagcgcattcagcgtgtggcagaactcggcctgggtcgacttgccctgcaggaactggagatcgtcgatcacgagcacgtcgatgccgcgcaacgcttccttgaacgccagcgcggtctgcgtcttcagcgcagcgacgaagccgtacatgaatttttcggccgtgagataaagcaccttgcgctcgctgccggaattgccggcccaggtcaccgcctggagcagatgcgtcttgccgaggccgacgccggcatggatgtagagcgggttgaacatgacgggatcgccgcggcgcccttcggcgacctggcgggctgcggcatgcgccagcgtgttggagcggccgacgacgaagctcgcgaaggtcaggcgcggatcgagcggcgagccgccgagcgcgtcgtggttggccgagaccggcgcggtcgcggtcgagcgcaattccggcgtcggcgcgcggcgtgcttcgatcggcgccggcgtttccttcggctgcgcggccgggcgcacggcggatcggaccgtcaggtcgatgcgatgcacctccggcatctcggcctgccagcacgacagcacgcgctcggcataatgggcctggatccagctcttcaggaaccgcgtcggtaccgagagccgcacgctctcgtcctgcacgccttccagatccatgcgtgcaaaccagctcgtgtacacgtcctcgccaacgctcgagcgcagccgacccttcacgcgtgaccagcgatcctgttccattgtcatcgtcagaaaacttctcttgagagatatagttgcgttgtgagcgccatgcagggtccctgccacggccctgaactggcgcgacctcgagcgattccatcgtctggcatggctcgaccgttcggcgcgagcgccgcgggtcaaatcagcgatgtcggagatggaggggtcgcgaggtcagcgcgtactcggcgctccgtcgcacgcgggaggctggagatcagacggagctggaacggcatcgttggaataggaaacgtgcttcaataccgcgttgagtccgtaagacatgatacctccccgtcctgccgtgatcactcacgacaaggtcctgcgtgtcctgaagacaaccgcgccgtactcctgtcgcggatgcctgcccaatgtactagtcgtccgctcggcttcgccgccttgcgtgccggggtagcgttgcgatgtctctcctgtgcgcgcttggcgcgagcgggaagatcccgcttggagacattcagacaaagagctaccattcccatattgctatgggttttgaaccgccatcgcttgttgaagcgtcgcctacgtgcacaccgccgccgatttgcacgctcgccccgtttcctaaaccgcgctggtctgaagatcgtgggcgccgctgacgacctaaggaatacactaagcggaaagactcgcaacgaattgattcactgttgagccaccaaaaaaacttgacgtcggttaacgccgcgcgcgagttgttcacaggccgcaaggtatgtttttgaatccgtgcacagaatcgagaaggccgcgcatcgtgtgacaattctcagtcaccgccgactttttttcaaaaaaccgtcacgcgcccgacgtgcggacgtattttccaagtgcttgtcgctgctatgttgataagtgattattgagtcatcggttttcgagactcgttttgcagggtaactccagcgccacacgcgttccggtgaattcacggtgtgcagaactctcgtcggccgccgcttcaattcgagctcgcagcacaggggttttgcaacgcagtgaagtttccactgttgcagaatgtcggcaggtagaagtacggaagaagaataacgcagcaaatcgcccaagcgagcatcaggcctggcgcgactgcttgcctgcatatgacagtcaacaaaaaagcccggcgcgatgccgggctatttgacgcgctgaccggatcgaccgatcagatgagagccgcgagatgatttggcgaaatcacttcgcgagcttggcgatctgcgcggtgaggcgcgagactttgcggctggcgttgttcttgtgaatgatgttgcgctgggcggcgcgcatcaaggcgggttcggcagtcgcgagtgccttcacggcagcggcgcgatcgccgctcttgatggcttcctcgacggtgcgcacggcaccgcgcatctgggtgcggcgcgacttgttgacggcggtgcggcgggcgatcttgcgcgtcgccttcttggcggaagtggtattggccatggtctcaatgtcctttgcgggtaccggtcgcgtcttggtcgggtagcgccggcttgcttgaccgcgtaatcgacgctcggatttagggtgttcggttgctgggccgttcccggaacatgagcgacggccttgcggctgtctctgaggctccaaagagtttcaagcccaagagagtcttgaagctcaaggcgcctgcaactgctcaaagaacagcggcggcaggattgcgcccaccgccagtcggcgcccttatagtcagggtcttcggcaccgtcaacgctttcgggagctggaaatcctgcctttggcggcttggcgcgcgccctaacgccctgaagaggttgaatttctgccgtcgcccggttattggctggcaacgttccgaaaaggttgtccgatcggacgaccatcgcaggtgaggcatgatccgcggctttttccgactgattgggctcttgctgctcgccggcgggttcatcttcatggtctatgatggcgcccgctgggtggccgaccagaccctccagttcacccggttcggccagttctggaacgacatcaatcaggccagccaggcggcattccgcacctgggtcgaggccaaggcgccctggctatggacctcggtgatccgcctcgtgctggatcagccggtcttcgccgtcctaggcattctcggcatcctgctgatgatcctgttccggccgcgcaagccgttgatcggctattcccgggattgatcttcaattccgccgggattgatctcaatctatcgccgggactgagccctccgagctggcagccgcgtaacacggctgccccttgctgcgtagatgcctatattcccacctgatcgcgagcgcgccgcctgagtgtctggctcacgcgacggacagctcgtctcggagatccgtcatgctgttcatgcgcaagaccaccgcattgccgagcgcaaccgaagcgctgccgggccgtgcacaggccatccccaccgcgaccacccatttcgtcaacggcgccaagctcaagccgcctcatccggccggtctcgagcaggcggtgttcgggctcggctgcttctggggcgccgagcgcaagttctgggagcttggtgacggcgtccacgtgactgccgtcggctacgccggcggtcacacgccgaacccgacctatgaggaagtctgctcgggccgcaccgctcataccgaagtggtgctggtcgtgttcgatccgaataagatctcctacgacaagctcctgaagacgttctgggagagccacaatccgacgcagggcatgcgtcagggcaacgatatcggaacgcaatatcgaagcgcgatctacacctattcagatgcacagaagaaagcggccgaggaatccaaggcgctctaccagaaggcgcttgctgcaaaaggccttggtgccatcacgaccgatatcgcgcccgcaggcgcgttctacttcgccgaggactatcaccagcaatatctggcgaagaatccggccggctattgcggcctgggcggcaccggtgtgtcctgcccgattggcgtcggtgtgagcgcgtaagtcggctccgggctcgccgcacctctcccgcttgcgggagaggtcgcatcgcatcgtgagatgcaatgcgggtgagggttctttcctccaggggatagtccctttggggagatgatcttcccccgataaagtggacgggtt

SEQ ID NO: 157 - DNA, 68407 bp, Bradyrhizobium colbertium
  misc_feature (32815)..(32824): n is a, c, g, or t
agcctccaatcgtttccacacagcctgacactggccgggtttttcgtttgcggtgcgggcttggcttatctcgccacgcgcagcttggaaatctgcgtcaggatattcttgaacgcgtccgaggtctgagaggcgctcgtgatcatctggaagttcccattggtcgcgcaatcctgcagcacctgagatttcgcgtccgcattgttgatgttgacctggatcgtgaagatcgtgaccgggtttgccgtgtcggctttgatgttctggcagaggatcgcctggcgggcgtcgatgctggactggctcgtgctccaacggttctgggtattcaagccgtcggacagcagcacaatgtagtccttgtagacgtagttgctggccttgctcggcgccgagatcggctgattggtcgtgctgatagattgccatccccacgcaagaccaatggcctggttggtattgccgctcggtaccatcgccgtgatctggtccttgagcgtctgccactggttgctcatcggaaacacggtggccggcaggcagcctgaccattgctcagcatagaactgcgacgagggggtcccgccgcccgagccgggggccgagttcttggtgtcgtagtcctgatcgcgatcgttgacacagccggtccaggtgctgcggtctggcgctgccgccgccgtcgccgccgtgccgtcgccgcgccagagatggcagatcttgcccgagccgctgcctgtgcaggtgcaactcgtgctcgatccgcagcttgcgcccgacccggtggcggtggtgtagcaaccattgtagtagatgccggctttgcctgcccgcttgttgccgctgtctacgctgggacagatatatccagcgtacgtgccggtcgacggtatcttaccgtacggcgcagccttggcgccgggcagggtcgctggtcggtccatgcaggtgaagccgtgggtgctcttcgtgaaggggcaatccgacccgccgaccgctgaattgaaggcgctcgacttattgttcaccaggatcggaggctcggcctcccattcggtccagttgatccaggacgcacctacattggtcgtgccgacgttgacgtccttcgagaatggaatgatggaaatgtaaacgtcgcccgtctgcttgttgtagttcgacagggtgtcgatcatgtccttcgccgcggcttgcattgccgccattttgccgttttgggccatcgatcccgtattatccaggaccatcgccacccgcatgcgggtgtttccccatgccgcagtcgagctcacgttgtatcctaacttcggaaaccccgcgatcttcatgaaatcggtaggcatggtgcccgatcctgtgaccacgatattggatattccgctggagtccttcggcgtgtagctggcatggatatctgcggtcgaaaccgtgccggtgcggcccgtgtagaggccgctgaaataggactttgtcttctcttcgatctgggattccgagatgacgccgttggtcaggtccttggaaaccatcaacgccgccgagtcgagcgcaacctgcagcgaggtacgggcttggacgacgcggctgtaatccaccgcggcgccgacgaaacccagcaccgggaccagcgctatggcgaagatgacggcgatattgccttgctcggccgctgcaaagcgggcgagttgtcgaccaaggcggctgacgaggggcaggcgagacatgacgatccccgaaatctgtgctttgcctgatttcggggcatgcctttgaacgtcaggtaaattgaaccgtagaaatccggggccatcgcgggaaaactgtcgcaggccagttaatacccgggttcctggtcaacacgttctaaacacgagagctggaattttttgtcaaatcggtccggattgattaacctgagggggatcgcccggaccgggaatcgggctgccgccgccgcatcggcccagccttcgcgtgcttgcggccagcctgaggcgggcccatattgctggcgaacaatccggcttggccggattatcgggagcggcgatccaacaaagcggcgcgcctgcgcaaggcccaaagggcgggctgcgcggtcgccgccattcgcttccgtggggaatttgaacgcctgtgccatgccgcaattgactttcagtattgatctgcccgcgccagccgctgccgacgctcctcgcatgagcaatgacgagaaccgttcgggcaacccttcaggtccgaacacctcggtgatcaccaaggtcaagccgaagaccaagcgcccgaacctgtaccgtgtgctgatcctgaacgacgactacacaccgatggagttcgtcgtgcacgtgctggagaagttcttcaacaaggatgtcgaagccgcgaccaagatcatgctccacgtccatcatcacggcatcggcgagtgcggcgtgttcacctacgagatcgccgagaccaaggtgacgcaggtgatggatttcgcccgcaagcaccagcatccgctgcaatgcgtgatggaaaagaaataggacgcctgcgacggcgcgttggtcgaaccccgctctcgtgcgagtcgcgtgtgatcgtcgcgtgaggccccccgcgcgaaagccctcggccggcaaactacggaattttacgccggtgccgcttccgcctaaatcggaacgggttttgcatcgaaaataccgcaggtgtgtcgccgccgagtcgcggaaccggtctttcgccgcgatcttgtataactatatgtgacaaaggttgttgttgcctgaccgggcgatcacgaccatgatggtgggggccatagaggacgcgaatgccgactttttcccaaagccttgaacaatccctgcatcgtgcgctggcgatcgcaaatgagcgtcatcaccaatacgcgacgctcgagcatctcttgctctctctgatcgacgactccgatgcagccgccgtcatgcgcgcctgtagcgtcgatctcgacaagctccgtacgagcctcgtcaactatctcgaaacggaattcgagaacctggtgacggatggtgccgacgacgccaagccgaccgccgggtttcagcgcgtgatccagcgcgcggtgatccacgtgcagtcgtccggtcgcgaagaggtgaccggcgccaacgtgctgatcgcgatcttcgccgaacgcgaaagtcatgcggcgtatttcctgcaggagcaggacatgacgcgctacgacgcggtcaattacatcagccacggcattgccaagcggccgggcgtatccgaggcgcgacccgtgcgcggcgtcgacgaggagacggagaccaagggcaacgaggacgccaagaagaagggcgaggcgctcgagacctattgcgtcaacctgaacaagaaggcgcgcgacggcaagatcgacccggttatcggacgcaattccgagatcaaccgcgccatccaggtgctgtgccgccggcagaagaacaatccgctgttcgtgggcgaagccggtgtcggcaagaccgcgatcgcagaaggcctcgccaagcgcatcgttgacagcgaggtgccggaggtgctcgcggctgccactgtgttctcgcttgacatgggcacgctgctcgcgggcacgcgctatcgcggcgatttcgaagagcgcttgaagcaggtgctgaaggaactcgaggcgcatcccaacgccatcctgttcatcgacgagattcataccgtgattggtgcgggtgcgacgtcgggcggggcgatggatgcctcgaacctgctcaagccggcgctggcctcgggcacgatccgctgcatgggctcgacgacctacaaggaataccgccagcacttcgagaaggaccgcgcgctggtgcggcgcttccagaagatcgacatcaacgagccgacggtcgaggacgccatcgcgatcctcaagggtctcaagccgtacttcgaagactatcatcggctgaagtacaccaacgaggcgatcgaggctgcggtgcagctttcctctcgctacatccacgaccgcaagctgccggacaaggcgatcgacgtgatcgacgagtcgggcgcggcgcagatgctggtggccgaaaacaagcgcaagaagaccatcggcatcaaggagatcgagaccacgatcgcctcgatggcgcggatcccgccgaagagcgtgtcgaaggacgatgccgaggtgctcaagcatctcgagcagaccctgaagcgcacggtgttcggccaggacagggcgatcgagtcgctcgcggcctcgatcaagctggcgcgtgccggcctgcgcgagcccgagaagccgatcggctgctacctgttctcgggtccgaccggcgttggcaagaccgaggtcgccaagcagctcgcggcgacgctcggagtcgagctcctgcgcttcgacatgtccgagtatatggagcggcacaccgtgtcgcgcctgatcggcgcgcctcccggctacgtcggcttcgaccagggcggcctgctcaccgacggcgtcgaccagcatccgcattgcgtggtgctcttggacgagatcgagaaggcgcatccggacctctacaacgtgctgctccagatcatggatcacggacggctcaccgaccacaacggcaagcaggtcaacttccgtaacgtgatcctgatcatgaccacgaacgcaggtgcggcggatctcgccaagcaggcgtttggcttcacgcgcacgaagcgggaaggcgacgaccacgaggcgatcaaccggcagttcgcgccggaattccgcaaccgtctcgatgccatcgtctcgttcggccatctcagcgtcgaagtgatcggaaccgtcgtcgagaagttcgtgcttcagctggaggcgcaactcggcgatcgtgacgtcaccatcgaactgtcggagccagccaaggcctggctggtccagcacggctacgacgagcagatgggcgcacgtccgatggcccgcgtcatccaggagcacatcaagaagccgctggccgacgaggtgttgttcggcaagctcaagggcggcggccacgtccgcgtcgttctcgtcaaggatgaggccgacgagaccaaggagaagatcggcttcgagttcgtcgaaggtccggttacgccgaagcaggagaagctccccggcgcccgcaagcgcccgtcgggcaagtcgaagccgggaggtcccggcggctcgaaggggccgacctccaaggggccgctggtcaaggcctgatctgcaagggtgacaaatcgaaaaggccggctgagagccggcctttttttgcttgcgccgatggctgcgccaggaggccttacgttccggcctgcggttcgcgcggcggccgcggcttccgcggtgcgcgcggtgctgcgtgggggaccgacggctgcatcgtcacgatgaccggattcggcttgtgatcggttgctgcgcccgtcgcggcatcgacccccatgccgatgaggccgcctgcgaggaggttgccggcgaagccggcggctccggtgccagacacttccttggtgagttgcaccttttgcgactggtagccttccttctcgaaagtgatcgtaatgtcggcgctgcgcttggcgacgatggcgcatggcgtggtgcaggtggtgggcacctcgagcccgctcaccacggcttccacgcctgacggtgtcgatgcgatactgatgttctcggtcgtgccgcgcgtgaccgacgcgcagccgcccagcatgacgctgagcgccacaattccaaatgaacgcatgaaatgccccttgtcccggccacactcaagcgcaaccggagcgcgagggcaataggtcgtaggtcccgatagttaaatctcgcagcggttgtgcacggaactgggataacctggacgtggctcccgctagtctccccgcagacgctggtcgtcctgcacgcgaacgtgctcggccccccgtgcgcccgcaggagatagccgcagcatgctcagcaccgcgccgcagagcgcaaagccgacgccggcgaggagtgccagcctggtcccctcaaccggataccttccgagcagcagcgctaccagggctgctcccgtggtctggccgagcaggcgcgccgtccccagcatgccgctggcgccgccggcgcgctcgcgcggcgcggccgcgatcatggtgcggttgtttggcgtctgaaacaggccgaagccggcaccggccaacgccatccgccagatcacgtcgaatggcgtggggcttgcgggcaggaaggcgagcgcggcgaggccgcaggcgaacagcgtgagcccgatgccgcccagcagcccggccggataatgctcgaccaggcggccggccaggggcgccgcgaacgccaccgcgattggccatggcgtgatcaagaggcccatatgcaccgccgaatagccgaagcggctctggagatagaaggggattgcgacgaaggcgagcatctgcccgcagaacgatgcaatcgaggtggcaatcgacaatgcgaacacgggaatgcgcagcagatcgagcggcaggagcggcgaggtcatgtgagtctcgcgatagatcagcagcgcacccgcgacgagagcgattgcgaactgcacgagccaggtgatcgcaggcgcgccatggccgacgctgtcgattgcggcgatgccgacgccgaacgtgatcgccgacaggcccgcactttgccagtcaaagcgacggctggccggtttggtgtgcggcaggctgcgcaggcccagcaccagcgtcgctgcaccgagcggcacgttgatggcaaacagccatggccagcttccgacggcgaggatgccggcggcgagcgtcggtccgaccgcagccgaaaaggcgacgacgagagcgttgagcccgatgccgcggccgagctggctgcggggataggtgaaacgcaccagcgccgcattgacgctcatgatgcccgcagcgccaaaaccttggatgacgcgtgcgaaggtcagcatcggcagcgtatctgccagtgcgcagaaggcggatgccagcgtgaagagcaccagcccgaccagatagacgcggcgataaccaacgacctcgccgagcgaagccagcggcagcagcgcgatcgtgatcgcgagctggtagccgttgacgatccagatggagaaggccgggcttgcatccaggtcggccgcgatggtcggcagcgcaacattggcgatggcgctgtcgaccaccgccatgatgatgccgagcgcaatggtcagcaccgcccagttgcgctgcggctgcggaagtccgtcggcatgctcgatcggtgcggacgacatcgaaggcgtgttcggttgagatgcggttgctggtccgcaacttggcccgagccgggaaggttccagcctgagccatagccatctccgccctatttcggcttccgcagctcctgaatcgccctgagatagctcaccacgccctcggcgtcgtcgcggccgaaccgcgccgtcggcatgaagcggtgaatgctgctgtagccgtcctgcaggcgttgcaagaaatcggggtcgtagagtttgttctcgccgaggttccggaaaggcggtgccagttcgttcgggctggtgcccgacctgccgaccgcatggcactgcgcgcacatctgctgcagcaacgcctcagcgcgccgctgttcggcgtccagagcttgactactggtgctccagagaacgccgaccgctagcagcgccggtgcgaggcaattcatcgttcttgtccatcgttctggcgctagcatcccgttgcccgaacgctcacctcttcatagagcacagtgaacagaaccttcgtggcaaatcggcgcatcgcgagactctcgagcgcgcagcgtgccagagccgattcaagcgggcttgacgcagctcaacacatcttacaccgccggcggattgcgctcggtgaaagtcacgcgctggtgccaataggggtaaggcagcgtcaccttgctcgcggcgtcgagctttgcgatctggtccttggtcaacgaccagccgactgcgccgagattttcgcgcagctgggtctcgttgcgcgcgccgatgatcagcgtcgagactgtggggcgctggagcagccagttcagcgcgatctgcgagacgctcttgcccgtttccttcgcgatttcatcgatggcgtcgacgacctgatagacatgctcgtccggcacgggcgggccgaactcggccgtcttgggcagtcggctgacttccggcttcggctggccacggcgaatcttcccggtgaggcggccccatccgagcggcgaccagaccactgcacccaagccttggtcgagcccgagcggcatcagctcccattcgtagtcgcgtccgatcagcgagtagtacgtctggttggcgacgtagcgcggaaaaccgtgcctgtccgcgacggccagcgacttcatcaggtgccagcccgagaaattcgagacgccgacatagcgaaccttgccggcacggacgagcacgtcgagggtggcgagcacctcttcaggcggggtgaacgcgtcgaagccatggagctggaacagatcaatgtagtcggtgccgagccggctcaacgacccatcgacggcagccagcagatgttggcgtgacgagccaatgtcgttcggaccgtcgccgaagcggaacgtcgccttggtggaaatcagaaccttgtcgcggcgccccttgatggcttgcccgagcacccgctcggattcgccgagcgagtagacgttcgcggtgtcgaacatcgacacgccggcctcgaggcagatgtccagaaggcgccgcgcctcggtcgcgtccgtagccccccacgcggcgaggcggccgacgccgccgaaggtgccggttccaagactcaaagcaggcaccatcaggcccgaacggcccaggcgtcggtgttccattgatctgctccacggctgaacgactggctgctgcacgctgttctgatgccggatggtagcgcaggccttcagcccggactattgcgcactcacatggcggccctgcgttgcgccgtcttgttacgccgttgtgctcggcgagcgagcacccgtggtcgtcaccgcatccagacctcagcgagaaaggtcatcaaggagccggagcacgtccaccgacgcctcttcgacgagcgagatctccctgagggctccggcaaggtcgccgtctgcgaagagcttcgcggcccgttttccgtggtcgtgaacgagggcgtgcggcttctcgagcggtccgaatgcccggtgattgcgcatcgccagagagccatcgccgtagtaccatttgcccaatcggcaggaatgatgatcggcaagttcgtcggccttgagcgttgcgcggccgattgccatgtctgcgaggcgcttcttccagatgacgtggtccgccttggcgagccggggaatcttgttgtcgaaggacaggccggaaatgccctgaagttgttttccagcgattccctgggcgacgtcgagctgcgacgaaatcttcttgatctgctcgacgttcgccagcgtcatctgggcgatcgcggcgatgccctcggccacttcccgggaggcatcggtttgctgattgaggatgctggcgatctcgtccatgccgccggtcagggtgattgtccgattttcgacgttggacatctcctcgcccaactgcgtgacgacgcccttgctctcggcagccgccgacttgcaatcggacatggcggtcacgatcaagtcgacttcgtctctcaggcgctggatccgctcgcggatgtcttccgtcgccctgccggtctgctgcgacagtcccttgacctcggatgcgaccacggcaaagccgcgtccggcttctccagcgcgtgcggcttcgatcgttgcattcagcgccaagagattggtctgcctggcgatcgcatcgatcgaccctacgatggcgccaatttcttcggacgccgcactgagtgccaggaccttgtccgacgcgtcgttcgcagtcgcctcgacccgctccatcgccttggatgcgagccggaccgtggacattccctgttctgcgccagctctcatttgcgcggcgtttgcagctgcatcttctgcgttcgatctgatctgtcccaccgaagcgaccatctcctcgctggcggcggcgagcgcctgcgtacgctggtcgacatcccggcaagcggtgagcattcgggctgcggagatcgcggtttcattgctctggacgttgatatcgacgatggcgtccagcttgttcgacgcgtcttcggccaatctggccgcgagatttgcgacggccttggacaggcggtcttctcccttgcagccaggcgcgagaaaattgccctcggtcaaggcctcgatatactctgccagagcctcgtcacgggcttgcagcatcgtcaactggtccggcgctgtgagagatccctccagagcaacgatcgaacgtttgcgattggcgctggagaacatggacatgcggctttccgacgaagcttggtagagaggcccgaagtcaatttaggcactgatactaaacagctggtaagctttcctatcggaattctgcaaacggctggcgtttggctgcgttgttgcccgagagatgcgtggcgcactacgccacggcatctgccatcgtaccgaggtcgccagggcacctcctgacggatctcagtgccgcaactggctctgccggaagtcgcgtggagacattccgaaacgctcgcggaagacgcggccgaaatgcgagaggtcgttgaagccccaggcgaaggcgatctcgctgatgtggcgatgggcgagcacgggtgaggcgagatcacgccggcatcgggccaggcgttcggcaagaacataacgctggaaagaggtgtcctcgtcggcgagaaggtggttgacgtagcgcggcgagatgccaagcgcggcggcggtctccgcgagcgagaggttggaatcggcgaggtgcgcgcggatttgcgccttcagtcgaaagagcagggccgagcggtgggtcgaggacggtaacgatgttctgccgagccgctcactcaatgccatcgcaagcagatcaacggcctgctccgacagcgcgtcggcggtatccgggggcatcccgtccgcggtttggcaaaggcgaaagatgaaatcataggcgagccgctcgagcggcgcgtgggcgccgaacgagatcgcggtcagcatctcggtgcccgccagccggcgatgcagcatctcgcgcggcaccttgaagatgctctgggtgaagacgtccttgaacttcagctcatacggacgcgtggtgtcgtacagcgcgaactcgccggggtgaatcacggtctcgcggccgtcctgcaccacggcgccgttgccccgattgccgagcgcgatgagcacgaaatcctgatccgagcgggcgatgcgcgagggcgtgcggaagacgtgctggcggtcggagcagacctcggagcacaccgccttgccgagcgaagcctgggtaaccgagccgtggaaggcactgccgaggtccgacttgcaatcgagcccgacgaagacgtcgcagacgatgttctgccagagggctagccgccgatggccggggctgccgtctgtcgtgaactggatcggcatttggagagcctccctttcacatcctgcaattggcttgggacgccaaccgaagcaaatcccgtaccggccggcgtcgcgtccagtcgagtttttgttccgccgcggtcgagcgcctgcctctccggcttgccaaatagactgcatcggacgtggcttgcgatcaaccggcaatggaggcggcaatgggcatcgaacatccgaaatacaaggtggcggtggtgcaggcggcgccggcctggctcgacctcgacgcctcgatcgacaagtccatcggcctgatcaaggaggccgcggacaagggcgccaagctgatcgcctttccggaggccttcatccccggttacccttggcatatctggatggactcgccggcctgggcgatcggccgcggcttcgtccagcgctatttcgacaattcgctctcctacgacagtccccaggccgagcggctgcgtgatgctgtgcgccaggccaagctcaccgccgtgatcggcctgtccgaacgcgacggcggcagcctttacctggcgcaatggtcgatcgggcccgacggcgagaccattgccaagcgccgcaagctgcggccgacccatgccgagcgcaccgtctatggcgaaggcgacggcagcgatctggccgtacatgcccggcccgacatcggtcgcttgggcgcgctgtgctgctgggagcatcttcagcccttgtcgaagtacgcgatgtacgcccagaacgagcaggtccacgtcgcggcctggccgagcttctcgctctacgatcccttcgccccggcgctcggcgccgaggtcaacaacgctgcctcgcgcgtctatgcggtggagggctcctgcttcgtgctcgcgccttgcgcgacggtgtcgcaggccatgatcgacgaactctgcgatcggcccgataagcatgcgctgctgcatgccggcggaggctttgccgcgatctatggccccgacggcagccagatcggcgagaagctggcgccggatcaggagggcctgctgatcgccgagattgatctgggcgctatcggtgttgccaagaacgcggcagatcccgccggtcattattcacggccggatgtgacgcggttgctgctcaacaagaagaggtcccagcgcgtcgagcaatttgcgttgcccgtcgacaccgttgagcccactgatatcgccgcggcggcgaactgaccaaggagcgcgagacgacccgccgtcgccgctatgcggcgcaatggccgagcagctcaggatgtgcggcgcagatgtggtgcgcgccggcatcgcgaagctcggcctcgctgccgtagccatagagtacgccgatggcggtcatgccgttgctcctggctccgaccacgtcatggctgcggtcgccgatcatgatcgcaccggcgggattgatcttgatctcctcgatcgcgtagcggagcaggtcgcgcttgtcgacgcgggtcccgtcgagctcggagccgaatacgcgctcgaaatacggtttcaggccgaaatgatcgacgatgcgggtggcgtagacggcgggcttgctggtcgcgacgaacatgcgctggcccgtcgctgcgagcgacgtcaatgtgtccgcaattccgctgtaggcctcgttctcgaacaggccgatatcgctgaagcgctcgcgatagagcagcagcgcccggtcggcgagctcatcggttcccgtgagttttctgaggctcgcaagcagcggagggccgatgcaccaggtcagttcgtcctcgttcggcaccggaacgccgagccgctccagtgcgtattgaatcgagcgggtgatccccggcttggggttggtcagcgtgccgtcgagatcaaaaaagattgtcaccatgggaccgggacctgcgttgatactgccggtcgttgctagttggctggggttccaagtcaaggtcccatttgtcctgataacgtcgatgccatgcggatagctctgatcatcgctgtcgtgtgccaaacgctcatgttcacgccggtgctcgcggaggagacaccgccggccgccgcgcccgcgaatgccgaggaaactgcgaagccgacggagaaatcggaggacgcccgcgagagcgatacacgccagtcgatctgcctgatcgtggaggcggccgcacgcgacaacaacctgccgctggagttcttcgcgcgcgtaatctggcaggagagtcgcttccaggccgatgcggtcggccccatgacgcgcagcggcgagcacgcgcaaggaatcgcgcaattcatgccggggacggcaagtgagcgcgggctgctcaatccgttcaatccagtgcaggcgttgccgaaatcggcggagttcctgaatgagctgcgcaaccagttctgcaatctcggccttgccgcggccgcctacaatgccggtccgcggcgggtgcaggaatggctcgcgggcaccggtggaatgccggagcaaacccgcaattacgtctatgcgatcaccggtaccagcatcgatgcctgggccaaggctggctcgaccggcaagggcccgccgagctcgccgccgacgagctgtggcgatctgatggcgctgctcaaacgggcgccgaatccgttcgtcgccgagctcgagcagcatgtggagcttgccgctgcaaagagttggggcgtgcagctcgcggccggcttcgatcgcaacaaggcgcttgcgatgtactcccgagcggttacgaagctgagcgccgtgatcggcgagcgcgacccgagcctgctctcgtccgtgatgcgcagccgcggcacgcgcgccttctatcaagtgcgcatcggtgccgatacgcgcgccgaggccgatgatctgtgcaaccgcatccgcaaggcgggtggcgcgtgcttcgtgttgaagaaccgagggttgccgggctaggcgccccgtcgtccccggctcgcgccaagtggcgtcccggaatgacagcgctggatctcggagcaatgcatgccagccccgccgcccccttgcttgacgcgcgacgccgtctcgcccgttatgcaggctcgattccgcaacccggccaagatcttcagtggcgcttcctccgctcgattcaccacaatggaatagcccttggcttgccttcggctgggggctgcgctcgatcacacagacgatcctcaccatcgtgctcttcgtgacctatctcggcatcggcgcgttggcgcatgacactcacttcagcctgatctgggcgctgtgttcgacgctgttcgtctgggcaggtccggcgcagatcattctgatcacgacgctcggctctggcgcgaccattgttcaagcggcgatcgcagtgaccgtcagcgcgatccgtttgtttccgatggtggtctcggtgctgccgctgatgcgcacgccgacgaccaagcggcgcgagctgatatttgccgcacatctcaccgccgtgacgctgtgggttgagtgccatcgcttcctgccgcaggtgccgcgtgagcggcgcatcgctttcgttcatggcctcggctgcggcctcgtctcggtctgcctcgtcgccaacacagtcggctatgtcctcgccgccaacctgacgcagacgcttggagcggcgatcctgctgttgacgccgctgtccttcttgttctcgaccgcgcgcaacagccgcgagatcgccgatgtcgtcgcgctcgtactgggcatcgtgctctatccggtggccgccaagatgaactcgggcctcgacatcctggtcagtggcgtcctcgccggcacgatcgcctatggcgtgcattggtggcgacaggtgcgctcatgagctttgcgcaggcggtcggtgactggcacgcgcttgtcgtgctgttcgttgccggcgtcgtccccaaccagatctggcgcatgcttggcctctggttcggcggcggcatcgacgagggctcggagctgctggtctgggtgagggcggtcgcaacggcgatcctcgcgggcgttatcgcccagatcgtggtccagccgccaggcgcgcttgccagcgtgtctgatgttctgcgctacggcgcggtcgctgctggccttgtcgtcttcctgctgacccgccgctcgatctttgcgggcgtggtcgcgggcgaggtcttcatgctggccggcaagtggtggttgggctaaaaccgccggcgaacagctaaggaactgaacacatggtccgcgaacaggatctccgcgagggcgaggtcgccatcgagctgccgccggcgcaagatgccggtctcgtcttcattggccgcatccgcaccccctggacgtcacggctggagacgccgcggcaggggcgtcaggacggcccgatatgccggctcgagatcttcgagccgtttgtcccggcaatcaagggcgtcgatttctacagcaatctcgaagtgctctactggctcgacaagtcgcgccgcgacatcatcctgcagagtccgaagaataacgagaagacccgtgggacattttcactgcgctcgccggttcggcccaatccgatcggcacgtcgatcgtgaagctggtcgggatcgagggcaacgcgatcctggtgcgcggcctcgactgcctcgacaacacgccgctgatcgatctcaagcccgaccgctgcgagttcacgccgctggccgcgccgcagacgggtgatttcgagacggagtaatagcgcgccggtctagcccgtcagggagcccttgcgacgaagcaatcaagactgtcgccgtgagcgcagtctggagtgcttcgcttcgctcgcaatgacggagtgtgaggcaatcagcccgccttcaacgccgcgatcagcttggctgcgtggtcttgcagcagcttgtcatcttccttgcggcttgccgggggcagcatggcgacgccatcgtggcgcggcatcacgtgcatgtgcaggtgaaacaccacctgtccgccggccggttcgttgaactgctgcacggtgatgccgtcggcattgaacgccttcatcgcggccgctgcgatcttgtgcgcgccgcgggcgacatgtgcgtagtcgtccggcttgatgtcgaggatgttgcgggcaggggctttcggaatcaccagcgtatggcctgggacgcggggcatgatgtcgaggaaggcgaagacgtgctcgtcctcgtacaccttgtggcaaggcagctcgccgcgcaggatctttgcgaagatgttgttggtgtcgtaggcggtcattggtagctcctcggcggctcctcgagattttgcgcttactgtcaccagcaccggcaaggcgtcaaggcgcctcgtcggcgcctttgcggaaggggccgaactcggccagctcccggccggcctccgcaacataggcgcgctcgcgcttgagataatcttcgatagcgcggcgcaggccagggtcggcgatgaagtgggcggaatgggtggtgcgcggcaggtagccgcgcgcgatcttgtgctcgccctgcgcgccggcctcgacatgtttcaatccgtgtttgatcgcaaaatcgatggcctggtaataacagacctcgaaatgcaggaagggatggtgctcgagcgccccccagttgcggccgaacagcgtgtccgagccgatgaagttgatcgcgcccgcgatccagcgatcgttccggcgcgccatcaccagcagcacgtcctcgctcatggtctcgccgatcagcgagaagaactcgcgcgtcaggtacggccggccccatttgcgcgagccggtctccatgtagaagtcgaagaaggcgtcccaggcgtcctcggtaatgtctttgccggtcagccagtggatggtgatcccggcggcgagcgcatcgcgacgctcgcgcttgatcgacttgcggtggcgcgagttcaacgtcgccaggaaatcgtcgaaagtcgcaaagccctcattatgccagtggaactgctggtcggtgcgctggaggaagccgtgctcggcgagcagcttccattcggcctcccgcgcgaaggtgacgtggacggaggacgccttcgtgacgccgcacagcgccaccagtccgctcgccaaggcttcggtgatctgcgcacggtcgacgccgttgcggaccagcagccgcggcccggtcgccggcgtgaagggaacggagacctgaagtttcgggtaatagcgcccgccggcacgctcataggcgtccgcccagccgcggtcgaagacgtattcgccctggctgtgcgatttcagatagcagggcacgacgccggcgacgcggccgccgaccttggccacgagatgccgcggaccccagccggtgcggatggtcgccgaacccgatctctcgacggcagatagaaatgcgtgcgagacgaacgggttataggcaggtcttgagaggccgagggaatcgcctggaatggcggatgagattcctgcgccatgccccttgcacttgtcgccgggaccggcgcaagcgtcccaatcctcgggcgagacttcgccaatggacggtacggcctcgagcgtaatgtcggatgatgccattgcgcccaagatcgtgcatcgcagcagcgacttcaaggggctggagccatacgcgtgcagcgcgtcctcggcggtgcgctgcagtcccgtatcgccaccgcaacgctaccgcgttgcagcctgtccggaacaggaatgatagcgcaggccgtccccttacggcacgaacccctcaaagatcatctgatctgcataccgcccgacccgcgcccgctgctccggcgtgcgcacggtccagccgagcagggcgcagccgaagacgttgcgggcgatccagggtgccggggccggaaggtggtcgaccttgaaagcgacgaagtggggctgggtctggaagccgtggcgcaggtagagcatgctgtcgcgctgctccggggtcaggttggcccagtactcgtcctcataggtccgttgcgcgacgatgccgcgcggacgggagggaagcaactggcgcagcgccagtacctggtcgggatcgaacgacatgccgaccgcggggccgtcataggacgccagcacctcggccatccgcttcaccagcttgcggtcgccgccaaaatggctctttacctcgatcaccagcggcacccggccggcaaccatggcgcagagatcgctgagcgacatcattcgctcggcggtgtccctgaacttgaccgccttcagctccgcagcggtcttcgagatgacgtcccccgtggcctcggtgagacggcccagcgcgtgatcatgatgcaccatggcctcgccatcggacgagagctggatatcgacctcaatggagaaattgcccgcaatcgcagcctgtaccgcgcccggcatgttctcgacgatgccgcgcgagatgtcatgcaggccgcgatgggcgaccggccgggctgtcagccaatccggggcgcgcattcgtctcaggcgacctcgaacacgccttcgacctcgactgccgcgtcggccggcagggaggcgacgccgacggtggtacgggcatggcggcccttgtcaccgaaggcggccaccatgagatcggaggcgccgttgagcaccttcggtccgtccaggaagtcgggcgctgaattgatgaagccgccgagacggaccacgcggacgaccttgtcgaggtcgccgagtgcggccttgacctgggccagcaggttcaccgcgcagccgcgggcggccgccgcaccgtcttcgatggagacgccggcacccagcttgcccttggcgatcagcttgccggtgggatcgaagcagacctggccggagacgaacagcagattgccggtgcgcacgaacgggacgtagttggcgacgggagtgggggcctcatgcagcttgatgccctgttccgccagtttctgctcgaccgtgcccgccatgtccgacctcgttgtccaaatcattcgccccggcgcgttcgcttgagacccgggcaggccctgtttcgcccatcgtgccggcacatgcaagcaactggatgggcctgcatttggttgagacagagcacccggttcagtcaacttgacttgaaacggtctcagttgcgacgcaatggaacggtcattaaaatgtccaatctgcgctttcctcagggaacagacatggtgcaccttttccggacttcgctcggtgtgatggcgctcgcggcggccacttttggccccggctgcggggcgctggccgccaacggtccgtttctcgcgcatcaggcgctctacgacctcagcctcgtcaaatcgcgctccaattcggtcaacagcgcccgcggccgaatcctctacaatttcacagggaatgcctgcgagggctatacctcggaattccgccaggtgtccgagctcgacagcggcgagggcaaggtcacactgagcgacctccgctccaattcctgggaggatgccgccggcaagagctatcgcttcaagatcgagacgcggatgaatgaggccgatgccggccgtgtcgacggctcggccgagcgcgacggcgaccaaatcaacgtcaagctgaagctgccggcaccgaaaagctttacgctcgacggcaagatcgtattcccgaccgagcagatccagcgcatcatcgcggccgccaaggagggcaagtcgctgctcgagctctccgtctatgacggctcggacgacggccagaaggtctacaacacgctgaccgtgatcggtcagccaatccccgccgaccgtgccacgtcttcggacccgtcgaccgcggacgagcacatgaaatccctgaagcgctggccagtcaccgtcagctatttcgaccgcgacgcccagcagaaggaaggcgagcagacgcctgtttatgcgatggcgttcgagctctacgagaacggcgtctcgcgccagctcgtgctcgactacaacgatttcgtgatttccggcgcgatgggcaagttcgacgtgaaggacagcaagccctgcaattgaggggcgcgctctgtcctccgtcattgcgaccgaagcgaagctatccagactcgcaatgacggcactggctctcggctcgctctccagctacgctcgattgcaacctacaaaaatccgggaggcacccatgcccaagcttgatcatctctgccccagcggtttgcataacaatccggcctattctcacgtcgtcacagcttccggcgcccgcaccatctacatctccggacaggtctcggtcgacgaggaggggcggatcgtcggcgagggcgatattgccgcccagacgacgcaggtgatgcagaatctcggccacgcgctgaaagcggccaacgccaactacgccaacatcgtcaagatcacgactttcgtcgtgaactacaagccggagctgcgcccgatcatcggcaaggcccgctccgcgttcttcgaaggcatggagccgccggcctcgacgctcgtcggcgtctccgcactcgccgcgccggaatggctgatcgagatcgaggcggtagccgtcgcggattgagccgggctacgccgacctggctttggctagctctagtagttggctagctctagtagaacggccatcgcctcgtcggccctgtccaccggcacaaacaggtgatcgtgatagaaggccgaaacggcattcacgctgatgccggcttcggccagacgtgacgtgactgccgccagaaggccaaccgcatcgagtgcggagtggaccgtcagggtgatcaggcgcgagacgaattgatagcgtaagcctgcgcgctcagccgcttcttgagagatcaccagcgtcgtgccttcctgctcgcgaaacgtcaggagcggatctagtgctgaggggatcccctcgcttttcgaaagcctgcagaaaacgaagatgccgggccgcagctccggctcaatgtgtttaagcagcgcggcgagatcgcgttcacctatcatcactccggcgccttctccggcccttcatacgcaatgccgcggatgacagcggcactgccgaacttcttgcgcaggctgtccacggcgcgttcggcgtgcgcagcgcggcggtctagcatatcggtatcgtcggaggccgagccctcgcgcagcgcgctgacgccggcgcccatcaggcggaaggcggtgccgtcgatctctttcgccagcatctcgcggcagatcgcaaacatctttgcagcgagctgcgtcggcgcggcaatcgattgcgagcgcgtgcgctggcggaaatcggcggtcttcagcttcagcgtgaccgtcgagccggcgagctcggcgctcttgaggcgggacgacgtcttctcgcacagccgccagaggatcttctccagcgtcgggaaatcacgaatgtcggtctcgaatgtggtctcgctggagatcgtcttggccccgcggtcaggctcgacgaggcggtcgtcgatgccgcgcgcgagcctccataacctgcgtccatcgctcgggaactgccgcatcatctcgatctcgtcggccttctggaggtcggcgatgacgcggaagccacgctgcacgaggcgctcctgcgttgccggcccgacgccaaagatgaagccgaccggcttttccgccagcatcaaacgggcttcctcttggtcgagcgcggcaaagccgcgaggcttgtcgaggtcggacgcgatcttggccaggaacttgttgcaggacaggccgaccgagacggtgatgccgatgtcgcgctcgatttcgcggacaaagcgcgccagcacctttgccgggatcatgccgtggacgcgctcggttccggagaggtcgaggaaggcctcgtcgatggagagcggctctacgagcggcgtcagcgcctgcatggcctgacgcacttcacggccgacgcggacgtatttggccatgtcaggcgggatcacggtggcatgcgggcaggcttccagcgccttgaacatcggcatggcggagcggacgccataggttcgggcgatgtagcaggctgccgacaccacgccacgcttgccgccgccgatgatgacgggcttgtcggcaatgtcgggattgtcgcgcttctcgaccgtcgcgtagaaggcgtcgcagtcgatatgggcgatggtcaggctcgcgagcgcggcgtggcggacgaggcgaggggatccgcaggcggaacagcggcgcacgcccacatccaaatcggccagacaatcccggcagaagcagcggggcccggccgggtcggatttggtcacggcacgtcgcgctcccaggaggaatcgccgagggcatcgcccaggacctgtcgggccccggcgacgttggtgggatgcagttcggccgagctggcaaaggccttcacggtggcatcgtcccgcatcacgaaatcgagcacgctgaggagaaagttcggatccgaggcggcattgcggagggtctctggaccgacccccgtctcggccaggaacaggccgagccgctcgggatcgctcgcgacgaaggacagggcctgaatcgcaacgatttcagcaacttcgcgggggttgtgaacaggctttttcacggggacggtttgcctttccgttaactttcggtctctaatttggaatcatcatgcccgagtctcgtcctcaagtcttccgagcccagacaagcaactggaaaccacatcgcggaaagtcggccctcgggtttaacgaaactcaagcgaatctgaggctagtttgaatccagttttcgaaacgccgggaagcggcgtctgaggcgtcatatgtaccggtctgcggacctttcaggagggcgggatggctaagaccgtcctgatcgtggaagacaacgagctcaacatgaagctcttccgcgacctgttggaggcgcacggctaccagacctcgggcaccagcaacggctacgaggcgctcgacctcgttcgcaagatgcggcccgacctcgtgctgatggatatccaattgccgcaggtttcagggctcgaggtgacgcgctggatcaaggacgatccggagctgcgcagcattcccgtcgtcgcggtcacggcgttcgcgatgaagggcgacgaagagcgcatccgcgagggcggctgcgaagcctatttgtccaagccgatctcggtcggcaaattcattgagacggtccggcgttttatcggataggaagtgagttcacagtgtccgcgcgtatcctggtcgtcgatgacgttcctgccaacgtcaagctgctcgaagcccgcctgtccgctgaatactttgacgtgatgaccgcctcgaacggcaccgaggcgctggcgatctgtcatcgcgccgagtgcgacatcatcctgctcgacgtgatgatgccggacatggacggtttcgaagtctgccgccgcctcaagaccgatccggctacgcatcacattcccgtcgtcatggtaacggcgctcgacagccccgccgaccgcaaccgtggtctcgaagccggcgccgacgatttcctcaccaagccggtgtccgacgtcgtgctgattgcgcgggtgcgctcgctgacgcggctgaagatgatgacggacgaattgcgcatgcgcgcgatcacctcgctcgagatcggcatgcaggcgcccgagcgcagcgccgtggccgacaccggcaagggcggccgcatcctgctggtcgacgaccgcgagtcctcctacgagcggctggcgacgatcctcgccgccgagcacaccatcgacgtcgagccgaatccgacggaagcgctgttccacgccgccgagggcaattacgacctgctgatcgtctcgctcgacctcaacaatttcgacggcctccgcctctgcagccaggcgcgctcgctggagcgcacccggcacgtgccgatcctcgcgatagccgaccccgagaactcgacgcggctgctgcgcggtctggagatcggcgtcaacgactacctgctgcgcccgatcgacaagaccgaactcctggcccgggcccgcacccagatccgccgccgccgctacaccgatcacttgcgcgacaacgtgcagaactcgatcgagatggcgatcaccgacgcgctcaccggtctgcacaatcgccgctacatggagagccatctggcgactctcgccgagcaggcctccatccgcggcaagccgctggccctgatgatcctcgacatcgattacttcaaatcgatcaacgacaattacggccatgacgccggcgacgacgtgctgcgcgagttcgcggtgcgggtgcgcaagtcgatccgcggcatcgacctggcctgccgctacggtggcgaggaattcgtcatcgtgatgccggagaccgatttgcacgtcgccggcatggtcgccgagcgtttgcgccgctcgatcgccggcgagccgttcgcgatccacaagggcgccaagcgcatcgaggtcacgatctcgatcggcctcaccacgctggagcggaagggcgaggcggtcgccgacgtcctcaagcgcgccgacaccgcgctgtatcgggccaagcacgacggccgtaaccgcgtggtctcgcaggcggcctgagcggccgcggcccgaaactcaaaaacaaccccatgcacagtagccggcgccagccggatcaaggacttgcgcggggggcaggacagattgcgccggcagcggcgccgtttgacctgtcgggcaaaacaggagcatgctggtagggtcgggacgtgcctgtggcgatgctcattgcgacgctcgggtacttccaggaatcccgctgtcgctccctgcgaagacggggaatccagtacgccgcggcctctcggttcaatgacgaccgtctctggaatattggatcacccgctttcgcggccgatgacaccgaattggcggcgacagcttttatcggggcgcgcgcttacctgatgccgccggcctctccgcaccatccgacacatccacgcccgcattccgcaacaacaccttcgccgcttccttggccgcgcgcgccatggccggatcatcgcgcaccagatcttgcgcgatggagccgtcgacgagcagcacgagctgcgttgccagtgcatccgcattggcaacaccgagctcgctcaggcggtcgcgaaaccagaggcgtcggctttccttgaaggcgatcgcgatcttcttcacggcgaggtcctgagggccgagctcggccaccgcattcacgaacgggcaaccgcgaaaatccttggctgcaaaacgccgctccagcgaatcaaacgtcgcgaggatctgctcggcggggggcttgtcggaggggcgtgcgtgaacgaagcggcgctcgagataggccgcgatcagcgcatccttggaggggaagtgattgtagagcgtacgcttggagatgccgatctcggccgcgatggtatccacaccgatggcgcgaattccttgcagatagaacagcttgtcggcggtctcgaggatccgctctttcatcgtctgtggggcgggcgggggagccatgcagcggaaggcgtcctgttcgcttgacagcaacatccaaccatagcctaagtaaacaggtctgtgtaaccaaaatcggtggcaacagcagacgacggcaattgcgccgtgcccaaaagggagaagaaaatgcccctgctgcaggtcctgcgcccgaccttgcccatcctgatcggtgcctcggtcatgctgacgctgagcatggggttgcggcagtcgctcggcatcttcatgcagccgctgacgcatgacatccatatttcgatctcggatttcacgctggcactggccgtgcaaaaccttgcctggggcttcctgcagccccccgccggcgcactcaccgtgcgttacggcttccgcccgatcatgatcgtgggcgcactgatgtacatcgcaggcctcgtgctgatggcaacggcgaacgggctcgtcagcatcatgatcggcgccggcgtgctgatcggcacctcgatggcctgcaccgccgcggcgatcgcgatgtcggtggcggcgcgcgcagtgccggagaccgtgcgctcgaccgtgctgggcatcgtctccggcgcgggctcgctcggcgcgctgttgtcggcgccgatcggacagatgctcaacgagggctttggctggcgcgtcgggcttgccggtttcgtcgtcatgtcgctgctgatgatcccggccgcgtggtatgccgggcgcgtcgacaaaatcccgctgccgaagcccgccgccgccgacctcggcgatgccacggctgcgatcgcggcgaagacagcgttcggcaacgcgtccttcgtcgtgatgacctgcgcctatctcgtctgcggcatgcagcttgtgtttctcaccacgcatctgccgtcatatctggcgatctgcggcctcgatccgatgctcagcgcgcagacgctcggcatgatcggcggcttcaacgtgctgggctcgctgttcttcggctgggccggccagcgctggaacaagctggcgctattgggcgcgatctacatcctgcgctcgctcgcgctggcctggtatttcacgctgccggccagtccgttctcgacgcttctgttcggagcgatcatgggcttcctctggatgggcgtcggcccgctcgtcgcgggcgccgtcgccgaaatgttcggcctgcgctggcaggcgatgatccagggccttgccttcatgagccaccagatcggcagcttcctcggtgcctatggtggcgggctgctctacgacgcgctcggctcctacaccatggcctggcgcatcggcgtcgcgctcggccttgccggcggcatcgtgcaggtggcgttcgcgctgatccggccgtcgcaaccgccggccccggtgctgcggacggcctagcaggaagagggttgggtcgcctgcggagctgcgctccgcagcgagggcctgatgctgaagcgcggcgttgccaaccgatattcacttgaccgggaagccaacggtcgggacgttgccgagtgcgccagggagacgcgaaacatcgacagccgcgatgagaatctcacgccgcagccgttgtgggcttgtcctgcccgggggcttcgtgcccctgttccgttatccctgtcgcttcgatgcacagcctaacggcctcaccgatgctcgtcgcaatgaggtcagctttggcgcctgtccgcaacaattccatggcggcctggtcaatgtcgttgacccagcagcccaggatgatggttgccttcggcagtttccgcctcagacgccggacggagtaccgcatgtgtgccgcagcgcgggcatcgaggtagaccaagcagacaatcgcaacgcccgttgtatccaggcgaaagacattcgtcgtggaaagcgatgctgcgccttcgactcgcgcagcgaggccgtgctcagtcgagagctgagccagcatgatcgcggccgcctcatcgatcagggggcgtccggccacacacaggacagggtgttcaccctgccaatccggcggtagcgtttcgctacgcaggtaaggcaagcgttcattggccgcattctcggcaatgccttcgaccgcggatgatgcttcagcatcagtggtggaactactcctcgggggcggccggtcgtcctgatcggcaagatcggcgacaaactcgctgacggcatctcgaatcttcatgagacgttcctggtcaagcgcattgcgctccacgtcggcttgcgccaagtgcaaacccttcagggcgacctcatcatagtacgaagccagcgaacgctctttcagaaacccctcggccttttcggccgcttcggtcggatcccccgccagcatccgctgatagaacatttccggcggagaaagcgccggtcggtctccaaacatgacgtcgaggaattccaatcgctccacatgccgccccaaaaccacgaggcagatcgtgaggggggtcgcgaggacgagcccgattggtccccagagcgccgtccagaacgttgccgacgcgaccacggcaacgggggaaagccctgtgctgcggccgtaaaccatcggctcgatgacatggcccacgagcggttcaacgacaagaaatagagcgagagtccaaagcagcatcgaccagccgggatcgatggcgaccgcgagcgccagcgggaatgcggcagcgataacggcgccgacataagggacgaagcgaagcgcggccgcgaggatgccccaaaggatcgcgctgggaattccgatgaaccagaggccggtgccgatcaccacgccgaatgcgccgttcaggatgagttgggtcagaaacagcttgctgaggcggctcgctgcatcgtccaacgcagcggtcgtacgctgcagatccagcgagcccgccagccgaatgaagcgattccgaagatcctcgcgctgaatgagaatgaatatgacgaaaatgatgatgatgccggtggtagcgagcggatgaatgagcggagaaatcagggttcgcagactctccaacgcgccgggatcaggctggcgtacctcgactgggaccggtggcggggaggcatttgagccggggacaacgccggtcctcggcgcggatggcgcgtctttcggtttatcaagctcctcgctgagatccttcagcatatcggaagcacgctccagcgtgcccctcccggccttggtatcccggaatgcctggatcttgtcgctgatcgtcgattgatatcggggcaggtcaccggcgagttgcgtcagttgagtggcgagaaggctgccgatcgcgaagatcagcataaacgcaacgacaaccacgctcacgactgccagtccccgcgggacatggatccgctgcaatattccgaccagcggcgccagcacgaagctgagaagaatagccagcgcaacgggcacgaagatgtctcgaccgaaatagagcatcgagataatgatgacggtcagaatcccggtcgctactgcactcagcagcgccatcagctcttcggtggtgcgtggcttgaagggctgtctcgctacgggcctcattttgctgttcctgtcccgccgtggactgagcgctcactgatttcagctgcgaggggccaggacgaggctgcataggacagccgcccagggcactagtccgcgcggtcttcatggcggcggccgttactccggtcgcgcgctatcgcacgccaaccgctcctgccctgaaaaggttcctgtgagctatgaaatggcgcgatgcgccacctcgcttgcgccggggggcggcgtggccaggcgatgatccagggccactcgatcggcagcttccgcggcgctcatggaggcgggggtgctgtacgacgcgctcgaatcctacgcgatggcctggcgcatcggcgtcgcgattggtctcgccgtcggcatcgggccggtcgcattcggcccctgggcgcatggcggatgcgctgcaaacgcgtcgcccgggcggctcaccattgtcattacgccgctgccgctaccttcaccttgaccgagacgggcagcggaaggcgaagcccccgggcgaacgcagggcggcgcgttaccgggtgtctctgcggcagctttccgaagcgcgaaaggatttgcatcagtgcggacctgacggccggctcgatcttcgcgcaaatgaaccagcagaccaggatgagcatggcaagtgcgatccaaagcgcagaggtcgcatcgagaccggcgtcgaccaatgcacgaatgaccgccgcgccgatgacgttgtgggtgagatagagcggataggtgatcagcccaagcgttctcagataggcaggtgcctcaggggaagcgatgccggcgaaccgtctgttgcggtttgcggcaagcgcaatgagcagcaccgcggccgcccaaaccatgatcggcacgagcgccgattgatcggcgatcgcgggtatggacgtcagaaggaaagatgcaaagaagtagatctccgccgcgcctgaaagacaggcgacggcgacggcgacctgctccagcgcagtcaattgcctgttcgagagaatgaacagccagatccccagcgcaaagaagcagccatgcgtcaacagaaacgccgcgcatggcacccgaaacatcaggatgacgagataaggcaggtcggatggcgtcgcgcatgacagcaccgccagcgcgaccgcgttgaacagtgcgctgtagatggtgaggccgaaggcgaggtgccgcagagtgatcctcttcgtgagcatcgcgcaaaacacgagaccatagaacgcgatctcggccgccagcgtccaatagacctcgtcaagccaatggcccgtgacgcccttgggcaccatcagcatggcgtggatgtagggctggatgatttcggagacgggtccgctgccgaagagaagcaggacgagaaacgtcgcagtggcgcacacccagaccgccggataaagccggagcgcacggcccagaagaaagccgcccggcgaggattgagccgcggaattggcgatgacgaaaccagagatgacgaaaaagatttcgacgccgacccagccgaaccatgtgaagggcgcggcagacgggtagaggacatcggcggcgacgtagcgctcgaagcccgggacgccgatcgagacccaggcccaggaccagaacatctggtgaaagacggcgacgccaagcgcagcgccgaagcgcagcggatccagcaggggcaaatggcttttcacggcaatggaccagattcatgcaacgatcccgttcgagatattgaatccggtcgaggtgctctgcgaggcgggtcacactcgcttcgcccgccaagcaccgatcatggagagcagggtgtccgtagccggaagcccgcagtagcccgcggctccgccagcagccttgcaagcggcagcgcgtccgagacacgctgcggagaaaatgaaaacggggcccagagggccccgtcaaagtcttcaacgtcccgcgatcttacttgatcttggcttcgcggaattcgacgtgcttgcgcgcaaccggatcgtacttcttcttgaccagcttgtcggtcatggtgcgcgagttcttcttggcgacgtagtagaagccggtgtcggccgaggacacgagcttgaccttgatggtgaccgctttggccatgttctgtacctcagaatatcaggggaatctggagccggccaaacggcccgcgttggccggcaacctagccagaaaccgcctgatgtcaaggttttacacccggaaaagcacccgaaacgggcccattaggcctcgaagaagcgatttttcggccgcggcaggcccagattctccctcaaagtggccccttcatactccttccggaaaatgccgcggcgctgcagctccgggacgaccttgtcgacgaaatcgtcgaggccggcgggcaggaacgggaacatgatgttgaagccgtccgagccgcgcccgaccagccattcctccatctggtcggcgatggtcttggcagtgccgacgaaggacaggccgccatagccgccgacacgctgggcgagctggcgcacggtgagcttttcgcgcgtggcgagatcgaccatgcgctggcggccgctcttgctggcgttggtctcgggaatcgcggggagagggccatcgggatcgaagccggaggcgtcggtgcccaggatcaccgagagcgaagcgatggcgctgtcgtaatgcacgcggctgtcgagcagcgcgcgcttttccctggcctcatccacgctgtcgccgaccacgacgaaggcgccggggaggatcttgagatgctcgggatcacggccggccttctccatgcggcgcttgatgtcggcatagagtttttggccgtcggcgaggctgccgccgccggtgaagacggcttccgcggtctcggccgcgagctgcttgccgtcttcggaggcgccggcctgcacgatcacgggccagccctgcacgggtcgggcgatgttgagagggccgcgaaccttcagatatttgcccttgtggtcgagcgtatgcatcttcgcgggatcgaagaacagcccgctctcgacatcgcgcacgaaggcatcatcggcgagggattcctagaggccagtgacgacgtcgtagaactcgcgggcgcgcctgtagcgctcggcgtgctccatgtggtcgtcgagaccgaaattgagcgccgcgtccgggttggaggtggtgacgatattccaccccgcnnnnnnnnnngcaaattcacgtcattccggggcgccgcgcagcggcgagcccggaatccatcgaaccgcggagacagtggaggaatggattccgggctcgcgctacgcgcgccccggaatgacggaggagggagccgtgcctccgcaatgtcagcgtcagctcaacacatccttctgcatcttgccgccgtagaaatggaagaacggcaccggcgcatcatgacgaagcgggccggtggcaaggcgggtgtcgagctcgttgagcacgttgcgcgtcatcggatgcagatcggcgagcggctttgagccgagctcgacccagaccagctccaccagctcggcatcggcatggatcaccccctcgacgcgatgggtgattgcggaggcatcggcggtgaagaagcgcgtgtcgaagcgcttgacccggcccggcggggtgatcgcccgcgcgatcaggaacaggctggaaggatcgggcaggaggccggcatcggcgaacggcctccaggggccctcgagctttgtcaccttgccttcggccttgcggccgaggcagaggccggtctcctcgcaggcctcgcggatcgcggcaatggcgagggacttcgcgcgcgaagccggcgtcttcgggctgcccttggcgagattggcctccagctcgggcgtgatgggggcggcacagggcacgcgataatcggccttgtcgacgcgtccgcccggaaagacgaacttgccgggcatgaacacgaccttgtcgtgccgcttgccgaccagcactttcggggtggtgccgctgcgatcgaccaggatcagtgtcgccgcatccctcgggcggaagtagggatggtgatcggcttccttctcctcgtgaaccctggttttctcctcggcctgcgaaatatccgtcatgtcctcacccaaaacccgttttcttgcttgttgcttacacaggcggaataccatccggagggttctcgtcaaacccgtgcatgcgcagagcccattgcaagccgaccacagctccttttaccggctgcaacagtgcgagcgaggcgatgaaggtgaagggcagataggccgcgaagctgagccagaccggcgtcgaatagttggtctcgatccagaggatggccggcaccacgatgtggccgacgatgacgatgacgagataggcgggcagatcgtcggcgcggtgcggcgtgaagtcgagctcgcatttggcgcaatgatctgccgtcttcaggaaagcacggaacagctttccctcgccgcagcgcgggcagcggccgcgaaagccgcgcttcatcgccgtccacaggtcgcgctgctcgacgagacccgtctcgcgcgtccagatctttggcgccgtgctgatcatcaccatgccttgcccttctgtcctttgctcttgttcttccttttggcccggtttcctttggccttcttgcctttggcaggcttttgcttctccggcttgcgttttttctccgggctgcgtccgggatgagcttttgatggcttgcgctgcgggcggaaagatccgcgcgtgcgcgggccgccctcgctctccgacgacagcagctcgaaccgcagtgcgccggcgatgggagccgcttcgaccagacggacgtcgacgacgtcgccgagctgatacatggtcccgcttcgcgtgccgaccagtgcatggcggctctcgtcatagttgaaatattccgtgccgagggatctgatcgggatcagaccatcggcgccggtctcgctcagcttgacgaaaaggccggcgcgggtgacgcccgaaacgcgaccctggaagctggcgccgatgcggtcggcgaggtgatgcgcgatgagccggtcgacggtctcgcgctccgccttcatcgcgcgccgttcggtcagcgaaatatgcgcggcgacctcgccgagagattccggcgtctcgctgtcgggcagggcgccttcgccgaggccgagcgcgcggaccagtgcacggtgcacgacaaggtcggcgtagcggcggatgggcgaggtgaagtgcgcatagcggcgcaggttcaggccgaaatgcccgtaattttcggaagagtactccgcctgggcctgggcgcgcagcacgacctcgctcaccagcgggtaatagtcatggccttcgagctgggccagcacgcggttgaacagcgtcgggcgcagcgcgcctgacttcgtgaatgggacgtccagcgtctccaggaactctgcgagcgcatggaccttttccagcgtcggctcgtcgtggacgcggtagatcagcgggagcgacttcttctccagcatctccgccgcggcgacgttggcgaggatcatgaactcctcgatcagcttgtgcgcatcgaggcgttccggcacgacgacgcggtcgaccgtgccgtcgctcttcaagagaatttttcgctcggggagatcgaggttgagcggatcgcgctcgtcgcgcgcccgcctggcgcaggcgtaagcggcatagaggggcttgagaatcggatcgagcagggggcctgtggtgtcgtcaggctttccgtcgatcgcggcctgcgcctgcgcgtagctcagcttcgccgccgagcgcatcaggatgcggtggaagctgtgcgaacgcttccgcccgtcggggccgagcaccatccgcaccgcgagcgcgccgcgcggctcgcccggcaccagcgagcagagattgttggagatgcgctcgggcagcatcggcacgacgcggtcgggaaaatagaccgagttgccgcgatcgagcgcgtcgcgatcgagcgcggtgcccggccgcacgtagaagctcacgtcggcgatggcgacgttgacgatgaagccgcccttgttgttgggatcgtcatcgggctgcgcgtggaccgcgtcgtcgtgatccttggcgtcgggcggatcgatggtgatgagcgggacgtcgcgccagtcttctcgccccttcaggttcgcgggctcggcggcttccgcctcgcgctcggccgcggacgagaattgcagcgggatgtcgtgagcatagatcgcgatcaggctgatcgccttctcggacttgaccgagccgagcttttccttgacccggcccgatgcgaggccgaagccgcgcgagcggacgatgtcgacgctcacgagatcgccgtcctgcgcgccctgggtatcggtcttggcgatgttcagttcgcggtccgcgaacttcttgtcgacggcgacgagccggccgccgccttcaggcaggctgcggaagacgccgagaatgcggctcttggccttgtcgatgaccttgatgatgcggccgcgccaggccggaccttcggtctcgtcggatcgctcgacgcgcagcagggcgcggtcgccgattccggccgcggtgcccggcttcggcttgcgcggcatctcgatcaggatctttggtggctcgccgctctcgacctcgtcccattcggcgggcgaggcgatcaattcgccgtcactgtcgcggcctgtgatgtcggcaagcagtgtcggcggcagcgcctccggctcggagaccttgtggcgcttcttcttgatgatgccgtcgtcggcgagctcgcgcagcatgcgcctgagctcggcgcgatcagcattcttcaggccgaactcgcgcgcaatgtcgcgagttccgacctttcccggattggccttgatgaaggcgacgatggcgttccggtcgggaaagccaaggtcattcttgcgtttcacttaacctctaattcttgccggcactctttttggccggagccttggtcgcggccgctttggtcggcgacgtcttcgcggtcgacgacacggcagcgcgcgccttgctggtggattcggatttggttttggccgcagctttcttggcggccggcttcttgggcttcggcgaggcatcctcgccgtttgcagccttcttggtcttggccggcttggccgccttcttcgccttggtcttgccgccgcccttggccgcacgctcgtcgatcagcgcgatcgcctgcgccagcgtgatggcgtccttctcgaactcggcgggaatcgtcgcgttgacgccgccggctgtgacgtagggtccgtagcggccgctcttgaccgtaacggtgccgagcgtcggatgatcgccgatggccttgcctggatcggcaccgaagcggcggctcgggcccttcgccgccttctcggcgatcagcgtcaccgcgcggttgagcccgatgtcgaacacctcgtcgccggcttcgagactcgcataggtcttgtcgtgcttgacgaacggcccgaagcggccgaggccggcggtgattggcagacccgtctccggatgcttgccgatctcgcgcggcagcgacagcagcttcagcgcaagctcgaggtcgacgtcgctgggcgaagtgcccttcggaatgcccgcgcgcttcggcttctccccttcctcataatccttctgctcgccgagctggatataggggccgaagcggccggccttgacccagacatcgcgacccgtctcagggtcctggccaagcgaacggtcggccgtggcctcgccgtcggcggcgagctgacgggtgtagcggcactccgggtagttcgagcagccgacgaaggcgccgaacttgccggccttgaggttgagccggccagtgccgcaattcgggcattgcctgacatcgccgccatcggggcgaggcggatagatgtgcggccccagcatctcgtcgagcacgtccagcacctgggcgacgcgcagatccttgatgtcgtcgaccgcgccgatgaagtcgcgccagaaatccttcagcacctgctgccaagagatctcgttgttggagatgcggtcgagctgctcctccagcgcggcggtgaaatcgtattcgacgtagcggctgaagaagctctccaggaacgcgatcacgacgcggcccttgtcctcgccgtgcagacgcttcttctccagcttgacgtagccgcggtccttcagcacctgcaggatcgaggcgtaggtcgagggccggccgatgccgagctcttccatgcgcttgacgagggaggcctcggagaagcgcggcgggggctcggtgaaatgctgggtgaccgacaagctctgccgtttcagggcgtcgtttgggctcatcgcgggcagacggcgggaatcctcgtcctcctcgtcgtcgcgaccttcttgataaagcgcgaggaagccgtcgaacttgacgacctggccggtggcgcgcagctccagcgtacgggagcctgccttcgcggtgatgtcgaccgtggtgcgctcgagctcggccgactccatctggcttgcgatggtgcgcttccagatcagctcgtagagcttcgcctggtcggcatcgagcctgcggttcaggctgtcggggcggcgggacaggtcggtcggccggatcgcctcgtgcgcttcctgggcgttcttcgccttggcctggtattggcggggagcatcgggaacgtaggcgttgccgtaatcctcgccgatcaccttgcgcgcctgggtgatcgcggacggatcgatctgcacgccgtcggtacgcatataagtaatgagtccggtggtctcgccgccgatgtcgatgccttcatagaggcgctgggcgatgcgcatcgtgtgcgccggcgcaaagccgtatttgcggctggcttcctgctgcagcgtcgaggtggtgaagggcgcctgcggattgcggcgggcgggcttggcatcgaccgcggtcacgatgtagctggcggcctccagcgccttcttgaagtcctcggcttcggcgccggtgccgatgtcgaggcgctggatcttcttgccgtcggcgccgacgagccgggcctcgaaggcatcgccgcgcggcgtcagcagggttgcgatcagcgaccaatattcgcgcggcacgaatttctcgatctcgagctcgcggtcgcagacgaggcgcagtgccaccgactgcacccggccagccgagcgggcacccggcagcttgcgccacagcacgggggagagggtgaagccgaccaggtaatcaagggcgcgacgcgccatgtaggcgtcgaccagcgcgccgtcgatctggcgcggatgcttcatcgcatccgacaccgcctgcttggtgatggcgttgaagacgacccgctcgaccttctggtccttcagcgcgcgcttttccttcaacacctccagcacgtgccaggagatcgcctcgccctcgcgatcggggtcggtggcgagaatcaggcggtcggcacccttcaaggatttggcaatctcgttgagccggccggccgccttggggtcgacctcccagatcatcttgaaattggcatcgggatcgacggagccgttcttcgcgggcaggtcgcggacatggccgaacgaggccagaacctcataggacgagcccaaatacttgttgatcgtcttggctttcgccggcgactccacgatgacgatattcatgtagttccagtaacttacgggaaaatatggggccgaaaacgaaaggattcgggtcggccgtttcgccccgaacatgggtggtgaggccgccgctgtcaaatcgaggggtgtaggactacgctctggaggggagagttctatatctggaaagttgcaaaataccaccttggagttgcgggtgatgtgagcgtaatgtctcattgggcgcatggattcgggtggggtctggtgacaaggccaggaaagaaacgggcgcgtgctggatcaggctcgccagggggctcgcgtcacgaggaaccgggggagggcggcgctgacgaggcggtggccttcatcgccgagcagaccggggcattgcgcgagctggccgagcgccacaagctcgccgtgctgcattatctgctgggtatgaccaagctggaggctgacgagcacatgcgactgcggaccaagcgcaagctgtcgtgaggagcttccacattgacttgaactgccgcgctctcgccggcgaccaagcccatgtgagaaacacgatgatcctctcgatcccggcggaccagttccgtaacgacgttcgcggtctcgtcatcgcggcctgcctgatcggaggactgatcctctggtttgcgatcgcaggccggtccgaccgcgtcatctatcgcggtgtcgacaaggcatggtccgagcccggtcgcgtccatctcaacacggagccccccggcaattacgtgatcgagcgaaacgcagaatttgatgcgatgaagatcggctgtgtctacgctctcaactatgacgccgggtttggtcggcagggtcacaatccctggaaggcggttcgcagtttcactcttgtccggtgctagcccgaccgactccggcttactcccttcgatggctggcgtggtctgatcgtcgtgtcggctggcgcgagaaggcgtccgtcctccgcgcgcatttccagcttcttcaccgggcgacctttctcgcgatcgaccaggatggtcgcgatctcctcggggtggtcgtcgtactcctcgctccattgccgcagcgcgaccaggatcggaaaggtgccgcggcccttcggggtcagcacatattcctggtaggcgctgccgtcggaagcgggcgcggtcgccaaaatgccgtgctcgaccagtgaccgcaggcgcgcggccagaatgttcttggccatgccgagcttgctctgaaattcgccgaaacggcgtacgccgaacagcgcctcgcggatgatcagcagcgaccaccagtcgccgagggcctctagcgaccgcgcgatcgggcatgcatcgccttcgaagctcgttcttttcaccatcgctcgctctcccgcgttcgcacggcgcctgagccgatcacgcgcttgtgtggttgcataataaaaccaaatgccctagatggcaatctagtttcattatgaaacttaaggaggcgagcgtgagactgaagaacaaggcagcactgatcaccggcggcaacagcggcatcgggcttgcgaccgcaaagctgttcgtggccgagggcgcgaaggtggtgatcaccgggcgcaacaagcagacgttggaggcagccgcgaacgaactcgggtcgaacgcgctcgcactcgcggccgatgccaccgacatcgacgccactgaagccgcaatcaagcagggcgcggaaaagttcggcaagttcgacatcctgtttgccaatgccggcattgccggcggcacgccgctgggatcggcgaaaccagaggtgttcgagaagatcatcagcaccaatctgaccggcgtgttcttcaccgttcaagccgcactgcctcatctcaacgacaatgcctcgatcatcctcaacggctcggtgatctcggtgctcggcattcccggttactctgcttacggtgcggcgaaagccggcgtgcgcgcgatggcgcgggtcatggcctcggagctgtcgccgcgcggaatccgcgtcaacgtggtggcgcccggcgcgatccgcacgccgatctggggggctgccaccgcgacgccggaagccgagaaggagttcgagaagcggatcgcgctgacgacgccgctcggccgtatcggtgaaaccgatcacgtcgccaagacggtgctgttcctcgcctccgacgattccgcgcatgtgcagggccaggagatctttgtcgatggcggcgcggtggcctcgccgagcggcgcgccgatctatcgcggctgacgctccaaacaagctcggtcgtccggcgcagcatgtgtgttgcgcgggacggttcagcggtcggggggctatgctgaacgcagagccgttgctgcctggagagcgccggtgagcgccttctcgcggtggtccgggtcgatctggattccgtcggcggggatgaactcgacgctgttgattcccaggaagccgaacacccagcgcagataggtttcgaggtgctcgccggccgcgtttggcgtctcggcgccgtaaaagccgccacgcgacattgcgacgatcacccgcttgccgcccgcgagcccctcgggcccagtggggccatacttaaatgtcttcccaggcaccagaattcggtcgatccaggccttgagttggctcgggatcgtgaagttgtacatgggcgcaccgatgacgacgatgtcggccgccaggaaatcctccagcgcgaccgcgctcgccgcgaggtcgggcgcgagttccgccggcgccggcgcgccgtgggccgccgcaaggtgcgacccggagagatgggcgagcggggcgtgggccagatcgcgatagacaacctcgagcgagggcgtcgcctgccggagccggtcgacgatggcggcggaaacctgccggctgacggattgggggccgagcacgctggagtcgaggtggaggagtttcatgtgagggtcaccctggtataggtttgtaaccagagctacatgagtgactaccgaaatccccgcaagaacgcacttttttgagccatgggcacatccttgaaacctgagaacaccggttttcctgcatcgccgaggccggatcccatgccgcatcccgaccatgcggactgccgtggggtcgcttccgtgctgtcccgcgtcggtgacaaatggagcgtgttcgtgatcatgatgctgagcgacgggccgaagcgattcaacgagctgaagcgcatgatcaacggcatctcgcagcggatgctgaccctgacgttgcgcgggctggagcgcgacggcctcgtcacgcgcacgatctttccgaccattccaccgcgcgtggactatgagctgaccgatctcggccgcggattgcagcagccggtgaaggcgctgggcgagtgggcgatcgaacaccaggagcagatcgcggcagcgcgcacgcgcttcgacgagcggaacgaccggtagagtcgcgccttccattcggtcattccgggttcggctcttcgagccgccccggaatgacgccttcaggtcaaggaagagacgtcggggtccagcactaaagcagcgacaccaacccgccgccatgacgctcgagctttccggccagctcgagctccaagagcacagtgcgcacgatcgcaggcgaggcgccggacatccgcacgaggtcgtcgatcgagatcggggcggggctgagcaggcctgtgatctggtcgcggtcgtggccttgcggatcgctctcgaacggctcgctgtcgggctcgcctgcggggtgcatcaggggtcgctccatgatcggctgcaccgcgttgatgatgtcggcggcttcggtgacgagcgttgcgccctgcttgatcagatcgttggcgccggcggcacgcggatctagcggcgagcccggcaccgcgaacacttcgcggccctgttcggcggccatgcgcgcggtgatcagcgagcccgagcggtgcgcggcttccaccacgacgacgccgagcgaggctccggagatcaagcggttgcggcggggaaagtcgcgggcgcgcggctcatgaccgagcggcatctcggagatcgccgcacccgcgtggtcgaggattgcggcgaggagatcgccatgctcgggcggatagatgcagtcatgtccgccggcgagcaccgcaatcgtgccgctctcgatgctcgtgcgatgcgcggcctggtcgacgccgcgcgcgaggcccgagatgacgacaaagccggcttcgccgagctcgcgcgcgagctggccggcgaacttcaagccggcgccggaggcattgcgcgagccgacgatggcgatcgtcggccgcatcagggtcttggcgtcgccgcgcagggcgagcagcggcggcgcgtcgtcgatcatcgccagccgcgtcggatagccatcctcgccgggcgcgcgccaggcgatgccgaacttgcggcttgcggcaagctcggcccgggcctcgtcggcactacagatgcggcccgatcgctgcgcaccgccgcggcgcgccagatcaggcagccgctccagtgcagcccgcgcggtgccgaaatgatcgaccagcgagcggaaggtgcgcgggccgacattgtcggagcggatcagccgcaggcggtcgatccgctcttgctcggtcagctccacgctcggattgatgacgtccacggtgtctccttgtgggggcagcatggaacaacctgagggcgttgcgcaacagggggtgtgcttgcgcgaccttgccccggtgctaaaagcggtcccaataagaaggatcttgccatgatttcacttgccgacctccagcgccgcatcgaggcgggggagctttcgcccgatgccgccatcgcgcaatcgcacgccgcgatcgaggccaaggagaaggacatccgtgccttcgtgcggcacgacaagtcggcgaaagcgcaaggctccggcccgctccgcggcatcgcggtcggcatcaaggacatcatcgacaccgccgacatgccgaccgagatgggctcggagatctatcgcggctggcagccgcgcgccgatgcgccggtcgtgatgatgctgaagcgggctggtgccaccattatcggcaagaccacgaccacggcgtttgcctcgcgcgatccgacgccgacgctcaatccgcacaatctcggccattcgccgggcggctcgtccgcaggctcggcggcggccgtcggcgccggcatgatcccgctggcgctcggcacccagaccggcggctcggtgatccggcctgccgcctattgcgggaccgcggcaatcaagccgtcgttccggatgctgccgacggtcggcgtgaaatgctattcgtgggcgctcgacacggtcggcctgttcggcgcacgcgccgaggatctcgcgcgcgggctgcttgcgatgacgggacgtacggagttctccggcatcgtcgcggcgaagtcaccccgcatcggcgtcgtcaggcaggaatttgccggcgcggtggagccggcggccgaagagggactgcaagctgcgatcaaggccgccgagcgcgccggtgccagcgttcagacgatcgatctgcccgaagcggtgcaggaggcctggcgcatccatcctgtcatccaggacttcgaggcgcatcgcgcgctggcctgggagttctccgagcgtcacgacgagatcgcgccgatgctgcgcgccagcctcgatgcgacggtcgggctgacgccgaaggaatatgatgaggcgcgccggatcagccgtcgcggccgccgcgagctcggtgaggtcttcgagagcgtcgacgtgctgctgacctattccgcgccgggcactgcgccggccaaggagctcgcgaccaccggcgatccccgctacaaccggctctggacgctgatgggcaatccttgcgtcaatgtaccggtgctgaaggccgccggcctgcctgtcggcgtgcaggtgatcgcgcgcttcggcaacgatccgctcgcacttgcggtcgcctggttcctggaagaagcgctggcgaaatcaggctagactagcgcgggttccgcccgagccgcctctcgcgtgcgcgcgggcgcgctgccgtccgcaccttgtccgagccagcgcccggccgcctcgcggccgcttcggtgcagcaggcgaatgaagccgcggccgagatcggtggacgagcgctgcgccagcccatcgaccgagtcttctgcggcaatccgggacagccgcagcaacggcgcggcatgggcctgcgcccattcgattgccgcgacctcggcgttgagcgcggcgttggccgcgatctggtcgagccggcggtcgatcgcggcgagcgtgatcggcacgtaagtgtcgcgcgtcggcgtaacctggaccagcaggacatcggacgtcgtcgtttcctgcaccagccgcagcagcggcgggttgccgccgaagccgccgtcccagtaggcctcgccgtcaatctcgacggcgcagtgaaccagcggcggacaggtcgaggccagcacgacgtcagcggtgatggcgtcgttggaaaagatctgcggccgcccgtcgcggatccgcgtcgctgcgatcagcagcttcgggcagcgcgtgtcgcgcaggacggagaagttgatgtcgcgcgagaccgcctgccgcagcgggtcgagatcgaacggatcgaactggccggagcgcagggtcgggccgaacgcgaccgagctccccgcgggcgaaaagccgccgaccagcatcagcgagcggaacgaggcctcgtgcatcagccggacccagaaacggttcagccggtaacgggcaccttcgcgtccgccttcggcaagaccgctggcgagcagcagcgcattgatggcgccggcgctggccccactgatggtgtcgatctcaatggacgtctcttccagcaaccgctccaggacgccccaggtgaaggcggcaaaggtgccgccaccctggagagcgagtgacaatcgtcgcggtggccactggttggatcggggctgcatgggcacaatcggcgcagccgtggttacgacatcaactgcaacaggcgctttcgcaacggaatcaggcaccgacgctggcggtgaaatggggagaggctttggctcggcaggcggggagggcgcatcgcaccagacattggttgacgagagcagccggctcgccgcggtgccagaaccacccagcgaaccaaccccgtcctgcgcgccgaaaatcttctcgctcattctgagcaaccgccgccatttccgctgtcacaatgacaggatcggaacccgctcgccaatacaaccgtgattcggccgcaagttgcgaacaggatttggcatataatgcagaagcggtgctccggtatccgtagatgcccggcttcgccgaaaacgctctaagccttttcgccgatccggctttccttgccggtctgcaggcgcctgatgttctcgcgatgcgcgtagaacaagagcagcgtcagcaccgccgccagtgcggacaaggcgaggtggccgaaccaccacaggaacatcggtgtgatgaacgccgccaccagcgccgagagcgaggaatagcgggtggtgaaggcagtggccagccacagcaggcagaacaccacggcgccgggccagaacaggccgagcaggatgccgatatagaccgcgactcccttgccgcctttgaatttgagccagaccgggaagagatgcccgaggaaagcgccgagcccggccaccatcgcggcattgggccctgcaatatagccggcgatcaccacggccacggtgcccttgagcgcgtcgaacagcagggtgcccgccgcaaggctcttgcgtccggtgcgcagcacgttggtggcgccgatgctgccggagccgatcgagcggatatcctgcgtgcccgcgagcttggtcaggatcagcccgaacggaatcgaaccgaggaggtagccgatgacgaaggccaccggcagaaaagcttcaagcgccatggcggcagctccagaggcagaattccgatatcgaacgatcgtgcgtgtcagacatgctcatagaccgtccggccgccgacaatggtgcgcaccacgcggcctgtaaagcgggcctcgtcgaacggcgtgttcttgcagggcgatttgaggacggcgggatcgaccacccagggcgtgtcgggatcgatcacgatgacgtcggccgggctgccggcccgcagggttccgcctgataggccgagcaactcggcgggccgcgtcgacatcgcgcggatcagcgtcttcagctccagttcgccattatgcaccagccgcaagccggccggcagcatcgtttcgagtccgacggcgccgggcgcggcttccgcgaacggcaggcgcttgacctcgacgtcctgaggattgtgatcggacatgatcacatcgagcaggccggaggagatcgctgccaccagcgcacggcgatcgtcctcggtccgcagcggcggcgagagcttcaggaacgaacggtaaggaccgatatcgttctcgttcaatgccagatggttgatcgagaccgaggcgctgcaggcgagcccggcactgcgggcgcgctggaggatgtcgagcgaatcgatgcaggtcagcgaagccgcgtgatagcggccgccggtcagcgcgacgaggcgcaggtcgcgctccagcatcacggcttcggcggcattcgggatgcccatcaggccgagccgggtcgcgaactctccctcgttcatcacgccttcgccgacgaggttggggtcctcggtgtgatgcacgatcagcgcgtcgaagtcgcgggcgtaggtcagcgcgcgacgcatgacctgggcgttggtcacgctcttgtcgccgtcgctgaaagccaccgcgcccgcggctttcaggaggccgaactcggtcatttcctcgccatgcatccccttggtgagcgcggccatcggctggatgttgacgatcgcggtgtcgcgggcgcgacgcatcacgaagtcgacggtcgccgaattgtcgatgaccggcgaggtggcgggctggcagatgatggtggtgatgccaccggtcgcggcggcctggctcgcggaggcaaaggtctcgcggtggctgagccctggctcgccgacgaaggcgcgcatgtcgatcaggccgggcgccacgatcttgccggagcagttgatgatgtccgtgccctcggggacgccggccgcgccgatgccgcggcgggtctcgcggatggtgccgtcggcgatgagaacgtcgccgatgccgtcgaaatccctgctgggatcgacgatgcgagcattggcgagcagaatggggcggcggtcggtcaacatcggcatcacgcgttcggcaggttgcgggcgagcgcttccagcacggccatgcgcacggcgacgcccatctccacctgttcgcggatcagggactgcgcgccgtcggccacgatcgagtcgatctcaacgccccggttcatggggccgggatgcatcacgagcgcgtccggcttggcataggcgagcttcttctggtcgagcccgaaatagtggaagtattccgatgacgagggcacgaaggagccgttcatgcgctcgcgctggagccgcagcatcatgacgatgtcggcgccttccagtcccgcgcgcatgtcgcgcgccacctcgacgcccatccgctcgatgccgggcggcagcagcgtggagggaccgacgacgcggacgcgggcgcccatggtattgagcaggatgatgttggagcgggcgacgcgcgagtgcagcacgtcgccgcagatcgcgaccaccagcccctcgatccggcccttgttgcgacggatggtgagcgcgtcgagcagcgcctgggtcggatgctcgtgcgcgccgtcgccggcattgatgacggaaccgtcgaccttgcgcgccagcagttccaccgcgccggaggcgtgatggcgcaccaccaggatgtcagggtgcattgcgttcagcgtcacggcggtatcgatcagcgtctcgcccttgcggatcgaggaggacgacaccgacatgttcatgacgtcggcgcccagccgtttgccggcgagctcgaacgaggactgggtccgtgtggaggcctcgaagaaaaggttcacctgcgtccgtccgcgcaggacggtgcgcttcttgtcaacctggcggttgagctcgacatattcttccgacaggtcgaggaggccggtaatgtcggcggcggaaaggccctcgatgcccagcaaatgccggtggccgaggacgaaggtcgatttcgatgtcattaaaagcagagctatagggggggatggcggggggagcaagcttcaaatcccgcagctggacttatccacggcgctttagaggcgggacggcgccgccagcctgtgtccgcggcggccgctttgcgctagactcgcgccgtacgttgcgtcacgggctggagtatgaggagcacgcggtatcttaatcgactggcgcgctgtgttgctgccatggcggccgcgtgcgttgtcggtttggcggcgcccgcactggcggagaaacgcgtggcgctggtcatcggcaacgatctctatccgaacctgccggccgaccggcaattgaagaaagcggcgaatgacgcgacgtcggtggccgacgcgctgagatcacttggttttgagatcgtgctggggaccaatctcggccgccaggcaatgatcgaccgtctcgcggatttcacggcgcggctggagccaggcgataccgccgcggtgttctatgccggacacggcgttgcgatcgcgggcgtgaactacctcgtgcccagcgatgtgccgaccgtcaacgagggcgccgaagcgcgggtgcgcggcgcctccattgcggagccggatgtgatcgcggagcttcaggcgaagtcggtgcgggtcgcgttcgtcgtgatcgatgcctgccgcgacaatccgttcccgcgcgccgcgggccgttcgatcgggaacacgcgggggcttgcggattcgaagccggcacgcgggatcttcacgctctattccgccgggataggtcagaccgcgctcgaccagctcagcagcaacgatacggcgcataattcggtgttcacgcgggtgttcgtcgagcagcttaagcggcctgaactgcatctcggcgatctcgcagtcgaggtgcgcgagcgcgtggcggcgctggcgctgacggcgagcgatggcgccggagagcccgtgccgcacgaccagacgccggcctattacgaccagacgctcggcgggcggatctatctctgggcgtccctctcgtcggagcggccggtggcaggcatgttggtgaagccgcaagcgagaccggcggttgcggagcgtgcggccatgcgtccaccgcgtccgtccgcggcaggcgaaagctgcgcccgcagcggcttcgcgacctattgcgtcagctcgatgctgaagccgcagttcggcaactcatacggcgtggcgaacttgttcgacgcctcgacgggaacggcatgggtggagggcgcctcgggcagcggcatcggcgaatggatcaccatcgagttcgaggccccgcggcgggtcaaatcgatccatgtgcagaacggctatcagaaaactcccgatatctttgccaagaacaacagggttcgccagatccgattgcagttctccgggggagagtcgcagaccttcaccctcgacgacaagttttcagcgcagctcctgacgttgcggtcgccggttacggcctactggctgcaattcgtcatcgacgacgtctgggccggcaacaaatatacggacaccgcgatcacgaagcttctggtcaactcggatccggtgcaatgattgcaaggaaggacatcacggcgcgggccgcgctcgtcgcgttgcttgcaacatttgtcctcgccccggtgcgcgcgcagaccttgcccggcggcttcgtctatctgcgcgacatcgaacccagcatcatccaggatatccgctacgccacatcgaacaatttcgtcggccgtccgctcgccggctatggcgcgggcgagtgcgtcgtgaagcgcgaggtagggctgcgactgaaggcggtgcaagaagagctcgccgcccagaatctgtcgctgaagatgttcgactgctaccggccggcgcgggcctcgctcgacatggtgaaatggtcgcagaacggtcatgagacggcggccgagcggcgctacaacccgaggattcccaagaccgagctgttccgcctcggctacatcgcgagccgctcgcagcattcgaccggcgcggcgctcgatctcacgctggtcgacctcaaggctgacaattccgccaaatatgatccgtcgaagagctatgccgattgtacggcgccggccgaggtgcgggcgccggagggcagcgtcgacatgggcacaggctacgactgtaccgacgtcaggggccatacggcggcaccatcgatcaatccggagcagcgtgcctggcgcaagcggctggtggccgcgatggccaggcaaggctttgtgaactattcgaaggagtggtggcatttttccctgccgggggcgggcggggcggcctatgatttcccgatccagccgcggacgaggtagattcaattgaagcggatgcagccgcgagcaggtttatctctcccgacgggagaggcggcactgctcgcgtcgagatgaattcgatcggaattaccccatgacccagccgaactttgcgacccatgaagtcttcaaccagtcaccgcccttcgaggacgtcaatctctttaccctggaccagccgttggtcgcggcggtgaaggccaatggcggcgcggcggcggaacgggaactgtccgcgttcggcaaggagtggggttctgcggcgatggccgatcgcgggcgcctcgcgaacgagaacacgccgaagctgcgcagcttcgatgccaagggtcaccggcgcgaccaggtcgagtttcatcccgcctatcacgaactgatggcgcacagtgcgcatgcaggcgtgcacaattcgacgtggacggccgatggacgaccggcggacgatgccgccgaggtcatccgcgcggcaaaattctacatggctgcgcaggtcgagaccggccacctctgcccgatcacgatgacgcgcgcttccgttggtgcgctggcgatgcagcccgacttgctggcgcgcgtcatgccggtgctgtccacgaagagctacgatcccggctttgcgccgtggtggggcaagcgcggcatgacgctcggcatgggcatgaccgagaagcagggcggcaccgacgtgcgcgcgaacatgacgcgcgcagttcgcgacgggaatgcgtatcgcatcaccggtcacaaatggttcatgtcggcgcccatgtgtgacgcgttcctggtgctggcgcaggcggatggcgggctgacctgtttcttcatgccgcgcttcgcgccggacggttcggtcaacgccatccagttccagcgattgaaggacaagctgggcaaccgctccaacgcctcgtcggaggtcgagttcgtcggcgctcatgccgaacggatcggcgaggaaggcaagggcatccgcaccatcatacagatggtgcagttgacgcggcaggattgcgcgattgcgtccgtcgggctgatgcgttcggggctcgcgcatgcgcttcatcatgcgcggcaccgcagcgttttccagaagcatcttgccgatcagccactgatgcaggcggtgctgtcggacatggcgctgcatgtggaggcgagcacggcgctggtgatgcggctctgccgcgccttcgaccgcacgccgcgcgatgcggcggaagctgcctatatgcggctgctcacgccggcgatcaaatactggacctgcaagagtgcgccgccattcctctatgaggccatggaatgcctcggcggcaacggctatgtcgaagacggcattctggcgcggcactatcgggagtcgccggtcaacgcgatctgggaaggctcgggcaacgtcatgtgcctcgacgtgctccgcgcgctctcgcgcgagccggacgcggcgatgacggtgctgcacgcgctggcagccgaaaccaagggcttgccgggagcagggcaagcggttgcgttcatcggcaagaccttccgccgcgccgacggcgagcgcgtcgcgcgcctggcggtcgagaagctggcgttgctcgccgctgcggcggcgctccaggcggtgtccccacacaatgccgaactgtttgcgagcacgcggcttgcgaccaatcatgccagcatgtacggcgcggtggaactcgagagtgccgatgtgcgcatgctgctggagcgggcgctgccatgagtgtttgatctgtggtccgggcgatccgaaggacgaacccgggatctcgagagtctcgggcgcgcaattgcgcacctgagttcgatgctgcgcatcgccccggaatgacggtgaagctctaacgaaagcctcctgatggactccctcaatcccgatcatccgccactgacggaagctcctgtcgcgccacgcgtctggaagttctggggcactgcgctctgggggctcttcatcttcgtcgcgatgttcgtcgggcagatcggcgccgtcatcgtgctcgcggcgcagcgcggtcttccaatggacctcgcctcgctccagctcgtcggtcgcgagccccagacgctcgcgttctcggtcatcatgggactgccggcgacgcttcttgcggtttggctcgccattcgcatcaagagggcttctttcgtcgactatctcgcgctgcattggccgtcgtggaagcagctgctgttcggcgccatcggccttatcctgatcgtggtggtctgggagaccatgtcacgcgcgctcgggcgcgaagcgacgccgggtttcatgaccgatctgttgaagtcaggacgagacaagggcgccgcgctgttgcttctgttcgccttcagcgtagccgcgccgacgtcggaagagattctggcgcggggcttcctctatcgcggctggtcggcgagcttcctgcgcatacccggtgcgatcctcctgtcgtcgctggtttggacaatcgtccacctgcaatacgacatgtacttcctcgccgaagtcttcgccatcggcctctggttcggctacatgcgctatcgtgccaactctctctggctcacaatcatgctccatgcgttgaacaacctgacagcagtggtgctgacgatgtggctggggagctaggccgccagcccgatcgcgatcggcatcgtaatggctgcaaagatcgtctgcagcgtgatgatctgggccagcagcggcgcgtcgccgcccatctggcgggcgaggacataagcgctggacgaggtcggcaccgccgagcagatcgccacgatcgcgaggctgttgccggacagcccgaaccagaaaccgagccccatcgcgagcgcgggcatcagcaagagcttgaaaacgacgccgacggctgcaccgaggcttggacggaagagcccttcgagatgcagccccgcgccggtgacgagcaggccgatggcgagggaggaactgccgagcgcgtctgcaacctcatgccagagccttggcagcggcaggtgggtgacattgacggtaaggccgatgatgcaggcccagatcaggggattgcgaaccaaggtgatgacgatggcgcggccggattgcttttccggcgatgcgtagcgagcgagcaccgagacgctgaacacgttgacgagcgggatgatcgccaccatcgccacggaggcgagcgccagcccgacatcgccgaacagattggcggcgatcgacagcgccacgaaggtctgccagcgcgtcgcgccctggaagatcgaggtgaaggcggggccgtcaacgccgagccgcgacagggctgggcgcagcgcgaggcacaaaagcgacatcgccagtgccgacagcagcagcgcgccgccgacgccggcgaccggcaccttggacaggtcggccttcaccagggtctggatcagcagcatcggaaacaacacgaaatatgtcagcagctccaacccgtgccattgcgtgtcgagccgcatcaggctgcgcttcagcacgatgccgagcacgatgaggatgaagaccggcagcaaggccgcgatcacgacggccatcggtcaggcggccccgggacggagattggcgagacggtcgagcgcgccttgcaggatgaacatcgcagcgtgttcgtcgatcacctcggcgcgcttggcgcggctgacatccatgccgatcagctcgcgctcgaccgccgctgtcgacaggcgctcgtcccacagtccgatggggagcgcggtcagaccggcgaggttgcgggcgaaggcgcgggtcgactgcgcgcgcgggccctcgctgccgtccatgttgatgggcaggcccagcacgaacccggccgccttgcgctcggccgcaatcgcgagcaggcgcgcggcatcctgcttgaattgcttgcgctggatcgtctcgacgccggtcgcaagccgacgatcggggtcggacacggcaacgccgatggtcttggtgccgagatcaagcccgaccagcgcgccgcgcgcgggccagtgggttacagcatcgacgaggggcaggataagggccgacatggcgttagcgcatatcacgcgtcgtgctgtggcgtgaacccggaacaatggatgtgctgacattattcgacctgttcgcggtcgcggcgatgccgatcacttacgccctggcggagtgcggccaccgattcgtgctgctgttcgcgcctcatgcgcctccatcgtcgcaccgcggcggtggcacctgaaggcgataggaagaagcgcgtgaagatgaccacgcacaaatgcagcggccatttgtggtgaatctcacacgggcgatgttgcggaccatggcatgatctcgcgtcctcagcggtgcaccttgattgacgttctggttgcggttcggcagtgatgtatgtataagtagagtgaggcgcgtaccccaattttcagaacgatcgccagcgacccgcagtcgggtccgccaggcaaccttggcgcagatttttgaggcgccggccacctccgacattcgctcagtcattttgagaggttctgatgctcatcaagccaagcctcatcgcgggctccgaaaggcgattcaagcaagccgagttctcacccgatgccttgaaccggaaactgggcgacggcccgatcgagatgtccgtcgaaaagatgcgcctgcgccagcgccagctactggccgagacgcacgacatgcaggcagcggagaaagggctggagcggatcatccagggcaatgatctcgacagcatcaattatctcgcaaaggggacggccgccgcacgctctgtttgccgtattcagctgagggatctgaagtcgaacctgctcggctatggctcgggctttctgatcgggcccggcctgctgctgaccaaccatcatgtcttcggcaagccggcggacgccgcgaattcgattgccgatttcaactatgaactggatatctcgggacaagagcgcctgccggagaggttcggattcgagcccggcagattcttctacaccaatgacaggctggatttctcggtcgtcgcggtggcccagacttcgctgtcgggccacgagcatcttgacgactggggatggctgccgctgagcggtgcacccggtaaggcagacccgggcgaatatctcaccatcatccagcatcccagcggccagatgaagcaggtctgcgtccgcgagaacaagctgctcaaatatgccggcgacttcctctggtacaacaccgacacgacggctggatcgtcgggctccccggcgttcaaccgcttctggcaggtggtcgcgctgcaccacagcggcgttccgcggaaggatgggcagggccgcaccctgaccaaggacggcaaggtatggaagccctcgatggacgaatcctcgatcgactggatcgccaacgaaggcatccgagtcagcgcgatcgtggccgatctcaaggtggccgtcggctcccccccgttgatcaagccggtgttggatgaggaagagccgccaatccggcaagagagcgcgaaagtccgggcgccggaggccgtgcctgcgttcggcgccaatttctgggtcgagcagtccgtcgacggcacctctctcgtggttccagtgcgcgtgccattgccgatactcaggaaggaaattccgttcgctccgctcgcccccgtgccgggcccggcgggagctgacggaggtacagcgaacggcagcatacacaacggcggcaagccgctgatcgccccgccggctggcctcctgcctcacatcagtccgagaaacggcctgcccatggaggccgtgcatatcgatcagagcacgctgaaatcgcgtccggggtacaaggcgaacttcctcggcaccggaaaattctcggtcccgttgccgaagattccggccgccctcaagtccaggatcgcgatgctcaagggcagctccaggcagttcgagctgagatatttcaactacagtgtggtcatgaacaagcagcgcagactcgccttcttcagctgcgtcaatatcgacggcgccaagcagcaggacgtcggcaagcgtgaaggcgattcctggctgcgcgatccacgcatcgacgacgatgcccagatcggcgacgagttctaccgcaagcaggcgaccttcgaggcggatcgcaccaggaatccgttcgatcggggtcatctcgtgcgccgcctcgatgcgacctggggcgacaccgtcgccgcggccaagcagcatggcgacgattccttccatttcaccaactgctcgccgcagttcttctcgttcaatcagggcaagcagctctgggccggattggaggactacacccgcgatgtcctgctcgaaggcgaggagaagggcatcgtgatgaacggtccggtgttcgatggaccggacgccgacggatccgatctgcccaatccgaacggccggccgcacaaggacccgagcttcggcggcgttcagattccgaaatacttctggaagataatgatccggcgcgacgaagacggcctcaaggcggcggcattcctgatgagccagcgcaagcaggtcatggagatcgaccgcatccgggaggcggatctgctcgagcggatgtccgaggaggacgtcagcgtcttccaggtctcgatcgccgatctgacgaaattgaccaagctcgacttcggcaatcttgccgacgcggactcgcacgaggcgacctcggtcggtccgcgtcggatcgagtcctatgaggacatccggatctgacgtgcggggcgggtgagggcagcagtgcgctccggagagacactgcaagacctcacccggccttctttccaggccctcgcgggcgtcagcggatcgcgatcgggttgatcatcgcctgcacgccgccggtccagcgcggctgtcccagcacgaaaaggaactcatagcccttgtcgcgtgcgagcgcggccgtgtccatgttttcgagaatgtaggtcccgttcatcgcgagcagaatctggtgcacctcgaacacgttcttggattcgaacggcagcacctcgagtccccaggtatcggcaccgacggcgacgacacccttgccggtgagatattttgccccctcgacgccgagcccgggctcgccggccgaatagcgcttgtcgtccttgccgaccaggctgagccagccggtgtggaagatgacgacatcgccctgacggatctcgacgttctgctgcttggcggcctcctcgatctccttgacgttgaacgcggtgccttccttgaccacgtcggtcttgaaataggctgccatgtcgagcaggacgccgcgggtaaccatcggcggcaccttctcgatgccgagcttcttcagccccgtcggatcggcgaaatcggcgagcttgttgccgttgtaatagacgtgctcgatgccgagatggccgaggccgtcgagctggctgccgacgccgacccagctgtcgaggatatcgtcgttgtaggtggccttgttggggccaagaccggaactgccggcctgacccggctgcacaacggtgatcttgtaactgcgcggcgggtaggccggcgtttgggatgtgacgggcatgccgagggcgtaggtcttgccggtcttcaccagtgaggcggccttcaccacgagctcgggcgtcatgtagttggcggagccgatctcgtcgttcggcccccatttcgacttggtccagtcctgggcgtttgctgttcctgatatcgccgacaatgcgacgacacagcacaacacgagcgtattgcgcatcgaatagtcctcccgatgttcttgccgatgtccggcttcgttatggttttgcgctggccagccagtcatcctaacgtagaacgatcgagggcttcaaagcttttcgatgtgctgcgttgccgcggcagaatatgcgcggacgcgcggtggatttgtgacgaatttcgtggagtggaacgctgcgtcgcgtcaggccgcgatgacctcgtcgtccctggcaagggactcgacaaaaccgctcagcgcgctcgtttgatgtccggcgcggcggtggatgaacaatgtctcgacgcgcgcatgcgacgggctcagcgtgtggatcgagatgctggcgctcatcgcgctgcattcaatcaccgcgcgcggcagcagcgtcactcccatgtcggcggcgacacatccgatcatgccgtcgagcgtgccgagctcgaagcgtgccgccgacggccagccgaactcgacgaatatttgctcgagccgctgacggtaggtacaaccggtgcggaacaccagtgcggtcgggccggactccggcgtgccagcgcgcagctcggccagcgaagcccagcgccgcgcgctgaccagcaccagctcctcgcggaatgcaatcgtagccgtgagatcggcgtgcgtgatgggccccgcgacgaaggcgccgttaagcgtgccgtcgagcacgtcggcgacgaggtcggcggtcggcgcggtgcgcaaggaaagacgcacggcgggacaacggcgatggaaatccgccagcaagggtggcaggcgcacggccgccgtcgtctccatcgatccgatcgagagcggtccactcggctcgccatcatcgcgcgcagcaagcacggcctcacgcgccagtgccgccatcttcagcgcgtaggggaggaggcgcctgccggcgcccgtcagcgtcataccgcgcgaatgccgttcgaacagcgccgtgccgatctccgcctccagcgccttcacgcgctgggttacgttggactgcactgtattcagcgcttccgcagcgcgggtaatgccgccgacgcgagccactgccgcaaaggtctggagatcgctgagttccatatctcgtttctcttttgagatggcaacgttcgtaagaattcaattttcgagaatgtaagtcaggcttagtctctctgtccagatcgggggagggaccatgcccattgcgacatcgctgaccaggctgctggagatcaggcaccccatcctgctggcgccgatggatattgtcgccggcagccgtctcgtctcggctgtgagtcgcgccggtgggttcggcattctcggcggcggctatggcgagcggacttggctgaagcgggagacggcgaaactcgcggatctgcgtgcgccgttcgggatcggcttcatcacatggagccttgccaggcagcccgagcttctcgacatcgcactcggcgcaaagccttccgcgatcatgttgtcattcggcgatcccgcgccgttcgcgccgcgcatcaagtcggccggcgcgcgcctgatctgtcaggtgcaggatgaagcgatggcacggcaggcgctcgaggccggcgcggacatcctgatcgcgcaggggaccgaggcgggcggtcacggcgcttcgcggaccagcatcgatctgctgccggccatcgtcgatcttgccgcgggtcgtgttcccgtggtggcggccggcggcatcgccgacgggcgcgggctcgccgccatgatgatgctgggcgcgagcggcgtgctgctgggcacgcgcttctatgcgagtcaggaggccgatggcgcggaggaagccaagcggcgcatctgtgcggcgagcagcggctcgacgctccgcggcatcatcttcgatctctcccgcaacaacgtctggccggcgccattcaccggccggtgcctgatcaacgaccatgccaggcgctggatgggacgcgaagtcgaactgatgcagaatgtcgccgcagtcgcggcggagtatgcggcggcaaaggcggccggcaatttcgacgtggccgccgtgatcgcgggagaggcggtcggcttgattcatgatattccgccggcggccgagatcgtcgatcggattgcggttgaggtcgagcagttgctggaggggcggcggaattccggtgcttcttttccttctccccttgtgggagaaggtggcgcggatgcaatccgcgccggatgagaggttctatccgcggagcgtaaagtcaaatttgagaggtctgtctctgcggatgcaaacccctcacccgtctcgccgctacgcggcgatccaccctctccctcaaggggagagggcaagagcgaggcaagaaccatgtggcctgaccgtcgactgatcgatctcttcaagaccgaattccccatcgtgctggcgccgatggctggcgtgatggatgcggagctggtgattgcggcggcgcaaggcggggcgctgggctcgctgccgtgtgcgatgatctcggcggagaaggcgcgcgagcaggtcgggctcatccgccagcgcgtaaaggcgccggtgaacatgaacttcttctgccacacaccggtcgagctgacggcggaggccgaggcgcggtggaagcagcggctggcagggtactacgccgagcacggtctcgatccggcggcgccgatcgccgcggccgaccgcgcgcccttcgacgccgccttctgcgaggtcgtcgaagagctgaagccggaggtcgtcagcttccatttcggtttgccggagccgtcgctgctcaagcgggtcaaggcggccggatgccgcgtcgtctcgtctgccacgacggtgaaagaagcggtctggctggaagagcgcggcgtcgacgccgtgatcgcacaaggtgccgaggcgggcggccatcgcggcatgttcctcactgacaagattgcagaacagcccggcaccttcgcgctggtgccgcaggtcgtcgatgccgtgaaggtgccggtgatcgctgccggcggcattgcggacggtcgcggcattgccgcagcctttgcgctcggtgcctccggcgtgcagatcggcagcgcttacttgcgctgtccggagtccaaggtcagcgcgggcggccgcaaggcgctcgccgaggcacgagacgattccacggttatcaccaatgtcatgaccggccgtccggcgcgcggggtccagaaccggctcatgcgcgaggccggcccggtctcgccggatgcgccgccctttccccatgccgcgaccgccctggggccgctgaaggccgccgccgagaagcagggcagggtggattttaccaatctctgggccggacaggccgtggccctcggtcgcgaggtccccgcggcagaattgacccgcgatctcgccagatcggcgctggctcgcctgaaagcgctcgccggataggcctccaggttattgtttccgcatgatcttttcggaaaaccgcttcacacttttccggatcatgcgctagcgccggttgcggcgcaaaaccggcctctgctatacggcacatgggttttgccgtgagaggccatatataatgtccgtcgacgccgctaccgtccgccgcatcgcgcatctggcgcggattgcggtttccgaggacgacgttccgcatctgcagggcgagctcaatgccatgctcgcctttgtcgagcagctctcggaggtcaatgtcgtgggcgtggagccgatgacctcggtcaccccgatgcagatgaagaagcggcaggacgtggtcaatgacggcgagatcgccgacgatatcgttgccaatgctcccgcgaccgagggccacttcttcctggtgccgaaggtcgtcgagtaacattgcgttttcgagcgaagtggaagccggttcgcgtgaagaaaacgcgtcaaacaaagagtcttaggacgtggtccgatgtgcctgctttgcgacgatgagaaggcctatcaggcctatatgaactatctcgacaagatggagcggcagggcaaggctgccgatcccaatgtcgccgtcaatgccgtgctcgatgagctcgaggctgctgcgaatgccgctgccaagaaagacgacccggccaacgacaagaccttgtctccgttcttctgcagcccgatcaataaatgaccgatttgacatcgctgacgctcgcagaggcccgcaagggcctcgcggccaagactttcacgtcactcgagctgaccgacgcgcacttgtccgcgatcgaggctgcgcgcgtgctcaacgccttcgtgatggagacgcccgacaaggcacgggccatggcgcgcgaggcggacagcaagatcgccaagggcgatgcggggccgctcgccggcatcccgctcggcatcaaggatctgttcgcgaccaggggcgtgcgcaccacggcgtgctcgaagatcctcggcaatttcgtgccgacctacgagtccaccgtcacctcgcagctctggcgcgacggcgcggtgatgctcggcaagctcaacaacgacgagttcgcgatgggctcgtcgaacgagacctcctgcttcgggcccgtcggcaatccctggcggcgcgacggcagcaacaccacgttggtgccgggcggctcgtccggcggttcggcctcggccgtggcggcgctgctgtgcatgggcgcgaccgcgaccgacaccggcggctcgatccgccagccggcggcgttcaccgcgaccgtcggcatcaagccgacctatggccgctgctcgcgctggggcatcgtcgcctttgcctcctcgctcgaccaggctggtccgatcgcacgcagcgtccgcgatgccgcgatgctgctgcgctcgatggcgggtcatgaccccaaggacacgacctcggtcgacattcccgtgccggactacgagaccgcgatcggcaggtccgtgaagggcatgaagatcggcatccccagggagtatcggctcgacggcatgccggccgaaatcgagaagctgtggcaagcgggcgcggattggctcaggagcgccggcgccgagctcgtcgaggtctcgctgccgcacaccaaatatgctctgccggcttattacatcgtggcgccggcggaggcctcctccaacctcgcccgctatgacggcgtccgctacggtctgcgcgagccggccaagaacatcatcgagctctacgagaacacccgcgccgaaggctttggcgccgaagtgaagcgccgcgtcatgatcggcacctatgtgctctcggccggctattacgacgcgtactatttgcgcgcccagaaggtgcgcacgctgatcaagaaggactttgaggactgcttcgcccagggtgtggatgccatcctgacgccggcgacgccgtcggcggccttcggcatcggcgagaaaggcggcgccgatccggtcgagatgtacctcaacgacatcttcacggtgacggtgaacatggcgggcctgccaggtatcgccgtgcccgcgggcaaggacgcgcagggcctgccgctcggcctgcaactgatcggccgtccgtttgacgaggagacgctgttctcgctcggcgaagtgatcgagcaggccgccggccggttcacgcccgcgaggtggtggtgaatgtcgctgacttcatcgcgagcctcgacggcgcggcgccggcgcaggagctgagtgcgccgctcgtaggcctctggtgggcagcgaagggtgactgggaccgcgcgcacaagatcgtccaggacgacaacggccgtgaagccgcctgggtgcatgcatacttgcaccgcgtcgaaggcgatctgggcaatgccggctattggtaccgccaggccggccaggtcgcagcaaaggattcattggaagcggagtgggagcggatcgctgccacgctgcttgggagcaggacatgagcacggcaacgcacaagcttctcaagggcgccaccggggattgggagatggtcatcggcatggagatccatgcccaggtgacgtcgaacgccaagctgttctcgggtgcctcgaccgcgttcggcggggagccgaacagccaagtctcgctggtcgacgccgcgatgccgggcatgctgcccgtgatcaacgaggaatgcgtcaggcaggctgtccggaccggacttggcctcaacgcgaagatcaacctgcgctcggtgttcgatcgcaagaactatttctatccggactcgccgcagggctatcagatcagccagtacaagtcgccggtggtaggcgagggcgaggtgctggtcgagctcgacggcggccgcagcgtcaccatcggcatcgagcggctgcatctggagcaggatgccggcaagttgctgcacgaccggtcgccgaccatgtccaatgtcgatctcaatcgctgcggcgtggcgctgatggagatcgtctccaagcccgacatccgcgatgccgagcaggccaaggcctacgtagcgaagctgcgctccatcctgcgctatctcggcacctgcgacggcgacatggagaagggatctctgcgcgccgacgtcaacgtctcggtgcgcaagcccggcgggccgctcggcacccggtgcgagatcaagaacatgaactcgatcaatttcatcggccaggcgatcgagtacgaggcgcggcgccagatcgagatcctcgaggatggcggccagatcgaccaggagacgcggctctacgatcccaacaagggcgagacgcgctcgatgcgctcgaaggaagaggcgcacgattatcgttacttccccgaccccgacctgttgccgctggagttcagccaggcgttcgtcgacgagctgaaggcccagctgccggagctgcctgaccagaagaagacgcgcttcgtcgccgatttcgggctctcggcctatgacgcgagcgtgctggtcgccgagcgcgagagcgcggtcttctacgagacggtgctcgacaggctcgccaaccgcgcccgcgacggcaagatggcggcgaactgggtgatcaacgagctgttcggccgtctcaacaaggaaggccggggcatcacggactctccggtcgatgcccaacagcttgcagccatcatcgacctgatcggcgagggcacgatatcggggaagatcgccaaggatctgttcgagatcgtctggcaggagggcggcgatccccgcgcgctggtggaaagccgcggcatgaagcaggtcacggatctttcggcgatcgaaaaggttgtcgacgacatcatcgcggcgaaccccgacaaggccgcgcaggtcaaggacaagccgcagtcgctcggttggttcgtcggccaggtgatgaaggcgtcgggcggcaaggccaacccgcagagcgtcaacgacctgctcaagtccaagctgggcgtctagcctcgcacgtgcgtacgaggtgacggacacgcttcgtcacctcgctttccgcttcggtgcgacgctcgcgcgcatgctcggaagaaaacttcatcccgatccacgctgctgccgcgaccgaatcgccgtcacgcgattcgcgcaaaacggcggcttgcacaggctccgacgagcgattgcgccgttaagcacgaaaatattttcgttgccaaaattcgcgactcagagtccgcgaagcgccccggcaacgtgatcgccgaggtgtcgatgcacatcatcgcatcgatcgcgcgtgatgcgcgcgtgcagaaaaatacttgctgcatagtgttttcatgcaatcgcgtctctctcgaacgccgatgctgcgagtgctccttgcgatcgctcgcgcgcgtcgcgcagtgtgcttgcgtcgcgctcgcaagcgcacgcgcgttgcgtcgtcaacacttctttaagcgagacgctgtttttttcttcgtgttggtgtattcgggatgaagtgcattcgatccccgaatgcacgcagcgattaaagccatctcacacatcggagggcaacatggccaagaaagcgaagaaggcgaagaaggcgaagaaggcgaagagcgcagtgaagaagactgcgaagaagacccgcaaggtcgcaaagaagaagtaacttcgcttctgaagttgccggcttcagatagccggcacgtcatcagcgccttcgaggttctggtcgacgatagagggtgtcggcgagacatcaggtcaacggtcggatcgttctccttcacggtccggcagaagaaacgagttttcttcgttcggtgcgggtatcctttttgagagccccgcaatttcgcaagcagccttcgggctcatgtgaaatctggtcctgacgtgttcgccgacgccctcgttctcctgaggccggggtattgccggcattcctttccccacattgctgatctgaccgggacggcgcccagctgacgtctctgcctccgaccgtgggcaggcgagggttgcggcttgacttgcgccgctcgcgcgccgcgtctggagttgcggtgccttcgcctggctccgacgggacaatccagcacaccgtggcttctcggtggatcgccgttgtctctggaagctgcatcaccgctctgggaagatgcgatgcgcggcgcgcgataggccacagcgcgcatccgactgcgcgtgatggttatcgatgtcctgaattccaacggtaaaccgaatctgacgaatcgcagaagtgcctgcaactcaggagctttttggattccgcagctcggcgtcgcacacccgcgtttacgtctgcttcatcgcgatacttaccccgcgggtcacttcaaattcctccgggt

SEQ ID NO: 158 - DNA, 5330 bp, Bradyrhizobium colbertium
tggattgcttcgtcgctgcgctcctcgcaatgacgatcctacctgacttcatcatgctctagtagtcattctagtcggcataaggcgatggcgcggtgatcggactcaccgcgccatccaggctctttggttgaaatcgggccgctatccctgattgcctgccgaggctcgctcgtcagcaatacctcaacggcaaacagaatctgctcagtgctgctggatcagcgcgattaccgcattcggacggaaggaagcgatcgagcagaaagattttggagaacatttcgcagagatcgggtgttgcgcctccaggacttgaactcgctcggcaaccgttcgaatggtagttcgatagcccacagaaggcggctcttcgccgactatcaaagcgccgttaggccaattacgctgctcgccgataagagaacagggctcccgaaatagtgggtttagcgatgtaacggactccgctaccaaatcctacgatttcctgccccaatccacgattttgcgcgattgtgcaatggaaggtgacgctcagcacggctgattgttcttacggggggaaggagcgcgaattcgccactcggcgtcgcttttagaggtccgagcggaatccaagcatgtttctacgcgtctgttactcattttgagatcaccgcggcgccgaggcaccgttatttagatcggcttttgtaagccagatcggaaagcagtcttcctcgtcgaccagttctgaatacatctgtgatggccaggaatccgtcaggcacagatccagctttttacacagttcgttgggatcaacatctgtgccaatgaacacgagctcttgcttgcgatcgccatatctcgggtcccatgtggcctcaagctcgcgtcgccacaggggatccctgggccaaagagtcttgctgattgccgaccaccaccaactccgtccagtcgttcgcaccagcgctccgcaatgactgagctcaccgacccaccgaggacgacttgcaagccagaagaagccctttgcacgcaagataccgctccaggggctgacgagaaattctgataaccgtgtcggatcaaatggacgacgggcgcggtagacgaaactcgaaatgccgtactcctcggtttcgggtacatggtctcggaaaccgtcgagctccttcttccaaagcggatgcatgtgcgctcggtcgttgtcaaaacggttgacatcgatcagttgccgaagatccaaacgcgcgaaatccgcctcaagtatcgttgcgtcagaattaagcccgcgcacgatcgaatatgcggagtggcgctggtcaatgctggccgacgaaatcttgttcaggacgatggtatcagcgaactctatctgatcgaccaaaagttcgacaatcgtccgtttgtcatcgggtgatacggtctcgctcgaattcaagaattcgcgcgaccaaaaattgcgaacaatctgagctgtgtcgacaaccgtgatcatattgtcaatataggcgatatcgtcgaggctcgaaccatctgcgtctcgatacgcgaatgcagcggcgatcggtaacggttcggaaatgcccgtcgcttcgataaccaaattgtcaaaccgccgttgcgtggcgagttttctaacctcatcgatgaggtcaccgcgaagcgtacaacagatgcacccgttgctaagttcaaccagcgcttcgtcggtacgggatagctgcgcagccccggattttattagggctgcatcgatgttcacggccgacatatcgtttacgatgactgcgatgcgtcgaccagtccggttcaaaagcaactcgttcaatagggtctgtttgccggcgccaagaaatccggacaggaccgtgaccggaagctttcgctttgttcgcctcaacatcgaagatttccactatccgcagacgccgctggttgctgtgctcgagcggcgaccgaaagcgttggtcgtgttcgcgacgcagcttcttaaggtgctcttgagaatcccttcgaggttcacgtcgttccgccgaagacgccggatgcacagattactccgccgcaatggccactggtgctggcgcgacatccttgaagaccgccgtactgttcgcggtttccgccatcaccgggaaaatgaaaccacattttggacagggctgagcgagggcggtctgctcctgcgcaacatcgaaagccgtatccgaaatatgcgcgcatgccgggcaaacgcgaatgaggcgcgcgttcttgtattcgaagttgacgatgatgtcttccatgatcgcgccggtacggacagcccactccttcgcgtgtttgtggtacgtgtccatatgccagtctttcagcgcctcgaagctggtccagaagctgacctcgttataccagtgcgggtcatctggatgcacccaccacgtcaaatgcaggaatccgggaagtttcttcaggtgatgacgcacattggagaaaacgacctggaatttcttatagccgtcttcgctcgaaaaccgcacgcgctgcatgctctgataaaccgccatttagggcctccgttgagacgatctacgctgaggaaaagcttagaatgatttctgaggaaagcttggaccagtgatgcaatttttaattggtccagagcatgctgagacggcgacgtccaacgccaatgctagaattcatgacgcccgtcgcgcgaactggttggcctcagttcttttcatcactgtggcccctccgaaattgacgctgcggatcgatattctcgctggtgtccatttggtggacctagcgagagccgcgctatcgagagcccaccgactgcccgacccgccgggtcggtcagtctttcaattcgatgaggcgacgtgcgatcgcgcgacgcccgctcaactcgcgtggttcttgattgccacagcaacgcgcgcgatcgcatcgcggatttcaccttccgacaatgcagtgtagccaaggaccagggcccgatcccgcaattgtgccttgccatactcatgggccgccgccttggaaagtggatagagtcccactccacggctaagcgcgagggaatgtaattcgctcgccgtcggcaaattgggtggcagcgtccacatcacgtgcatgccgcattcacggcccgaaaggacgccacccgggaactgatgctctatcgcgtcgaccagagcatctcgagcggccatgtacgatcgtcggatacgacgaagatgccgaatgaacgccccttccttcaagaaatccgcgacaaccgcttgttccagccagggtgccccatgatcaagcaaagcctttgcgatccaggcctgatcgagtaggtggcgaggaagaaccgcgtaaccgattctgatccctgcgccgatcgatttggaaaatgtgcccaggtagatgacatgtcctcggcgatccagcccagctagagcggccaagggtggaccatcgtagcgaaaatcgctgtcgtaatcgtcttcgatgatatagcttcccgtttgatacgcccagctcagcaggcggagcctgcgctcaaggctcaaagtacagccggtcggaaactgatgcgacggtgtcacatagacaagactgccgagaaatccttcgagctgagatacgatcaacccatgatcgtccacccgcaccgggtgtatattggcaccgtagctgctgaacaaaaaggctgcgccctgatagcagggattctcgacagcgacaccggtttccccaggtccgttgacgaagatgcgagccagcagattgagcgccccctgaatgcctgaggtgattaggacctggtcggcatctgcctccatgcctcgcgttgtcctcaaatgatcggctattgcctcgcgcagagcgctcagcccgcggggatccccatattgcgtcggagtcccatgagcaaaggccagatggcgcgccgtggcgctacgccaaaaggttgtcggaaagcttttggcgtgtggacgcccaacaaagaagtcaaatcgcggacgcgcccgctcttccatccagagcataggggctcgtccggtgaatgttggattctttccaagacgaacgcgtcgcccctttgatgtaaaggtcgagtgcccgctcccgaccagcacagcagcatctggaagcttgtcatttatgaagatgccggccttcatccgggaattgatatagtcttccgccgcgagacgttcgtatgccagcaccaccgtgttacgggcgatgcccaattgttccgagagacttcgcgacgacggcagctgttttccggctttgagagtgccgttcaggatcaaagtccggatcgattcatagatctggacttgcaaaggtcgtccatccgcacggtcaatgctgatcaataagtgcattgagttcctctcggaatcatacctgtttgtggtgtgatgttcggagctcaagcatcgctggctcgaacaggactcgaatctggacccatcgaaacgcccgttaggggcgtcgccggcacgccacatcgtcccccgtcccgcttccgcagtcaatctaactgtgtcgccaaaacggatggtcgcgggccgaccttgacccggcaggccgcaagtttcgcaatcaccaaacgaaatcgacacagacggtatatgggttgcgcgacgaaggtagccgtcaccgtggcgaacacgagcggcgttattgggttgcttggcggtctccccacgctcgtgccgcggtccttgcggccgaactctggctccatcgcaaatatccaagcaggacctacggccaaggtcgagatgtgttgttagatgaggtcgaaggtccgtgaagatcaaaaagcagccgacgtttggccttcgtccacgtgacaacaaataccactaacaatccctgggacaacagaaggaggttggaaatgtcgagcaggtcaaatttagtagcagcaaaaccacaacgccatgcggttcacggtggcgttcagaacgtgccgtcggaccagtgggccccgttcgagtgggttgagccccgccttggcaagcaggcccacggagaaatcgcgattatccgcccggaaggcgtgtccggctcgttgtcggctggcttctggaggacaggcccgacatctcctggcgcggcgcgcgacggatcgcacaagatcgtttactcgtccccactcggcgatgaaacggcgtgcgtcatcgatggttcggttaccctcacggtgccatcgactggcgacaggtatcgcgtgggacctggttcgatcatcagctctcccaagggcctggaagtccactgggagatcgaggcaccttccttcaagaaatattggtgcatctggaacgggacgc

SEQ ID NO: 159 - DNA, 5523 bp, Bradyrhizobium colbertium
cctaggggccgcgacgccgaggtcacgcacgtagccgagcgttgccggccacagattgagaaatgctgagagttcgtggttacgctcgcttggtcgccggattcgatatgcccgagggtgacggaaccggcgagctgaaatagggtgacgagagcgccttctgcatctttcacgagatccgggtcgttcgatctcagccgcgtaattgaggagccgcgcgaggcgactgtcgacagcgatggcaaagcaaaaaatgcagcaagctttgatcattcggacttctgcccgaagcatattttcggcaaccgtccaccttcaatgaagcttgcgcctcagcttctcgcgcacgacgcgaaggtcttcggcctgctctttggcaattaagcgagcctcctcggttcgcactttgtcctctgcgacctcacccttcctatcagtttcactggtcatcgcgtgtgtctccagggcaatctggaaaggcgccgttctcctggtcggagagaattcccaactccatggctcgctccgcccgaatgcaatcgcgcaaagttttttcctggcgctcgaatttttcaagttcctggttggcaatatcgctcaaacgattctgatggatactcctagcggtttctgaaaaacgttcggccgactgcggatggcctctcgcgggctcagatgattttgggtgacgcccttcatcgttcattggatagttctgatgtgactgccgatcgaccgacgatgctgccgcgtgatcgccgcgaggatcctccaaagtgacgagccgtgccaagaccgttcggtcagaccaccgcaatttaagacagttttagcaagttcaggctgttcggtcgcgcgcacgcaaaaaggcgatgatggtagtcctcgctgaaaccagcggcggacaatcgccctgatgttagacagcctttgctcttcgaagctaccgagtcaaaccatgtaggtgatgctgtcgctctcgccttgcgagcgataggcgccccgtccggtgcgaaacaggctggacgcaatcgtcgatctcgggcgcgcaagattgtggagtgagcacagacgtgctggtttcagcaggacaggggacgagaggggcccgagcccttctgtggagacaactccacatgaacgcatccaaacctgctgtatatatctcggagctggcaactcgtggagatggaatcactttgcagagccgcgtagagtctggcgtttttccgaaccgaccgcgagctgtgttcattctgcacgggctcgtttctcaaagctgccagcgcgctaagctcgacatccgagcggatggtgcttcctgttgctgacatggacttggctttagtcgaaactaggtcccttgcgtcgatctcgtctccggctggttagagtcatctcccagcagacaggcagagaagtcgtgttccgcccgctctgaaaggtacggcgttcaaggtaacgtctcatcgcgacgaactttgacgtttcacccgctaagtcggtgctgatggacgatcggagcgggtgcctcgagcgggagcacattcgcctcattgcaatagtccgaagttcgctgcttcatttgcttgaggctcgatgcggaggaagcatctcggcttcggatccagctggttgtaaatgtcccgcctgagaaggtgagaactcagcgtgatttgaacttccgaagtcggagtgatcagcatctgagtgctcctgatgccattgaagagagagtatagagccccaacggccgctgaagggaggtttcctttgcgtttcatagtcgatgttgccgcgctcgatctacggcgtcaccgttcacatccctgtatctgcaggatcgacgtaaaagtaactcctagagtagatgccgacgtcctatggtccgtatggaggggaaaatgtcgcaagaggtgttgttgtttccgcagcctgacccctcgctgtcgtcagaagaccgtgccgccgaagtcgtccgattgaccgagcaactggttttggctctcgacgtcagccagtcaatagaaatgagggatcttctcgagaagctgcaaagcgcgtccgatttgctcaatcaaatcggccggctagtcatggcgggccgagcgagacttgagatggaggagggcatcgcgaccgtacgtgagtcgctagttcggtcgcaagcgtgtctgagccatttcgagaggaccggtcggcttcccaaaagcaattcgtgatcatgactgcaaaagctcggccccgtagagaggcggttcgtctccactggaatgttcttgggtttggctgatatcgcgtcggttagtttgtccggtatccgccgagtacttgactcagctcggggatcggcagcttcgaggctgtttacttgctgcgcgaacggcggcagctccaggcagtcacgtcaggagcccgtgctctttggcacctcctgcgggggcgcttccatatgtcgagaacaacgacaagcctcggacacggcccgacgagccgggtgtgcggcatgcaaaaagaccggggatgctccacacggacgagtcatagctatcagctattggcgatagcgtagctgttatatcggttcccagcaacttaagccttcaaaagcaagaaatcccagggaagatcggccgcgtcgcaggtgctttgctgggcgtttaaacgactctcaagctaagtgtgcgaaaagggcggtctctgttggaagaagacaatgagccttgacgatccgaatttagagcccgaataccttctcgaaaatgaaatcgacagactgcaagcccgttggtctgtttccaaaaggcctgtcgagagattgcctgcgtacgaggacgtggtactgggagacctcggccgagtggcggagcacttggtcatcctgtcagtacgagagggcgactggtacgttctaagtgccggcttgacggtgcctatctggtttggcgggcgcgcgaagggccaggcattgtctagtctgtctccggactgcgccggcgcgctcagaacgatagccgccgatgcgttgacgtcgttcaagccgaagatcgctcagacgcattgtgcccgtgatggactcgttcagcgctacaggctcctggcattacctctgcgaaacagatggggtcctgaaatcgttgcggtctacgtggggctggacggtgccaaatacagtctggtcgatgcgatcttccgttccaccgaggagggcgtaatcgctctcgcccctgttcagggcgtcgacgacgagatcgattttcaggttgtggatctcaattccggagccgctgatatgctgggcttggcgctggagacaatcaggtggcgaaagctagggcaaggaacgcatgccttcaacacaccggaactcaagcggaagttgacccgcatactcgatgccggtggccgagacaccttcgaagtgtctgttgtcagaaatggcacgacgctgagcctgagcgtcggtctgacatccatagggcagttggtctgcgcgacacttaccgacgtcagtcacctcaagaggcgagaggagtcctttcgacttcttttcgacgcgaacccgatgccgatgatgatcttcgacatcgtcggccacgcgatacggaaggtcaacgacgcggcaactcggcagtacgggtatgcccgtgaagagctgatcggaatgcgggtcgagcgacttctgccggaaaacgagcaggatgacggaatcggcgtggtcgaaaaatgccgcgagtcggaagaatcggccttgaacgtcacgttggtactcgccgaccaccgcaggatcgatgcgctccttttcggacggaagatcccctttgaagatgctgaagcgtatatagtagcgcttgtcgacataacggagcggaagcgatcggaagctagggtcgcctaccttgcgcaccatgatgttttgaccggcttgcccaatcgtgcatgcttcaactcagaccttttgggtcggttggagatgcaagagcctccttcggcgagaatcgcgatgatcgcgatcgatctcgatctcttcaaggaagtcaacgacacgctggggcattcggcgggcgatcgtgtgctccagatcgtagcgcatcgactacgatccggactgacctcccgagagatcgtggcgcgcctgggaggcgatgagtttgctgtgatagttgatgactttccggacgaagatggattgaagcggctttgctcggagctcctcgaatccttgcgccagccgtatgatgtcgacggtaaagagatcgtcatcggcgcgagcctaggcgtcgcggtctttccccgcgacggcaagacggccgaagaactgtcgaagaaggccgatctcgcgctgtaccgagcaaaagcagagggaagaggcagcttgcgcttctacgacgaggaactcgaagtcggcgtgaggactcggcgtgcgatggaaagtggcctgcgaaaagctctgcaggccggtgagttcgagcttcactatcaacccctgatcgacgttcgcggaaatacattgctggggttcgaagccttgctccgttggagaaggaatgaagcgttggtgccgcccggggacttcatccctcttgcggaggagaccggcctgatcaactcgataggagaatgggtagtaagcgaagcgtgttcggaagcctcaaagtggccgacatctattggaatcgcggtaaatctgtcgcccgtgcaattcagagacaggaacctagtcccctccattgttggcgccctggagcgctccggcttggcaccatcgcgtctggaactcgagattaccgagtcggtgctgctcggagagaccgacgcaaatttcagttctcttaagaagttgaaggccgcgggaataaggatctcgatggacgatttcggtaccggctattcgagcttgaagtacttgcgcctctttccgttcgacaagttgaaggccgaccgatctttcgtccaggacgcagtggatagcggcgattctcgtgcgatccttcaaaccgttgcgtcgctagggcgaagtctgcggataactacgctggccgaaggcgtggaaacgaaacggcagttgatgattgtcaaaaaggcggggttcgatgccgcacaaggttatctcttcagtccccctgtgcgcgccggcgaagtccctggactactggagaagcttcggagcggagcggaggtcaaatcccctaaaaaagtcgcgtgagtttctcgagcgagctcaattcagctgctgattggtcgaaggtcgtcgacggactccgcgcctccggtgtcggcctgcgagagtcaccggcgcggggtccgttattatatgttggatcaggaacattccgaacagtggacgagatggcagacccttgtccaaagctttgtcccgagccatcggaattgtcactgcggtgcatccagcatcagggcggaagtgtcctcggcgctgcgattaggttcgaaaaggtacgagcgagcttgcggcagccggttaggcccagaatttttctccattaggcaggtttccaatat

SEQ ID NO: 160 - DNA, 10427 bp, Bradyrhizobium colbertium
cagccatggcagtgatggtcgacgatggcaccggtctcagggccgctatcggacttggtatcgaccatccaagccaccggggaaccggttggattggtcacgtcaaggtcgagacaccgatgcagcgcacccgacatcagataggtcacgatcagaaaaacggacacgatcccgcgcaaagcaggaacatgcctcaatccagatctgatccgactaatcgtcaatgaccacactctacgttcgcgagttggtaggtagcatgggcacaaggctcacgtcgacccgcaatattataacaatcccaaacatttgttgcgtgtcactcgcaacttctaggaatcgagcatgcaggtaaccctgccccagttctgggacgtagctgcaggcttttcttcggaggcagcgtacccgtcttatgcgacgttctttcacggcttcctaaacgatagcattgcaacccgtccgatccgcaccgagtgcgaggactgcagtttggccccggtaaagcccgccttcttgaagtgtttgccccaagttccatcgacgtgggattgaaccgcaatcctgcttgaaatctgcgctgcaaggttgaggacgatgcgctcttcgcggctggtcggtcggtcatagtccgcaacataaaatacacctccacggcgcaggattcggaaagtttccttcgccaaggcgatcttttcatcgggagttctcagatgaaaggcgagtacgcacatcgcgcggtcgaagctgccggtgtgaaccggaagggccacaacggaaggtgcgtcgatgaacgtaatattctcaatgtgctgttcttcgatcgctcgctttgactttcggacgatcgatggatcgggatccgctacaacgatactgagctcggtgaaccgctccgcaagcgagatcgccgtcgctgcgcttccccgtccgaacgccaagaggcgctctccgcgctttggagacatcaactcgaacaagggctcctgccacgacgtgtcgcgcagcattgcagcggcgaatcggtagtagagcggtttgagcgccgccaagaccaaaatcgatagaaacttcatgcggtgtcgcgaccgcgaggccaatggcggagcgcgtccgaagccgtcagaagcttcgcgcgcttgaggacgctcttcagctcctcgagttctgcgagaagccggtgagccttgccgctcgcgttattggcaacatacgcgttcgctgcgttcatggagccagacaggttttctatctgccaccgagcgttgctcgagagcgcgaggagaacaacacggcgatcggtagcgctcggcttgcggcggatcagtcctttggactcgagcaattgagattgcgccgtgacaaaggacccgtccacggcgagcttgtccgacaccacgctgacccgcaccccctcttcgtccgcaagatgcgatatcgccatcagaatgttccattgagccaccgtgacacccaggccggccgcccaacacttctgcacttcgctcaaacagccgtgaatttgcttcacctcccaggacaatcgctgcaagaggtcgtccggcgccggagtctgcgaaccttcaacttgcttggtttccataacgtgatccttcaattccgatgcggtcgccgacggcgcctgcaaaacggaatggccccgaaagagcggcttctgaaaaatgcgctgtcgatccaggtcgcctgcatgctcgcggccccagcaacttggctgagctcgcaaaggctttgagagcgacgccgtcgccatcccaaaggcaggggcgacagcatcgcgctgcggcgcgagggaggttcgacggaaaacggaaacaggacgcgcgatgcgtcccgcgtcgttcgctttaggtcagagatttcggcgggggtggatcaagaccgcgaacattcccgtataggggagccgccgatttcggcaactcagcgggcctcacatccaaggtgagttccgcctgttgcgccggcccggggaccgacaccgaaaagcaaccgtgacagtggtgatcggccaccaaaccccgttcgggcgattgggagctcttgccgtccgtagccacgatcgccgaggctgatccggagcgaacggcgacgtcgacatcaacgagtccatgcagaacgccagacaggacgtacgccagggtcaggagagcggacacgatcccgcgcaacgcagtaatgcgccgagttcccgatatgacctgactaatcgacaatgatcacccacttggtgaagacaacgaggctacctaacatgatggcgaccttcagtcgatccgcgaaacatcgcgagcgcatgcgtcacttgtcgaagggttcccacttagggctgccgcccgccgagcgcttcgtggcctacaaatcctcaccagccaactttctaagttcgttcttgtcgtcttcgcgcaggatcgtgttggcaacttgatcgtaggctcgggtcgcagcgacgagactgctcatttcatggaccgcgttcacgttcgccccctccaaggctcccgtagcgagcctaatctgcgcgggaggcacctcgttcgcaggcaactccgatgaaaacagagtgtttccctcggcgcgcaacttggcattatcctcgaacttgactaggcgtagacgtcctatcggtcccctcgccgtcgagatggtcccatcggctccgatgctcaccggcccatcgcgtggcggaacctgtaaggggccggtcgcagtcaacacgatatcgcccgacaacgtgaccacgcggccttccttgtcgagcgtgaacgctccgttccgcgtgtagcgatctccggcagccgtccggatgacaaagaagccgtcaccgacgaccgcgacatccgttccattcccggtggccttgagcgggccgccggaaaaatcagtgtaaccggtggcggccacaagcgatcgcatcggagccgagggaatgtcgtcggcttccttggccttcgtgagatattcgcggaactgaagcccctcgcgtttgaatccggtcgtcgtctggttggcaacgtttcgagcaaccttgtccaattgctgttgcagggtgatcaatcgcgatagcccgatgacggtcttgtcggacattggaagactgcctttcaaactgccgaatgaggccggtggtcgcccttacgccgcgcttgcttggtttgaggatcgcagcggacgggatccacaaggcatgtgaaccgccgcgcgctcggttctcggcttggagccgacataactgcgcgcggctttgccttgccgtcgacaatgtcgtcggatggagccttcagcccttgtacttggcttggcccgacttgcccgtgtccgtcttgatcatgagtgtgatcgcggtggatgccgtaatcggcttcttcgtttcacccttcaggacgttctctcccgacggagaaaggacaatcgtctcgcgatcgtcgccgttcacgatcagagcggaggccgtatagcccttagtcgacacgggcttgttgtcctcgttgaggacgttgaacgtcacggcatttcccgacggcaggaactcgatatgcacgccggccgcatccgcaagaacgccgccattgggtcccttcgaaccgtgtgagtgttgagcgtgagccgggacgaccgaaagcagtacggcgagtatgaatgcggcgggtttcatgcagtttctccttgtgcggttgcggaagtcgacttcgtcgtgaccgcttcacgacggaagagcgtgtagagcgccggcaagaccagcagcgtcaaaatggtcgatgatacgatcccgccgatgaccacggtggcgagtggccgctgcacctcggcgccggcgccggtcgcgatcgccatgggcacgaatcccaggcttgccaccagggcggtcatcagaaccggcctcaaccgggtcagcgccccctcgcgaacggcttcgacgacagggcggccctccgatcgcagcttctggatgaacgcgatgatgaccaggccattcagcactgcgacgcccgatagcgcgataaacccgataccggcgctgatcgaaagcgggatgtcgcgcagcagcagggcggcaatgccacccgtgagcgcgagtggcaccccgctgaagaccaatgcggcatcggcaaaagttcccaggctcatgaagagcaacacgaagatcaggagcagcgcgatcggaacgacgatggtcagccgcttggttgcggaaaccaactgctcgaactgtcctccataggtgatccagtaacccgccggcaccttgacaccgtcggtgatccgccgctgggcgtcggcaacgaacgagccgaggtctcggccgcgcacgttcgcggtgaccacgatgcgccgcttgccgttttcccggcttatctgattgggacccggagccgcgtcgatctcggcgaccgaggagagcgggacataacggacctgccccaacggtgaatttccccaagccgccttgatggccccagcctgaccttcgcgcacgggaagagggatcggaagattgcggatcgcttccatatccgagcgaaggtgttcgggcagccgaacgatgatttcgaaacgacgatcgccttcgaacaccaggccggcgctcttgcctccgaccgcgatctcgacgatgccctgcacatcggagatgctcaggccttgtcgtgccaaggcctgccggttcaatttgaccgtgagcacgggcagcccggagacctgctccgtcttcacgtctgcagctccctgcacaccttgcagcacgctttgcacctggccggcgacctgcagaagcgtgttcaggtcgtcgccgaagatcttgaccccgacgtcgctacgaacgcccgatatcaactcgttgaagcgcatctgaatcggctgggtgaactcatagttgttgcccggcacctccgcgacgaccttttcgatcttggagacgagctgcgccttggtcatcgaaggatcaggccactgagcgtggggtttgagcatgatgtaagtgtcggcgacgttcggcggcatcggatcggtcgccacctctgccgtgccgatcttggaaaagacctcacggacctcaggcaccctccggatggcctcctccagcttgatctgcatatccacggcctgcgtcaggctcgtccctggaatgcgcatcgcgtgtgtggcgacatcgccttcatcgagcgagggtatgaactcgccgcccatgcgagacgcggcaattccgctgacgatcaccaacgcgccggccgccagtgcgaccatgtgtcgattgcgtatcgaggcatcgagaagcggcacataggcgaagcgagccccgcgcatgaaccagttctctttctcggtcactttgccggtcaccagaatggcaacagcggccggaacaaaggtcatcgacaggatcgcggcgccgcccaacgccatgagaactgtcagggccatgggcgtgaacatcttcccttcgacgcccgtcaacgtgagaactgggaggtagacgaccgcgatgatgagggtaccgaataggctgggctgcacgacctcccctgctcccgccaaaatcgtatcgaaacgctcctcgcggctcagtatgcgccctctgcggtgctgctcctccgcaagcagccgcaggcagttctcgacgatgatgaccgcaccgtcgatgataatgccgaagtcgatggcgccgagcgacatgaggttcgcgctgaccttattctcgaccattcccgtcacggtaatgagcatcgacaagggaatgacgagcgcggtggcgacggccgctctgaagttgccgaggatcagcagcaggatcacgatgacgaggatcgcgccctcgagcaaattcttctccacggtagcgatcgtggcctcgacgaggcgcgtgcggtcgtagagcgccctcgccaccacaccgtcgggcagggatttcgcgatctcgtccagcttcgccgatacacgctgggccaccgtgcggctgttttcgccgatgagcagcatggccgtgccgacgacggtctcgcgcccattcagcgttgccgaaccggtacggagctctcgcccttcgatcacctctgcgatgtcgccgatccggaccgggatcccttcccgcgccccgatcacgatgtttcggatgtcgctcgcgtcgcccacctgccccggcgtgcgaaccaggtattgttcgccgttccgctcgatgtagcccgcgccgacgttggcattgttcgacgcaagcgcggtcatcacatcgcgaaaattcagccgatacgccatcagcttggtaggatcgggcaggacgtggaattgccgctcgaacccgccgatggtgttgacctcgaccacgccgggcaccgtccgcaactgcggcttgatgatccaatcctggatcgtgcggaggtctatcgggctgatctcgctcccgtcggggtttttggctgccttcttcgcctcgacggcgaacatgaatatctcgccgaggcccgtcgaaatcggtcccatcgccatttcgatgccgttcggcaggaggtctttcacctgttgcaaacgctcgttgaccaactggcgcgcgaaatagatgttcgtgccgtcggcgaagacgacggtgacctggcttagtccgtatctggacagcgaccgtgtgtactggaggttcggtagcccgcccatgccggtttcgactggaaacgtgatgcgctgttcgacctccagaggtgaatagcccgccgcgctcacgttgatctgcacctggacgttggtgatgtccggtaccgcgtcgatcggaaggcgcgtgaagttccaggctcctatcgccccgaccgcaagcaccgcaaagaggaccagccatcgctggcgtatcgagaatgcgattattgcggtgatgaccccgtgcttccggtcgccgatcgggccctgctcagtgctcatgggcggctgttcccttggctatttccgccttgacgatgaaactgttccgtcccacgtacaggtcgccctcctccaggccgaactgcacctcgacgtgctcgcgatcgcgagcacccagctcgacctcgcgcacctcgaatttcaggccattgcggacgaagacgacgttgcggttttcgaagctttggacggcggtcgatttgacgacgatcggcgcggacttgtccgagagcatcaggcgcgccgtgacgaacatgcctggcctcagtcttgtcccctcgttcggcacgctggtgcgcgcaagagcgctctgcgtatccgcactgccgacaggcgaaatgtaggtcagcctggcctcgatcggcttcccgccgtcgccgacgtcgatgacgaccttgtcgccttcccgcacccgcttcaggtcccgtcgatagacggataggtcgacccatacggtggaaatatcggcgatcgtgaaggctgccttttgctccgacgcgtattcaccgagagaaatttggcggtcgatgaccgtgccggccaacggcgcccggatctcatacgtcgtgagactctggttgctctcgatcttggccaggaggtcgttcttttcgacgcgatgaccgacgctcgccttgatctcgcggacgactcctggaaatcgcggagttacctgaacgagagcctcttgatttggctgcaaaatgccgttgaggagtagactgtcgcgaagaacgccgggcgctgcgacgaggagctcgatatcggaagacctgagcttgtcgtcgctcatttcgacgccgtcggcgtgacctccttcttcgtggccatgccccgcctccgattgcttgccggagctctgctgaggcaagttcaacaggaagaagccgattgcggccaaggcgatagttgccaggaccgagttcgcgaaaagccgcttcatggcgcgcttctcgctgcgcggcgggcgcggtcgcgcagcgccaggcaaacgagggttcccaagccgcatcgaccggccgacgacgaacgccgctcccgcgtctcgaaacccatgggcaaagcgacgaatacatgcgctcgcgcttctcgcgcggcagcgatctcagaagacatggaaatagacctgcaaacgaaggcaagaaggcgcacggatgcgccgagcgggttcgttcagatcaggcctttggagggggagtatccaatgcggaggaggtgccggtcagccgcttcgtcggcatagcgaccggcttcgtcacggccgcagcgagcgaccaggctgccgtggcccgagcgggcgagacggagaagcacccgtggcaatgccgttcggtcagaacgctgtcgccaccggtcgtgcttcccagccctgcagtcgaaaagacggtctcggtcgagccggtgattgccacatggtcgatatgggcactatggaggacggcggcgctcaaatggccgaacgcaagcaacagaaccagcagatcgcgtagccggcgaagtagagcattgctggtggcggcgatcggcataacgcgaggcaaatccgcagaggcagaagtggcgctgtcgctatgggcgactcggcatacttggcactcctacacgtcgctcggtcggttgtcctcagcaaaaacgcggggtgcgacaaagttgccgcgctcgctgcggctaccccggctacaagaagttactgcaaccgacttcgccttctttgagttccgcgttgcaacgcaagctctagcctacgcgacgctccgggtcatttcggagggttggagataggccggtggtctcggctgcctcggatttcgcatcggctattcgctccaccgatccggcaatgcctcgcagcggcgtgccgaagtcgggtatgtcgatcaaagccaacagcaaaccggcgatccagaacgcgtgcatcccggtgaacaaggagatcaggccgagcacggcgacgaactcgaactgcagcttttgcgacttgtgcgccatccgctcgggcaggctgtgcagcttccagtaaagcactcccacggaaaagatcacccctaccaagaagacccccatcaccaccaggagcacgtcggagccatcggcccccggcaggaagaacggaagcttatgaggagcctgagggtgaatttcggttgccaaacctgtctcccgacaaagagcagaattcttctctccaaataggagcgctcgcaccgacgatattgatccaaatcaacgcatgagggcaaacgctccgcacccgaggcgacgtccggcataacactgcgtcaatttctgaggtgcgatcggcgcccgcctctccggatgcaacgagatgcctactgagccattcgcgggtcgtcgctagagttcagatagtctatcccggttggaccaataccagtcacctggaatacgacctcttcattcttcgtttctgcgaactgccaaactcggggcggcacgtgcgagaacgtgccttgtggaaaagcgaccagctttgtgctgtcgacgctgtcgccgatcgccgaatagtacgtgcccgcaatgatggtgcgaacccgttcgtctggatgggagtgcacaggcaacttgaagttcgccggcaacttgacgcggactacgaacaagcccggctttgccggatttccatagaggacggcaatttgcgcaccccttcccatagacggcagagcattccacttgaggtcgacggccgtaagacgagtgtaggcggggggtcgatcctgtgcccatgcgggaggtgatccaaggaactcgagcacgagcgcagcgcaaattaccagcccaaagaagcgcatcgcactctcccatgcggggttagacctcggaattctcgtcacgtgtgatcggtcgcccggcaacgcgcgtcagacgcgactgccgaagcttctgctttatcaagtcatcccaacgatcatctacttcaattcgctcgccagaaaccgattgacgcgaccaatcgcatcggcgcgcgcttccggatttgaacccatcatgggtgcgctgccgtccggccgcctctgactcgtcattggcgccagtggaaggttcggatggtcgaacgcgtgaactgtatctggatagaagtgcgcctcgatcggagggctgccagcctctcttgcgcgcgctatcatgtccttgcatggcccggcaggcgtggccgtgtccgcctcgcccatcaggagcagcatcggttgacgaggctgccatttgggatctttgtccgcgaccggagggcagttcgggtaaagggcgatcgctgcgcgaaaatccttttcaggcgatacagccgtaggcaagctggcagcggtaatggtaaacatcattgccattccaccatacgattgccccaagatggcaatgctgtcggggcggacgtcggaacgcgtcctcaaataattcaatgcgccgaacgcatccatcggcgtctctcggttcggaaggacgggtcgcgagaagaccggcggtgccgtcgcggagttggtaggaattga

SEQ ID NO: 161 - DNA, 8849 bp, Bradyrhizobium colbertium
cgatagcgttcatcttggcgccggcgccaacacggacggcgccaggcttgatccactcgatgctgtcgagccccgagacatcgaggagcacaccgccttcgagcggcacggcctgcccgtaattgccggtgccgcctgcacgcacggtgatcggtacccgatggcgcgcgcaaagagccgcagttcgaaccacgtcgtcttcgtgtcgcggcaacacgatcaagtcggctgactttccgtcgagctgggcgttcagaataggactgtaccagaagaaatcgcgcgagcgtcgccgcacgaccttttgttcggtgacgatgggaatgtcgccgagctcggcgacaagcccgtccagtgcgccgactgcgaggtcgttcacgatcgttcgctcatggatggacgctgtgcgagttcagccgcgattgcctcggacctgaccacgaagccaaagcactggttgacgttgtagagggttgcggccatgcaatagtcgggcgacgtcgtggcggcgcagtcctccaggagcaggcaatcgtagccccggaaattcgcatcctgcagcgtgcaaagcacgcattgatcggcgttcacgccggcgaacatcagcgtggtcacgccgagattacgcaggatactgtcgagctcggtgtcctgaaagcccgacatccggtacttcgcgacgtggatgtcggtcttcgcgactggaagctcatccacaatggccgccgaccaactgcctcgctccagcaccttcgcgcccgagcccggcagcgcgtcacccagaccgatgccgccgccgctcggattgtacacatgcagcagcgacgggctgagattgagccggtccggccgattgccccagttgagccaaatgatcggcacggaagagccgcgcagaatgggtaacaaccggcgcaagggcgcaatcgggcgacgcgccggcgcgacgtcgacgccgacgtgtgccagccagcccttggggtggcaaaaatcgttctgcatgtcgacgatcacgatcgccgtgcgcgcgacgtcgaaggtgaccagcttgccctgcacctggaccgagatcggtcgcggcaggaccacctggcgcaccagattggcgcgccactctgaaaccatccagctattagatccactagacccgagcggcaacaggccttcgtcggtgacgacaggatcggtcgataccgcgtccatcgatcagagcccttgcagaacgcggatgtcttcggcgtcgagctcgaccggctcgccgctgcggatcaactcggaaaaaccctcgttgggggtcatcacggtgagcgtatagagcttgcctggccccgtattctcgatgacgtgctcggagccgggatgcagcagcagcgagtctcccttcttgattggcagcgacttgccgtcgcagcgtgcaacgcccacgccgtgcagcacatggaagaactcgtgcgcggaagcgtgctcattggggggcgtcgccccgcctggcttgaatatctcgatgacgaagatgtttccgatccggtccgtcacctgatcgaacaagaccgcgaagtagttggtgtcccgtggcgaaatgcgaaaggctttcgcgcgcgtgagctcggcgacgctaaacgacatatgatgaatccctcgggcgatgcgcgtctcgtcatcatggatgtggcatgctccaacgtcacttcaaagcgctttaattcgacagacccgttgccttttcggcaacgggccgccatcctgcaaattcattgggggcaaggatgcttcacagccggctgctgaactatatcgacgaggttgcccgcacgggctcaatccgcaaggctgcggatcgcctgaatgtcgccgcctccgccattagtcgtcagattctggcgctcgaaactcagctgggaacgccgatcttccaacgtcttcccaagaagctgatcctcacggccgcaggcgaagtcctgatcggtcatgtccgtcagacgctcaaggagctgacccgaacacaggtcaagatcgaggaattgaaaggccttcggcgcggcgagattacggtggcgatgatgagcggtcttgcctccaacctcgtccccggcacggtcaaggagtttcgggttgccaatccgcgggtcaagctcaacctgacgctgttcaataccggagcggagattcagctggctgttgccagcggcgaggcagatctcggcatcggattcgactttggtaaggacagcaatctgaaagttctggcacgtggcgtcggtcggctcggcgcggtcatgtcacccagtcatcccctggcaaagcgacccagcatccgcctcagcgattgcaccgattacccactggtcatcgccgatagcaccagcgcgatccggccctatctggatgcggctttcgcccgcgtcgcgatcgacctgcacccggcgatcgaaacgaactcgatcgagatcatgcggcatgccgtcagtttgaacgacggcatcactttcctgacgccgtttgacgtcgagtcggagcggcgtgccgggcggctcgcctacgtgaccattcgggagctctctcacgatgctcaggcgctgatgctgatcggccatgttcgagggaccagcgccatcgcgagcgtgctcgcggagatgctgaaggccatgatcagggatgttgccagctgacaaagtggctaggctgcgcatcccacgtcgcgttgccaaaagggcaacacaacagacgaaattaagcacttttcatgccggtgcagtacctgacaatgtgcggcctgaattggcggcgcgagggtatgcggccaaaatgcctcccggccccggcaaaacggaaagcgaccgagatgaaactaaaatcgcattggtggtgggacctctccgcagaggatttccgtcacctcgacatgagccggatcgtcgccgttctgccggtcggcgccgtcgaacaacacggacctcatttgcccgtccgcgtcgacaccgccatcctcgatggcatcatgcagcacgcggttgcccggatggctgacgactttccggctctcatcctgccgacgatgtcgatcggcaaatcgaacgagcattccacttttcccggcaccctgaccttgtccgcggaaactctcgggcgtctctggtacgaggtctgcgagagcattcatcgcgccggggtgcgcaaggtcgtcttcgtcaactcgcatggagggcaaccgcaggtcgtggagatcgtctgtcgcgagcttcgtgtcaggctgggaatgctcgccgtctcctcgcaatggtcgcgtttcacggatctgtccgacctgttcaccgcgaccgagcgcaagcacggaatccacgccggagaaatcgagaccagcgcgatgctctatctgcatcccggtctcgtcgatatgacgtttgccgaggatttccggtctctgtcccagaccctggagactgaatgcgaaatcctgatgccggagagccacgcagttgggttcggctggcagatgcaggacatcaatcccaagggagcctgcggcaatgccgccctcgcggacgataagcgtggccggcaggcaatcgaccgcgcggccaatcgtctgatcaagctgatttcggaggtcgacaattatccgctctcccgcatcaggacgaccgcggacttcacgccttcgaccaagtgaggcctgggcggcgagacgttcgaaccgatcgaatacgtgaattcacctcgatgaaatctgagccgatgtcagcaaaatccttccgggtacccgtccttccgcccaagatcgaaacgttgacattgaaggacggcacacggctcgatgcggacgtttatcgcccggcgacgccgggaccctacccggttctgcttcagcgtcaggcctacagcaggcgcatcgcatgcagcatctgctatgcgcatccggcgtggtacgcctctcatggctatgtcgtcgtggtgcaggacgtcaggggacgcggcacgtcggaggggacattccgccccggagaaaccgaagtcgaggacggcgccgagaccgttgaatgggcggcgcgtcttgatggcgcgaatggcgatgtggcgatgtacggcttttcctatcaagcctacaaccagctgcttgccgctgcgggagactgcccatccctgaaagcgctcgcgccggcgatgggtccgtggaatccagcggattgggcttacgagaacggcgccctgcaaatgaagcacatgatcggctggggcattcagatcacagccgaagccgcacggcgggccagcgacgacgacgccttcagtgcccttcaggctggaggaatcaacctgccgttcaacggtccagtcgcggccatgccgcagctgttgcagaagtaccggcactattcgcacgtcatggactggctcgaaacgcctgccgattcaccgtattgggaccagatctcgcccgtgacgcacgtggaggccattcgcgctcgccggctaccgatgttgttcgtcggcgggtggttcgatccctttctgccggccacggtcgagtccttccgggccctcgcaagcagcagcgaggacaccaggctcatcgtcggaccctggatccattttccctggacgcggaaggtcggcgcggtcgacttcgggcccgaagcgcagcgcaacgtcgacatcgatcacattcggttctttgaccacattctcaaaggtttgccgagcgaggcggacaacgggaggatcgagttcttcgatatgggactgaagacatggcgacgatatcaagatttgccgtccagcacgcacgtgctgtttcttgatggcacaggtcggacgtcattggaccctcacgacggtgcgcttggtcctcgacagcccacgcaggatagcgtcgaccatatcgtgcatgacccctggcggcccgcaccgacagtcggcggttactatggggttccgacggggccggtcgatcgccgggtcgccgatgaacgtggcgacgtcctgaccttcacgacggaagctctcgagcacgcaatcgaggtggtcggcgaacccgaggtcgaactcgacctaagctgcgatcgtcccagctttgatctctcctgcatcctttcactcgtgacctccgatgaaagggttcttcagatctcaagtggatatgcccactatcgcgtcgccaagcctgggctatatcggctgaaactggcagtcacgtgcgtaacgctaaagaacggtgatcgcctgcgcctctccattgcgggagccgactatccagcgtacccagtaaatccgggtacgggcgaagatccggtgagtgtaccgaaaacgcacgcagtcgtgaccacaattgcactctggcatggtccttcccggccgtccctccttcggctgcctgtcggaatgtactcggagatcggatctgccggatctcaggctggctgaaacaactggacttgcgccttgagttgttcgctttcgttcgacagaaaatgtgcagcggcaaacaactgagacgccgccgctcctgtttccgattagaccttgagcgacccgcccaaattagcggaagtcatccctacacctctcaccaacgaaccaatccacttcgggtggtgctatgcgagaacggaatgtagaattcacaactaaacctccgcgctaacctacgagttgatagatcactggaatcagcgtcaaggaaagcgcctcatttttgtacataagctaccacttgaatctctccatcatgcccttcaaaatggtgatacatatccgatagatcgcgcggccaacagcttgcggaagacttgatgcgcgctaggcaactcgaagtattttgtatgctgatgcggtgcgggaccgtcacgggcgctgcggcgaggctcaacatatcacaacctgcgctcagccagattcttctccatattgaggaccaactgggcttcaagctatttgacagggtgcgcggacgcttggtcccgaccaatgaggcacaggaactttacccgcaggcagaacatatcttttcccagctcggcgccttggggagacggaccaaggatatgaaacatggacgtaccggcttagtgcgactggcggcatcagccccaccttccatgtcgattttgccgggcgccttgatagcttttcgagaggcccaccccgacgtcgtcgtgcgctcgctaatcgcaccaatggtcaacattgtcgagatgttgcgaagaggcgatgtttcgctcggcatcgcgatgaataatttgcctcatcacgatctcgatgtcgaaactatcggtcacgatgaactcgtctgcatcatgccgacaggtcatcgactggccgaaagggccgccgtccgcttttcggacatccaggaagagacgctgatctcctatcgcgccgacacattgccagctcaccttcttgcgggcgctgccgaggccgaggaggtttctttctcgccgtcgatcgaaatcgatgtatcgatcacggctctctcattcgtgagggacgggcttggtatcgccatcgttgatgggttggtaccgtgggaacagttcccaggcgtcgtcagccgccctttcgcgccgcaaattttggtcccgattgcaattctcacgaacaaagagcgcccgctttctgccattcacgaactcatgcgcgattatctgcgtacggcctggagcaccagagccggtctgcggagcggcggcaaaatcgtctctggaacaatcgaaacttgacaacgatcgcctggcatctcttttagacaatagcgccgacgcataggcgcctcagcgccttcccttaaggcttgccctttgccgctatcggctcaacgctagcaagttcgcaatagcgtccttggcaccgtccgatcccgatgcaaccacaagcctaccgccaaaatcacggcgctttcactgagccgcttcgcttgcgaagcgtgtcggccttggcatagcgggaaaccgttccatgacctgttccagtgctcgctccactccctgcgctccgctccgcccctccattctgcggaagatctcggtcttggcgaagaaccgccaatgaatgggcagactcgctaggattgtcgtcaggaggtcataggcctcggaagtccaaattttttcgtagccgtcgcgttcaggaccaaattgaaaatgtgccgttggagatttccctgactttctcaacgccgccgttgcaggctcgtcaactttgtggtcgcggatgatgacgccatagtcccgctcagccgcttccgccgagacatagccgcgtgcgacatctcgggctactcgccacgactcgcgatcccggggggcaccgcgtccgcccccgccagccgagcgaatttccagcacgtcgcccggttgcagaatggtcgtatcgatatttccgagacgacgctcaccaggcagaccagggttgacgaccatgtcggacaggcccgccgcttgtcctccaagaacgccccaggggcggaagaagcttcgatcgcgattgcgcgcggtgacgcggctgtccggcgcgaacacgcggaaagccatctccgtggctaacccgcctcgccaacgtcctgctccaccgctgtcctgcacaagtccgtatcggacaaactcgacaggtgcttcggtttcggtaatttcgatcggtgtatttctgaggtaggcggcatcgcctcccgatccgttcgtcccgtcgcgatggggcatgcctccactgccgccaacgaccgggttcaccgcggcaatgatggtgcgatgggttcgttcgtccgttgtcatcacattgacgatacaattattgccggccggcgcggccggcatcctgtcgggcaagacttgagagaacgcgccgaatatcaccgagcgcaggcgagcgcaggtgagggatcgcatgcctaccgccgctggatagaccggattcaaaacactaccctgcggcacaatgcacgtgaatggtcgggtcaacccagtgttgagaaagatcttcggattgagcgtgtaaaggacatagtagataccgaccagcaggatcgtgtggtggggatctccgcccgagggcacgttcagcgaagacgccaactgcggatcagagccggtaaaatcgagtatcgcctcgtcaccgcgaatagtcagcttgagcttcagccggcaaggattggcttcaaccgaatcctcatccgcatagtcaacgaactcccaagtaccgtcaggcatcgaacgaagcgtatcgcgcgcctgcgcctccgcgtggtctagcagcacttcgacaccttcgaggaaggcgtctgggccgaatttcttcaccatcgcgagaaccttgcgttcgccggtattgagcgcgccgacaagggccttgatgtcgccgatgttcaaatccggtttgcgcacattggtcgccatgattttcaggatttgctcgtcgaacacgccttcgtgaaggagcttcatgggcggaaaccggatcccttcctgatggatttccgtcagcgaccgcgagagcgaagcaggcaccgcgccgcccatgtcggtgttatggatatggccgccggtccaggcgacaatttcaccttcatggaaaatgggtttccaaagatgggtatcgggtgcatgcgtcgcgacgtagcaggcatacggatcgttcgtgaatccgacatcgcccggcttgtaactgtctatcatcgcgatcgcgcgtccataggtaaggccaggataccaggtcgcaccaagatccatcggcacggcgaaggtatctcccttgcgattcatcaacatgaccgtgaaatcttccgtctccttgacgaaggcggaatgggccgtacgctggagagtatgcgccatgtcctcggcggcggcgcgagcgtg

SEQ ID NO: 162 - DNA, 27906 bp, Bradyrhizobium colbertium
cggagaccttcagcgccgcaacgctgccgatgagggcgagtggtatgccacccatgatgatcagcgacagcgcggttgatcggtatcggctgtaaaggacgaggaagatcagcgtcagggaccccagggatagaatgccgatgcgccaggaggcttcctgctgcgcctgaaaggcgccttcgagcttggtcgtgtagccttgcggcaagtcgagttctcgaagcgcattctgaatgtcggcagcgatgtcggcggtgtcgcggcgcccgtctccgttgccatagacaacgatcctgcgctgagtcccctcccgttgaatctggttcggcccatctgtctcgaccacgtcggccagtgcgctcagcggaacgaactccgggccggtcggaatgagcagattttgcagtcccgttgtggaacggtcttgctccgccaggcgcatcacgacgtcaaaacggcgattgccgtcgacgatctgggagacctttcggccattggacaaggtatcgagcgcctgcgtaatcgcggccggcgtcaggccatgaagtgcggcgcgagcatgatcgacctgaacccgcacttgcggaatcagtacctgcttctcgacctgtagatcgaccagaccgggaacggctgagagacgctggcgcacggtctccgacaggcgccgcaatatctccatgtcctgcccgaagatcttgagcacgatctgcgcacggatgccggactgaagatgatccaggcgatggctgatcggctgtccgatggcaaccgacgccggcagtgcggaaagggattcccgaacgctcgcataaatatccgccttctggcgcttcgacggaaccagatcgacatcgatctcgctgaagtgcacgccttcggcgtgctcatcgagctcggcgcggccagtacggcgtccgaccgatctcacttcgggtatccttgcgagcaactgctccgccaacagtcctaggcggttcgattccgcgagcgaaatgccaggattgtattgcagcgacagcaccagcgttccttcgttgaaggggggaagaaaactgcggggcatctggctcgcggagtaacctgccacgacgaccgccgccgcgacggagcccagcaccaggccacgccgctcgaaagcccatccgaggacccgccggttggcctgcttcagcttggtgacgatcgggctctcgcggtcacctgaacgagttcgtcccgaaagcagatagtaggctaggaccggcgttacggtgatcgacgtcagcagcgaagcaaggatcgagaccacataggccacgccaagcggcgtgaacagccgcccctcgatacccggaagggcgaacagcggcacgaagacgagaacgatgatcatcgttgcatagacgatgctggagcggacctcctggctggccgcggaaatcacttccagagcaggacgtggcatgctcagcgcggcgttttcccgcaagcgccgcagaatgttttcaacgtccaccacggcatcgtcgaccagttcgccgatggcgatggcaaggccgccaagcgtcatggtgttgatcgtgagaccaaaggcgcggaacaccaggattgtcacgaggaccgatattggaatggcggtcagggaaacgagcgcggcgcgtccgttcatcaggaacacgaacaggatgacggcgacgacgactgcggcctcgacgagaacgcgctcgacattggttatcgatgtttcgatgaaggtggcctgccggaattgcacgttggtaacgttgatcccatcgcgcatgctgcgttgcagctccctgagcgtggcttcaatattgcccgtcagcgccacggtatccgcagccggctgcttcatcacgctgatgatgacggcaggcttgccgttgtacccggcgtcgccccgcttggtgcgcgctgcaaaatcgaccgacgcgacctgcttcagcaggatcggctgctggtcgcggttggcaacgacagtgttagcgagatcttcgatcctcctggtgattccaacgttgcggatcaggtattcgcggccgtgctggtcaacaaagccaccgccgctgttggtgccgaactttgcgaccgcccgctcgatctggtcatggtcgatgccgagcgcctgcattgtcgcgacgtttggcgtcacgcggtactggcggacctcgccgccgatgggtatgacctgggcgacgccgggaatggcaaggagctgcggtctgacgacgaagtcggcgatctcgcgcacgtccatgggcgacgccgtgccatcgctggtcagcgcgatcagcatgatctcgcccatgatcgacgtcaccggccccatctggggattgaccgaagcaggcaattgttcgcggatcagcgccagccgctccgagacgaattgccgggcccggtagacgtcgacaccccagtcgaattcgacgtagacgaccgacagaccgacgcctgaaaccgagcgtagccggatcacgccaggcatgccgttcatcgacgtttcaatcggaaacgtcaccagctgttccacctcctggggcgccagtccctcggcctcagtcaggatgttgacggtcgggcgattgatgtccggcaagacgtcgacagaaacgctcggcaggacaaacaggccgtagccaaccagcacggcggctacagccagcacgaacaagcgatgacgcaagcttgtctcgacgatgcgcttgaacatgagcgatctaccggatctggttgatgaggtcggtaccgcgaacgacgatgcgttcaccctcgttgaggccggccgccacgatcacgcgggccgcgtcgaccggcagcacgcggaccggcttcggctcgaagcgctcgggcccggagtgcagccagacgatggtctcgccattgccgctccgaacgacggcttcgcgcgggaagatcagccccgccacgggagtgccggtctggaccatcacgttgagcggttggccgatattgaggcccgtcggcggctccggtatcgcaaactgaacgacggctgcatgctggcgcagtgttcggcttgttccaacgaaggtcagtgcgatctgctgcccgctcggggacattgcggttgcggcttccggctgcttcgagcctatatcgtcataggccaatgcctcgacccagaggctgcgggggtccgcgatctgaaacaggacgtcttgcggttggatgacttgccccggcacgactttggcggacgtgatgatgccgtcggtcggcgcccgcagctcttcaaaatcggtgcgggaatttcggacggtttcgcggcgcgcccgcaggccctccaactcgctctcgaggtcgttgacctgcccttggggcaccgcgccgcggtcggccagcggcctcagacgccccagcttgttttccgtcaccgccatcagctgctcgatctcgccgactttctcgaggatcgtcgtccgatccgcgattggcagactcggttcgatctgaatgagcagatcgcccttgcggacagattgtccgatgcgaggtatgccgtcactgccgggaacaacgcgccccccgtagatgctctgcacgatgctgctgcggtcgggagcggccatgacgcggccgatcagcgtaaccgcgggtcgaattgtccgcggctcggccgcggcggtccgcacatcaagcagccgctgcgtcggcttggctgcaaagaccgtgccgtcttgcaggcgccgcggggcatcgctcagtgcgggagcttccggcggatttggtcgcgttgcgttcgtcgggccctcgccgaacacgatggccgcgagaatgacgaaggctcctgccatcacggcgcagatggaggcagccacgctgcggccacgttgtcgccaataggcaaagagcagaccgaatcccgcagccgcaaggacagaggcggcgatcgcggttcggctggaaaagagcggaccgtgctcgtgcttttgttccgtgggccgggcaacggcggcacgcaccggcacgagcgagtccaccagcagatcgtttcccttgctcgcggtgatcgagaagatgacttcaactgatccggacggcgtaccactgggaattccggcggagtagacccccttccccacgttctcggcattgaccggctcggactcgccgagcgtgatctgcaaggccgcatctgaaaccggctcgttcgtggtcgcatcgtcaatgaagacggaaagcttgccgtctttcaggataccgacgacctcgtacagctcggaccgcgcggccacgcgtgggtaggccgacgaaacaaccgccggtttgtcggcttcgccgtgatcgtgtccctcatggccaagggcgctcgacaaaccaaagaacaggctcgcgaccaagccaaggccggccagcccaaggataccaagccgccctttcgggcagcgccgattgatcaacatgaaaaagtccttcagacatgcgaaaaggcggcggctgaacgggccgccggaactacgcgatgctgaaggtacttggcggccgaacgagcgcctctgggctcattccgacaagcgcgcgtgcaagcggcagctcgatggcaccgagcacttcgaacgagctgggcaggtgaatgaagtgcggcgaggcgatcgaggtgccgaacatgtcccaggccacgcccggggcaccaccctcgtcgtgatccggcccgtcatgaacgtggccctcggagtcgtcatctccatgggaatgcacgtggcccgccagctgatcatggaaatgcagcgacccgctcaatgcgacagaaggcgccggcatggtgccaatggccgcctgtacctgcgaaaccgaaatcaggctcacctgaagcacgaacgcccatatcgccacgaacatggctgctctggcgagtcgacggaaacgttgagcgaagccgtgctgcacagcaatgaactaggcgatcccgcctgcgatttcaatgaccttgggcgatcccagggagagctttaccgcaagcgttcctcgacaagtcgctagaatcttcggcgcggggcgcggcgagttccctcatccatgccttgtcgatcgggtcactcgcccggcgcgatcgcgttgctcggggtcggccgatcggtaatctgttggccgaacaggctaccgatcagctcgacagccgtacgcgccgtccgaccacgctcatccaggaagggattcagctcgacaatgtcgaccgacccgacgacgccggaatcgtgcagcagctccatgatgaggtgcgcctcgcgataggtggctccgcccggcactgtcgtgccgacgcccggcgctacgcatggatcgagaaaatcgacatcgaagctgacatgcagcacaccgttgctcgccttgacccgctcgatgacgcggcggatcaagacggcgacgccaaactcgtcgatctgccgcatgtccacgatccggatccgacgcgagcgcatcaactccttttcgagcttgtcgatcgaacgcgcgccgaataggtccagcttgtccggaccaatcgaggcgcgcggttcgtcgccgagcaggccctcgaggccgggctcgccgcagaggaaggcggccgacatgccgtgcatgtttgcggtgatcgtcgtctccggcgtgttgtaatcggcgtgggcatcgagccagagcacgaagagttcgcgtccgcgctcctgccaatggcgcgccatcgcattgaccgaccccatcgacagcgtgtgatcgccaccgaggaagatcggcagcgcgccggttgtcgcgatctcatagcccctgcggctcagggcgcgcgtccagcgttggatttcgcggtaatgattggcgttttgaggcggcttgtcggcaaggtcccgaagttcagccacggacagatcgccacaatcgacgacatcgaaatccaggctttcgagcagcgtcgcaaggccggcggtgcgcagcgccgcgggccccatcaaggtgccacgctgagaagcccccatgtcgatgggagcgccgagcaaagcgatgcgccgggctcgatccgtcatggtccgatcggtcacggctgtctcctacatcagcaaggttgacccagcctaacagagattcgcacccgtcgtttcccgggaagcccgcgcgttggccgacgtgtcatcggaacaaaaccatccctgctgaattgcccatccaggccggcacccgccgtcgaccacggcgcctgttgcagataaccaaaggtcatcagacccgctgttcaaaaaagcgctcgcgcggatagccaacggtgtcggcctccatcgtcaggcctggaggtcacgcccttgagcacggagataccgcaatccacatcccaacccggcatggccgaacgtgccatcgacacggcggcggacgtttcccgcacgatcggtgaagtcgccggaggtctgcacgccgccgtaggtagtgttacctccgccgtcgaggaatcgcggaaacctggcggggcgcttgcgacagtcgcagcgatcacccgcgaggcgccgcttgccagtctgttcgtcgcgttcctcttcggcgtcgcagtcgcgcgccggcgctagagctgatcctgagtgtgcagcggcttttccaaagcatcatgctgaatcaataacctaaagcgcgatgacgattcttccagatctcatcgcgctttagcagcgaggccaacctgctcaggctgcgctgatggcctcgatctggaccgccaggaattgcttttcaaatgcctcggccggcatcggacggccgaagaaatatccctgcccttcttcgcatcccatgctgaccaggaagtcggccgttgccttgttctcgataccttcggccaccaccgtgagaccgagttgcttgctgaggccgatggtcgagccgacgatggcggcatcgtcggagttggcaagaagaccgaacacgaacgaccggtcgatcttgagtccgtcgagagggaacttcttgagatagctcaggctcgcataaccggtgccgaaatcatcgaacagggcgcggacgccgaggttttgaattctcttgaacaagtcgagcacacggcgctcgtcatgaagcaggatatcctcggtaacttcgatttcgagaagcgacggcgtcagcccggtcgtttcgagcagtgctgcaactgagtgcgcgagatcgcccgattgaagctgcgagggcgagaggttgatcgcgacgcgcacgttgttgccggacaattcccaggcgcgcgcttgacggcaggcggtctccatcacccagttcgcgatccgctccgacagcgcagaggtgttaaccaccggcatgaactccgcgggcgaaacatagccgcgcaccggatgtcgccagcggatgagcgcttcggccccgactaggctgccgtcgatcaggcgaacctgcggctggtagaacagctcgaactcgccgcgatccgcggcaagcgccagctcgctctccagcgtcagccgattctcgagctcctgcctgatcgcagtctcgaagatgacatggctgccgcgccgcgttgccttcgcgcggctcagcgccagatggccgttgctcagaagatcgtcggcattctgcccgccttccggatagacggcaacgccgacgctgatcccgacccggtgctgccgcttgcctgctgaaagcggggcttgaaacgcctgcgcgatccgctcagcaaactctgcgatctgttcgccggcttccaggcaatcgatggctatggcgaattcgtcgccgctgagccgggcgacgatcgctttgccgtcgacttcgctccgcagacgctcagcgaccgcgcgcagcacgaggtctccggccgagtgcccgagcatgttattgatctcttggaagccatccaggccgagcacgagcagtgcgacaccgcaggaccgccgctccgccgcactgatcagatcggtgagggccacatgcagcatgggccggttggcaagaccggtcagcgcgtcgtgttaggccaggtatctgatacgttcagcttcgcgtttgcgaactgaaatgtcgcgtaggatcactccgtattgaaagccgtccgttccctgccaccccgagaagctcgcttcgacgggaaaggtttcaccgttcttacgccggccctcgaactcgacgacgaccgccccgcccggcaccagaagcgcctggcgcgcatcatcgagcattgaaggtcttgcgtcgccgtccgttggtacggcgcacagcgtgtcgaaccggcggccgatgatctcggccggcatgtagccgaagatcgcgctcgcgccgggattccagaccgttatccggtgttccccgtcggtgcagacgagcccgtcgccgagcgacatcgcgatgcggtgaaagcggctctcggcgatgcgtccaagcagactacggaagtcgatttcgtccagcgcaattgcggtcaggtagacgatgacagcgatgtggagcagcgatgtgtcgatgacgagcggccatctcgcctgcacgaaggcagcggccagctcgacggttacgccggctccgatcaggattgcgacccgactgctgagtgcgaagcgtcgccacgagtagaccatcagcaggcagactgcgcccaggccgagtatcatgccgatatttgatgtccaacgcagcatccggttctgaaggatcgattcagcggccagcgcctggaggaccggtccggagatgatcttgccgttgggaacactgaatcggtcgccaagctcgagcgcagtggcaccgatgacgaccttcttgtctttcagcttgcccagagtggcggcatcgccgcgcagcacgtcaacataggagacggcgggaatggaggccgcgcgaatgctgaagtcgatcaggaagggccgccggcgattggcgtcctggcccgccagcacgaccgccatcgagggcatgaaagcgtcgccgatcttctcgtcgaacggatagcggcgcacgagcccatcggtttccacggcgacattgacgacggccggccacgactggttgctgaacgacttcagcgggcggttgacgtgagccgggccaccattctgcgtcggctgcttgaaggacggaagaatcgtcgagcccccaacctcccgaagcgcgcgtgcgaaagcctcgtcggaggccgaatcggacggcgtgctgaaatcgacatcgaaggcaatgtcctgcgctcccgccgcctcgagtctgcgcagcagctccgcgtgcagccggcgcggccagggccagaccccgatctgatcgatcgacggcgcgtcgatggccacgaccacgatcttgccgctggcatcacgcgattgccaggcgaaccgaaggtcggtgagcgcattgcgaagcgaaccatgccatcccgtggacagcacgatcgcgagcgcgatcacaaccagaatatgcggccgatagcgtttcactcgaccctcccgcgcacccgcttcctacgggtgcgcccccgtcatcccctgacaatcgcctcagcgtcggttgtgaccataggcgttgccatggccgctattgccgccgttgccgctattgcccctgccgttgcccgtggccccattgttgccatggccgctgttgccgccgttgccgctgttgccgttattcccgccgttaccgttgttgccgttgttgccgttgttgccgttgccaccgccgtttccgttgttggcccgcggagcatcgctcgatgcaccggctgtcgtcgcggcgatcgtcgcatttgtgttgccgacaccgctggctgccgcgctgttggatgcggccggattggtcttgccgtcgctccacaccgtcggattgtcggtgctggcattcgcgttgcgcacctgtccgggcacaccgccgccatgagcgaggccgcgcgtgaccttgtggacgttcagcttgacctcgccgagcgagttcgaaatacgcaccacgcccggcttgggggcatgcccctcggacgcctgtcccgacgccttgggtgcaccagccgccttcgtgctcttgtcgactggaccgagagcgtggattgcatggccgttcgcggcattgcgcggtgccgacaggcccgatttcggcacgggcacccgctcgatggtcggggcgcgcggcttgccttgctcgatcggactgaacgtgcctgcgccgctcagactgagaccaggcttgccgtgctcgaagacggtggcagcctgccccggcatgacctgggcaatctgtcccgtcctgaagtcggagacttggacttggccgcggagcacgccgaccttggtgctgcccgccgccacggtgacgctgaacctcgtgcccttgaccacggctgcgaggtagggcgtctcgacctcgaaatgcttgacgttgcgcttttggacctcgagcaggatcgaacctgcctgctggatgatagtggtggaaagaccctccttctgctcggctggaaggccaaccaccgagttgggagaaatcagcatcgtttcctcgccgcggaccagcagcacgcgcccgttacgcccggtgcgaatggtatcgccaggcttcagcgcctcctcctgcttcagcgacacctgctgcgcgccgctggtggcgacccagacctcgcccgaggccttgctcaccgaccaagctccgccgtccgcggcggacgcaccggaaaccgtcgcgaggatcagcgccgccgcgaaggcgcaccgcattccaactctgcccaacatcgcgatccctcagtccgcagtacagccaagcctgaggagtatcggaaatcactcaagagagaattagcaggtgtcggccagccgcgcgggcgccttaaccaatcattgaccataaaaaactattaaaaatcatgcggctaacgaacccttaccgagctttcgggaaatctccgttaaactacggagtctggatcgcggtgcggggtgtgacatggcacctgcttagcgttctcgggctgttagcaccaattttcgcaggggccctgcaagcatccgcacaacaggcgaaccagccgggcttcgatccgcgccagcctgagaagtactttgataaccagaccgagcaggaatccctcggccggccaccggtccggttgccgagcgtcggacagcccactccgggcggggatgccaagccgcaatttgtgctgcgcggcatcgacgtcattggcgctcacgccatctcccgcgatcgcatcgccgcggtctatcagacctaccttgccaagaaggtctctcaggccaatctcgctgcgattgccggcgcgatcagcgaactgtaccgcgaggccggattccacttaagtcgcgcaatcgtgccgccgcaggatatcgccgacggccgggtccggatccaaattatcgaaggcgccattgtgcaagccgagctgaaaggcgatggcgccgaacagttcggcgtcaggccgatgctcgggccgattctggccgaacaaccctcgcgccttgcaacgctcgaacgccaactgttcctgatcaacggcagaccgggcgtccggatcaccgataccgcgctggaggagatcggcggcacgacgggccgcttccgcctgatcgtctatttgaagacctggcacgtcttctcctcctttggcctcgacaatctcggatcatcgtcggtcggcccctggcaaacctacgcgaccggcgcgttcaattcctacctcacgcccggcgacaccctttcggtcaacctgtcgaccattgccaacgatccgcgcgagctcggcttcgcgcggatgtcctacgacgcgccggtcggtgtcgatggtttgcgcctcggcgcatcggtgctgtacagcgcggtgaggcccggcgacgcccgacgcctcgacagcgacatcaccacgaccgaagcattcgagctgcgtgccagcaccgttccgctgcagtcgcaatcgtccacgctcacgctgacagccgcgatgaccttcagcaatgtgtccgagcatgacctttacgggccgtggtacaacgaccacatcaggacggcgagcctgaccgccgactataggcttcaagacggcttcggcggcaccaatttcgcgacggcgagcttccggcaaggcctggacatctttggcgcatcacatttcgacgacgatctgctatcgcgcgctggcgcctcgtcgaacttctcggtgctgagcttgtggttcacgcgccaccagacactcaacgatgcctggtcgatcaaggtctcggctgcgagccaaaccgcgtcacggccattattcacttcgcagcagttctatcttggcggcgcggctttcggccgaggctatggcgcagccgagatcagcggcgacaacggtcttgccggcacgatcgagctgcgcttcgatcagaagctcaatttccgctactggaccggctatcagctctatgccttcggcgacgcgggcgccgtctggaaccacggctaccgcctgagcgatggcctgtcgctcacatctgccggagccggtgtgcgcttcttcctccctgacgatctccatgccgacttaggcgtggctgtccccttgagctaccgggcacctgacaacgagcgtcgcagcccacgcttccttttcacgctgtcgagcgcattccggctctgccccgaacgcggcaaggccggctgcctttagccgccctgtcgcagaacggcgccatggcagggcgaccgctttcgcggccctgctcagaacttgcgtaactgccggtcgaagatcgtgagcaagtcaccgatttgaatgatcatgaaccggcgaatgttagcggagaagctttgcggcagatcaaggcggctcccaagcggcacgctagaagaacaacatggcctcggagagacaagtgtcgcactataccgcaagccttgatacgaagagccttggcctggccgcggcaagagtgcccgcattcgtacggcatctctatcgttcgacccgcaagctgttccggtcggtcatcgcccgcattgacctctcgcagtttccaggatcatgctgcggttgagcgcggcagacgcgagcgaacgtagaaagattgcccatgtcccggcacgtaagaaggatttgcctcctgattggcgtagtctctggcgtcggtacgtccgccctggccgctgacgccgatcacggcgccgaccttgccaggcgctggtgcgcgagctgtcatgtcgtggcgaacgggcagacccaggcgagcgccgatgttccctcctttccgtccgttgcgcgcaggcaggacttcagtccggaaaggctcgccttcttcctgctcgatccgcacccgaagatgccgaactttcccttgagccgagccgaagccgcggatattgcggcctacatcgcatcgctgcgatagagcgtgatccggatccgaagctcacgttggcacgaagcgtggagcgcttttcggaagagaccgtgctcaaagccgcagacgactcccaccgatctccttgcggtctagcggtcaccggacgaaagcgatccgctacaagtgcaaatccctgccggaggaccggcagggatcagcagaagggatgacggacggcgaatggagtcgttcggtggcccatcatggacctgcgtgagtatcgaagcgcggatcttaacatcgcacaagatcaagttgtgggcacgccgtacacacagcgagagtcaagacttgtccttgcctggttgcatgagactgcccgtcatttggcgcatgtgatctcccgcgctcgtgaactgactgcgcaggaaatcggactggatacgcatcgcttcctgcaaatcggtggcatgtacaagcttgcgcgcatgctcaaaggccgacttcatgttctgctcggtaaaagcgagcgcctgcttcgatacctccgtccccgcgcccggaacggatgacattgatttgctggcggcttcaaaaaacatgccgaaggccttttccgcctggtcgatcgtcttctctgccaagtcgcgcagctcggccggaacttcgagtttcggttcgatcatggtcgcactctccctttttcgaactggataccacatttgccggaccaccttccagcggccagccgagggggatgacacccgctgacgggtgtatgaggaaaatggatggatgcagcctgggtccggcgcgcggccagactttaggacaaggggtgctcaggaagagcttcctcggtggccagatcttcgaccagcttgatcacttcgaaacgctgtcgaggcgcgagcttcagaaacgcgcggagcaggcgcaggctctcgacggtgccgcttgcaggcacgccgagcttgagatgcagctcggcggcgaaattgaggtctttcatctcgcacctatgacaagcatcggccctcgcgatccactcaagaaccgaacgtcgcaacagaacctgtcgcgacgaactctcggccgggggcgcccgccaggctggcacgctgaactgcacccaagcgacagaattggttgtaattatgccaaggaacaactcctccagcaagcccggctcgggtacgatgcttcttctgcaccgaaccacggcgattccggataacaggaatatcgacggccgtcacccacctgcgtcaagaagccgcatcgaacacgtatacagtcttgagcgccgttggcgctgcgcttcgcttttgtttcctatgtgaatggacatttgcggacaccaacagacgcttggcagcgtatacacgtagctgttgagtgacgtgcggaggttgtatcgtcgatggcaggaccgcgtgatcttcacgcccatcggcctccggtgagtggccgcgataccctcagcgagcctcatcgggcccgatttgctttccatccgtgaaccgccgttcagaaacaaacgacaaagcgattgcagaacggacacgcagatcacggcgcccccgctggagaaatctggagcgtacaccatcaaaggacaaaggcatgctttctcgctgcgatctcatcaagggcgctgcagtcgcgcttctcaccctctcggtacaaggcgcatgggcccaggagacaaagatgaacctcttcaagatcgttaccgtcaaggacgaaattgtcgtcggattgtcggcggaggagcttcaggcgcttggcggcaacgatgcgagcgccgttgcacgcgcgctggcacagaaaggcgacctcacggtttggcaatacaatgtgcgtcgaggcccgaacggcgaactgcagcaggcgccgaccgccaagatcggtcttttggccaacgcgtcgcttcgcgtcgagccctacaccacgccgtacaggatactgcctcatccgtaagcagggtcggtcacgtcggcggccgagaccgccggcgtgccgcaatcatctccgccggtccggacgcagcgtcccagcttccgtcgcaaagccgtagatcagcgccagccgatccaggcattcgcgaaagcggcgcccaaaatagtcgttccagcgctgcgtacggacggcacgacgctgcccgatctgatccatggtcagacccagcaccagcacatcgtgcaccagcgcggcgccgtcagtcccgagctcgcgctcgacccggttcagccgcagcaccgcctttcgctggctctcggtgaccggctcgcgcgtgctggtgccatcgacatattcgcgggtcgtgtccaccgcctgaggcccccgctcagcccgctcccaatcgttctgaaaggcgcgcccgccgcggtattgcgcttcgtcgatctggtggtgcgcatgcagccggccgagcggatcgctgcggatcgaccgcatagccaggatcttctcgcctgaatcgagcgcgagcggattgtcgacctccacctccgccagctcggcattgaacggcacctccctcgaccgccggtcgtagatctgcgccagtttgtaagacttgttgcgtcgggcacgtgccactgggctactccttgcaaaattgacgatcgaacgaaggcggcactctcaagggacgccgaccagcctcagcacgacccgcccggcgacacgggcggacggcgtgccagagcgacgcgtcaagcgagcatgcggtgcgcaatagctggacgccggctggcgggggtggccacagaaggcaatctcctcgccgtccttgtcgccgccataggggtagtggcagtcggccggctcgagttcgacgagcggtatcaggcgcggctggacgccgacacagcgcagcttcacccgttgggcgggcttcattgccgatttcggcggcagattcaggttcggcaaggctacgcgccgtggcgcaagcgggctggcctcgcccggccacgatggcgcgatcgacgggcttgtcatccattccggcaggacgagcccgagccgcttggcgcggccgaccaccgcgctgcgcgtgtaagccgttccgaatcgtgcgtttagctgtctcccgatctccgcataagacatgcctttgagaaaatagtcgcgaagcgcgtcggagtgctccgacggccaatggcccggttccatgctgctgtcctgtgatgcgccgcctccgatcgaacgacggaaggcggagcatacattccggtattccgaatagagagtcaagcgacaattctgatattcataattgcatcaattccgaatttcggattacaagaggccaggtgcgcaatcgagggaatcaccatgttggacgttgctatgatcgagcggggcctggagaaaacgggcaagagcaagggcggcctggcggcggccatgggcgtgcgccccggggcggtctcggagattctcggcggcgagcgcttggtaaaagcctcggagatcattccgatcatggaatatctcgagctcaatcttgcgccgatcatgggccgggtcggagccggcgcggtgatcgagccggactatgaacaggtccccccggaaggtctcggcgacgtcacgttgcccttcccgatcatggaagagacgatcgcattcgagatcgtgggcgattcgatgctgccaaaatacgaaagcggcgacgtgatcgtggtctacaaggatcagcgccatccgttgtcgagcttctacggtgaagaggcggtggttcggctcaagaccggcgagcgctatctgaaaaccatcgagcggggaaaatcaccctctgtcgtcaacctcacgagcttcaatgccaagccgatcgtcggggtcaagctcgactgggtcggggagatctgcctgtccatgcccaaggggcaactcgaacgactgcgcgcgaaatcggcgcggccccgcaagaagggcaagtgatggagctgcagccggccatttcgcattttcagaaatgaccattgacaaaattccggtttccgacaatactctgccgcgctacgaccacggggcgcggcaggatcgtttcatgcaatacttcgtcgtgatgatcgactatgggcggcggggccgcgaggcggtcgtcgatccggagatcacgaggcgcgaagtcatctcgcgcatcgcctcgggcgaataccagaacatctcgttcatccacgagatcctggagaatgcggtcgaggacgtgaccgaggccatgctaactgaggccgccctgccccagatcccgcctgaggatatagacctccaggcaatcgaccttgatcacacccgcgatctgcgcaagcacgaacggtcatgacgcaggccaggtagcctgcgtcaccgcccggtcggggattacaccaacagaactgtcgatcccgtggttttgcgtgccgccaggtcggcgtgcgcctttgcggcctccttcaacggataggtctggtgcacctcgatcttgaccgcaccggacttgacgacatcgaacagttcgttcgccatcgcgaccaggctttcgcgtttggcggcgtaggtgaacagcgtcggacgcgtgacgtaaagcgagcccttctgcgccagcaggccaagattgagcggctcgaccacgccggacgattgaccgaacagcgccgcgacgccgaggggcgcgaggcaatccagcgatttcaggaacgtgtccttgcccacggaatcgtaaaccaccggcaccttcttgccgccggtgatttcgtcaacccgcttaacgaaatcctctcgtgtatagatgatcacatggtcgcaaccatgcgccttggccagcttggccttctcatcgctgctgaccgtgccgatcacggtcgcgccgagatgcttggcccattggctcaggatcagaccaacaccaccggccgcggcatgaagcagaatggtatcgcccgccttcaccctataggtctgccggatcagatattgcgtcgtcagccccttgagcatcatcgccgccgcggtcttgtcgtcgacgccgtcaggcaatttcaacagccggtcggcggggatcagccgcgcctcggagtaagctccgagcggcgaggcgccataagcgacacggtcgcccggcttcagatcggtaacatccgggccgacctcctccacgataccggctgcctcgctaccgagcccgctcggcagttgcgccggatacaagcccgaacggttatagatatcgacgaaattgagaccgacagcggtgtggcggatgcgggcttcgccgggtccaggcttgccgacgctgacctcctcccagaccagaacttccggcccaccggtcttgtgaaatcgaatggcatgcgtcatgggcgttgctcccttatcgttgaggtgaaggtccgaacacggaattggccagcgaaacaggcatttggcccaccctggacagtacagagccgtaaccagaatgtcacagcgaacggcaaacattagccgttccacctgtgttcgaaagagttgatgagggctccgggctagccggcagtagcttcgcgtggggtttggtgggtcgcctgcgaaggagagcggagatgccagcttacgttcagcatcatcaggatgtcgaggtcccgcccgtgaattgccccgcctgcatggggttcctgccgatgtatgtgcgcgaggtcgagccgcattggggtctcgccagaatcgacttcgtttatgaatgcgccgattgcggcgccgaggtcaggcagacaatccgcaaaccggagcagctgcggcactgatttcgcgaacggcgagctgcctaactatttgcgcggaacggaaaaaatgccgctcacgcgcatctgatgtctcccaaacgaggcttgttctttgccgggaacgcaggcagaacaagcctcacttggacccttgggagcgcccattcgtggctgatcagaagccctcgacgtcgatcgaggcagtggaaagcggcctcgccgcgcaaggttacatcgcgagccggcagatcgcgacggccgtctatttgtcgcagcagatcgagaagccgatcctggtcgaggggcctgccggcgtcggcaagaccgagctcgccaaggcgatcgctgcctggcgcggcatgaagatgatccgcctgcaatgctacgagggcctcgacgaggccaaggcgctctatgagtggaagtacgccaagcagcttctctatacgcagatcctgaaggacaagctcggtgaggttctcggcggcgcgcagacgttgcacgccgcgctcgaccagctgcacgatttcggcgacgtgttcttctccaaggagtttgtcgagccacgtcccctgctccaggcgctggagcagccgggcggctgcgtgctgctgatcgacgagatcgacaagtcagacgctgagttcgaatcgctgctgctggagatcctgtccgacttccaggtcaccattcccgagcttggaaccgtttcggccatcacgccgccaaccgtgatcctcacctccaacagcgagcgcgacctcggggacgcgttgaagcgccgctgcctgcatctgcatataggctttcccgagcagcggctggaggagcggatcgtcgaaagccgcgtgcccggcatctcgcaggcgctgcgacggcagatggtcggcttcatccacgagatccgctcgctcgatctgaagaagctgccctcggtcagcgagaccatcgactgggcgcgcgtgctggtgctgctccaggcttccgaactcgattccgagatcgtcaaggacacgctcaacgtgctcctgaaatacgaagccgacatcgaggctgcaacgccgcaagtgacgaccttcattgccaaggcggcacggtccaacgtcttcggttgacgccgatgcgcgagaacctccatcgtttctttcgggcggcacggggcgccggcgttcacgtctcgcctgcggaaagcatcgatgcgatgcgagcagtcgcgcaggtcggcctctccgaccgcgcaatcctgcgcgacgcgctgctcctgacactcgccaagtcacaggacgagaagctcgctctcggcgattgctttgatctcttcttcagtcagccggagccgaggcaggaccagcccgaggcggacaacgacgacacttcgcccgatgcggatcagtcgcccccctccgacgctcccggcgatgctggcgaaggtcagccttcccagggtttgggcccgctcgcccagatgctgctttcgcaggaccgcaatgcgatcgcagccgccatcgccagcgcctccggtgcggcctccctgtccgacatccgctattccactcagcgcggcatcttctcaagccgcatactcgacgcgatgggccttcagcgcctgcgcgacgacctcgacgagctgaccgcgaccaatccggccctggccgagcgcctgcgcgccgcactcgacggcttgcgcgaagccgtgcgcgatacggtctcccaggggcttgcactctacgcccgcgaggaggccgagaacctccgcaatgagatcctgcgcaacgcgccgcttgctcgcatcgagcggcgccaggtcgccgagatgcgcgcactcattcgccagatcgcgcgccggctgcgagagcgctactcgaagccacgcaagcgccagcgccgcggccatctcgacgtgcgccgcacgctccgccgcaatgcggcctggggcggcattcccttcctcacggcatggaagcgcaagcatcgtgaccgaccgaagatcgtcgcgctatgcgacgtctccgggtcggtcgctcaagtctcagacttcttcctgctgctgatccactcattgcacgaggtggtcgacgacgtccgctccttcgccttctcctcccatctgatcgaggtcagtgaaatcctggaatcgaagtcgccggaggaggcgatgtccgagatcatgtccaaggtcggttttggctcgtcagattacggctcttcgctggtcgatttcgagaaggagttcatgagcacgctgacgcctcggaccaccgtgatcgtgctcggcgacgcccgcagcaacaatctcgacccgcgtgccgacattttgcgccgcatctccgagcgctccaagcggctggtctggctcaatcccgaggggcggctcgcctggggctttggcgattccgagatgccgcgctacgcgaccttttgcagcgtcgtgcgccaatgcgccaccgcacagcagctcgagcgcgccgtgtccgatatcgtagcgacgtatcagtaagcaaaaaccagcggtgtcaggccgcgttccgctcggcctgcgcgagattgcactcccggaagtgataggcgatttcatcgagcgcacgctgctcccattcctgggcctgtgcgagccagaatacacgacgttcggagtcgagcgccgcgcgctcacggcatagaaattcctgactgcgaatttcaaccagcttgttcatgcactccactcctcctgtgaagccaatcgcctgcaaatgagtgtaacagagtcctgcacggctcgccgcgtcatttctatgcatatcgcggcgaagggacagcgatgcttcccgtgcactgcggcaattcgcaccgcaacatcaagcttcgatcatcgatatttgattggcgctttcgacgatctgctcatgcaacgcttggacagcaacggactgccgcaattagtgaagagacgttctaaacagttcaccgaattccggactcattgtcgtcgcatggtcttcatgcagctccgctaacaggggcgcgcgactgggctatcgtttgaggcacaatgagcaacgacgtcgatttcgatcttaccccggaccaatgggacgctctgcgcacgctccgcaacgccacgtcgagtggtcgcctctcgaaggcctacctgatcgaaagcctcgtgaagcttggtctcgtggacgtcaatgacggcgtaccgtcgatgacgccgacgggacgcaaggtgctcgtgcgcgggtcatgccggctgctggatctcgcggcatagcggcgcgcaacaggaccggatcgctcaatcccaccggaggagcggcgtcccgtacgcccgcctccagaccgacagaaagcgcgggaaccaggaatgggccacggcgcccttataggcccaggtgcggtacttcagcccctgttcggaaatcagctcctgatagccgccgtggacctcggtcgcagtccgaatgtccttcaatattccttgtgcgcaggcgcggtaggtatcgcgccccgtgaactcgtcataatccagcatgcgatctgcgaactcgacgttgaacgtcggccaggaggagcgcccctgataggcaggtgcggcaatcttgtggatcatcttgttcctgggattgtcggccgacaccaggaaatgaaacgtgctggggatacgaaaccgcggttccgcgatgatcagatccgccgtggcagcgaacagcgcccgctcgctcgcatcgctcatggtccagaatccgcgatgcacaccgacgaaatccagtgcgactgatgacgccggcgaggtcgtccggtcttccagggaatgcctgatgtagccgtccttgccaaacaggcggagcaggtccctcttgtactgcacaaggtctcgcccgagcagccgcttcagctcgttctcaccgacgatcccgagctgcacgccccacacgaaggtcgtgtagacagaagcattggttacgaagcgcttgcgctcggcgcgggtgtctgtcgcagcggaacggggtgcgttgacatcgcaaagcaaagacctggttccgccatcatcgaacggttcgagctcgcttgcgagctgcagaatggctcgcttcaggtcggcgccatactccgccagcaacaagcggccggcatgcgcgcattgcgacatcgcgagataggacggtttcctctcctcggcagagatcatctgctggaggccggcgagaatgccgagcagcgtgtcggacgggcgcgagaaataattcaccccgaggtaccggccgcgtcccgcggggacgatggtcgtcgtgacgacgccggcacgaaccgcgtccagcaacaagcggacgctcttgtcgagcagccgagcgcgccggacagcatcctgcgcatccaagatggtttcgggatcgaggacatcaggatagaaccacgcgaagtcgcggggataataggcggaggcgtgtggtgcgcccgtgacgaggaaagcctcggtcagcgaaaaggcactctccatcgagtgccgatagaggtccccgatggcagtgaacgaatgatccgatcttctcaggaaccgatcaccgagaaaattgaccgcctggagggcgttggcgagaacggtcgcagccgcaccctggtagaatcggcttctgcggtttgagggcaacggggtatcgctattcatatcctggccgggtcaactccgatggtgcgggcaccatccaaagcctgcctgattcgtatttcttcacgatgacctggctgcttcggctggggcttcttcagcctgccgtcgaccttcctgcggcctgaaattctcgatcacccgcaacagcacccgcgcgcccgcgtcggcatcggcgagttcgacatgttcatccgggtgatggctgatgccaccgcggcagcggacgaagatcatgccgacatcggcaatgtcgatcatcgccatgccgtcgtgccctgctccgctcggcagctcgaagacggaaaagccttcggcctcgatcgcctgcgcgatctgctgctggagccaaggcgcgcacggtgcagtgcggttctcgtgagtgacatcgagttgaagcgccagccgccggcgcttggcgatagcctcgatctggcggacgatttcggtgaccgcgcgcttacgatgcccgtcggtcggcgcccgcatgtctatggtgaacgacacctggcccggaatgacgttggtcgcaccgggcttcgcctggatgtggccgacggtgccgacaaggccgccctcgtcggtgcggcaaaactgctcgatcgcgccgatgcattcggccgcaccggcgagcgcgtctcggcgcagcggcattgggacggtgccggcgtgaccggccatcccggtcagccgcgcggcaaggcgcgtggcgccggcaatcgctgtaaccacgccaacgggcaggttctgtgcttccagcaccggcccctgctcgatgtgcaactcgatataggccagcagttcgccccgcgtccgtgccgctgcgccgatacggtcgggatcgagcccgaactgcacgagcgcatcgcgcattgaaacgccatcgcggtcgcgcgtgttcagcacattctcgtcgaaggtcccggccaccgcacggcttccgagcaaggtcgaggcgaaacgcaccccctcctcgtcggcaaacccgaccacctcgatcgcaaacggcaggcgcttgccgcggcggttgaggtcggcgacgcaagagatcgccgtgatcacacccagcggcccatcccatttgcccgcatcgcgcacggtatcgtagtgcgagccgagcatcaggcatggcgcacccggctggtcgccttcgtagcggccacagacgttgccgatcccatcgaggcgcgcgctcatgcctgcttcgcgcatccagctcaggatgaggtccgctgcctcgcgcagctccgtggtgaggtagatgcgggtgaggctgccgccctcctccgagattgcggccagatcgttgatccggcgaacgatcacctcgccgagcgatgcactttgaacggcactgacggcccccatctcaacaagccttctcttctctgaccgccgccgctgtcctggcgacaatcggaccgggttccctgcagcaaatcacgcccggcgcttgccccaaccaaggcgtgattagcatgaatgtgaccacacgccatgcgacctcgcgcggatgcgcccgggagccgccgggaagtgcccgatccctaggcagaaccgcagccgattgattgcgggggcggcgatcacctcatgacggccagatactcgggatgaatttccatgtgaaagacatcgaagacaggcttccggggcaactagcacgcttcttgcatttcccggatcacctgctcctcccggaggaggttcggagggggtggccagaagcacccggcacttgtggctgccccctctttccacttttgcctggcttaccccgcccgcatggcgcgcggcggaactgaagctgcgctcgatcccaccgacggcgtcgtgccgacgagcctatttttctagctgccgcgataggtcgaatagctccacggcgtgaccagcagcggcacgtgatactggccttccggctcgctgacggcaaagcgcagcgggatctcatcgaggaacggcggatcggactgtggcacgtttcgctcggcgtaatatctggcgacgctgaagcggagttcgtaacggccgatcggcagcggacggccgccgatcagcggctggtcggtgcggccgtcggcatttgtcaccgcgcgcgcgatgacgcggttctcgccgagggtcgcgagctcgacgagctcaaccgggatgcccggtgccggcttgccaatctgattgtccagcacaagcgtcgagagccggccgtgcaccttcagcttgtcgtccgcaatgacgagctgatccaggcgcagcgccgcgatgcggccgatttcctcgatggcacgtcgcgtctcggtcttcgcgatattgagcagccgcgtctcgcagtcgcgcagcaccgaatccctggtgtgacggcgcaagcagacgatatagggaaagccgaacttcacgcggtaagcgttgttggcgcgcccgaacgccgcgtattcgggctccgacagccggtcgagcccggctctgttctgctcgtcggccgtttccgccgtaaggccggcggcaggttgcgtcttgctcgcgagatcgggatgggcgcggatcaacgacagctgaacgtcgggctcggcgctctggatcgccgcaatcagcgcggcgtggagttgattgatgcctgtgaagggccgctttgccgcaagctgcccggcgagccacggcgaacattcgacgacgccggcaagcgccgcaacgaagtcgtccctgctggcgccattgagatcggcgagcgagatctgtgacatctcacccgatctcgaatgcgtcggcggccagatgggcgtgcttgtcgtgccagtgctgcgcgatctgcaatcgggtcggcacccagacgcgctcgtgcttgccgatatagtccaggaagcggatcaggcccgccgcgcggccgggccggccggcgaggcggcagtgcaggccgaccgacatcatcttcggtgcggtctgcccttccgcataaagcacgtcgaatgcgtccttcaggtaggtgaagaactgttcgccttcggcaaacccttgcgggttgatgaagcgcatgtcgttggcatctaacgtgtagggaatgaagagctgcttgccgcccggtccccttacccaatagggcagatcatcggcataggagtcgcagagatagaggaagccgccttcctccatcagcagccggttggtgttgatcgaggagcgccccgtgtaccagccgagcggccgcgatcctgttgcctcggtgtggacgcggatcgcctccgtaatctcggcgcgctcctgcgcctcggtcatgtccttgtgctcgatccatttcaggctgtggctcgcgatgtcccagcccgattccttcatcgctgcgacgatctcgggattgcgcttgagcgcggtggcgacgccgaacacggtcgtcggccacttccgctcgttgaacatccgccacaaccgccagaagccggcgcgcgagccatattcgaacatcgattcgatattggcgtggcgctggcccggccagggctgcgcgccgaggacgtcggacaaaaaggcttccgaggctcggtccccatgcaaaatgttgttctcgccgccctcctcgaaattgacgacgaactgcactgcgacccgcgcgttgccgggccactgcggatgcggcgggttgcggccataaccgcggagatcgcgcgggtagcggggctcagtcactcagacttcctcgaagcgaatcggctgcgcgcccttccacagcacgctcttgcccagcgtcgccagattctcgagcccggaggtcagggtgatgaagtggttacccgcgagctggcccatcttgctcgcgaaatgaacgccgccataggcgagcaggatctcggtctcgctgataccgccggggtagaggatgatctgaccgggcgcggggtagctggtgtggttctcatagccgaccccgaaatccaggtcgccgagcggcatccatacgccctcgccgctccagcgcacatggatgatgtggctttcgaacggcagcgcgttgcggaaagcggcgacggttttgggcgccagctcctcctcgaagcgggcatcgaaggtgaagtcgccggcacggataacgagtttgctcatctcatctctctggatcagggccagcggccccacggctcacttccaagcaaaaagcattcccgacagtttcgcgcaagtggcgcggcagcgtctcgcatgtcctgggcatcgg

SEQ ID NO: 163 - DNA, 1520 bp, Bradyrhizobium colbertium
caggctgtgtggaaacgattggaggctccgggtaaccggggcctcttttgcttcaggtgctttcaggctgcggcggttttgatgttgatggcgcggaggatgttgtaggcgaggacggaaagggccatttcggttctggttcctttcaggtttctggttaggaaccgtccgcctgccgtcattcgcttgatcgtgccgaagggatgctcgacggcacatcgcctggctttcatcatctcgggcgtggcgcgggcatccatccggttgagcgcgtcgtcatcgagatggcgtttgacaaaacgccgctcggctgtggtgcagcgtggcttcaggacgcagccggaacaaccctgcgaggcgtaggtgacattgcgcttcttgcgatgaagctgcttgcgcaccagcgtccggcccgccgggcaggtgaacgtgtccgcctccggctcatagatgaaggcggtgcggtcgaacagggtgccgtcgccctggttgttgatcgagcgctgcgagggcacgcaggcgacgatgccgtcccgctcgcaggcgctggcatgctcgccgttgtcgaagcccttgtcggccacgaccgtcagggtgtcgaggtcgaggctctccctcgtggcgctggccatcggatgaagttggcggcggtcggtcggctcgtcggtgacatcgtgatgcacgatcaggcccgtgtcggcgtcgacggcggtctgtacgttgtagcagggcggcttgtggccgctgcctccccgcatcggacgggcatcttcctcgccttcgacaagcatgtcgcgctcttgtgtctccagcttgccagccattcgggcgagttcggcgcgcctgacgcgaagggcagcgagcgcggcgggaaccgcacccggctcatcgtcggcctcgcgcgtgtcagcctcgtccaaaccggaaaggtaggcggcgatcctactgtcgagacgggcttgctcctcggcgatctcccggcggccgatcaccttctttgggctggcggcggcgcggaacttcgagccgtccagcgccacgagacgggccgcaaacaggccggcatcccggcacacaagcacgaaagcccggcacgccccgatgatggcggggccgttgtcgcggcggaaatcggcaatcgtcttgaagtcgggggcgagccggcgcagcagccacatagcctcgacatcgcgccggcacgaccgctccagccgccgcgacgagcggacctcgttgaaatagccccagacatagagcttcaacagatcgcgagggtcataaccgggccgccccgtcgacgccgcaacagcccggacgaagccgagcccggaaagctccagtccatcgacaaaagcgtcaaccacacgaaccgaagcatccgacgcaacgtagtccgcgatccgcgatggcaaaaacgacgcttgatcccgatcctcgccggctatgtatcccatgaaaatggccaccccgttcccgaggcggccatcctagccgatttgcccggctttccacacagcctg

SEQ ID NO: 164 - DNA, 22383 bp, Bradyrhizobium colbertium
  misc_feature (9057)..(9066): n is a, c, g, or t
gccttcggcaaaccgcgccaagaacgcggggaggtctgcgggagggggcgggatgtgcgcgcctactttgacgtggtccttccgcagctcgcccgggaccatcttgatcttcgctttagtggtggggtgttcggcgacgagcagctcctcgggcaagcgttcgcagaagtttttgtgcgtccagacgatgaagtcgacggatagcacgggcgagggggcttcaccgcgatcgatcatccgctgcacctcgatgtgggcgcgcgcctccaattgcaggttgcggcgctccgggtccctggcgaagtcgtcgtgaagggcgcggtcgatgtcgataggcaaggtgttgtggccctcgatgaggttcgagtaatagcagttcatcgaacgcaccaggtcgccgacggaaccccgcatgacgggatgaaggcggccggccagggtgctggccttggcaaccaggtcagtggccaggtcttcgagttcctgccggtcgtcgggcaggaggggttccatcgctgatacgttcattttgccgctttctttgccgccaaatagtaaagcaaacagaggcactaagataagttaagacagcatgatttgccggttttattgccgctttggcgggcaaaaatcctcgtaacccgctgcctgctccactacctctgtggaaaagttcccctcctgcgcagcaagggttgcaccctcggcccttgttctataaatgttcccgcgggcaggagggaaatgatgccgattaaggtctttatttcacacaaaaaagaggacacggagcaagctggcgccattgcggcacatcttaccgccaatggcctcttcgtctacctggacgtcatcgacgcgcaactgggaaagagtgggccggatctcgctgactacatccgggcccaaatggaaaagtgcacccagttgctggcggtcatcagtgcgcaaacccaagcctcctggtgggtgccgtgggaaatcggggtcgcgaccgagaaagagcgatttctggcctcgttcgtttccggcaacgccacggtgccggaatttctgcagaaatggccttacctccgcacaagggcggaccttgacgcctatgtccgagaatcaaaacgcgcagaactgctggtcgaaaatcgcgtccaaaagggcgatcgattgacggcccgcgcgcaaggcttccgatcgtttcatacgtcattgaaggcttctctcgggcagccttgagcaacaaaccttggtatcaggagaagacagcatggctgccacgaaagttgtttttgttgcctttgcaatcgaggacgtgaagcaacgcgatttgctgaaggggcagtctcttcatccgcgcgctccgtacgagttcatcgatatgtcggtgaaggagacgtacgacagcggctggaaagacaaggtgcggacgcgcattcgccgatccgatggcgtcatcgtcctcgtcagcaagaactcgacctcctcgaccgggcagaagtgggaaatcgcctgcgcgaaggaagagggcaagaagattcgtggaatctgggcctacagcgatgaccgcacggagattcagggcgtgtcgacctgactccctgtaagccggacatgcgcaaggctcttatcgttggcgtcgattactatcacgacctcaccccgctcagcggatgtgtgagtgatgcagatgcggtagccggcgttctggcccgaaatgctgacggaacaacgaatttcacgacaccgaaggtgctgaccgccaccggcgctcacaacctgatcacccggcgggcgctgcgagacgccatcgaggcactgttcgcagacccttccgagatcgctctcctgtatttcgccggccatgggtacgtcgacacgaccggcggctacctttgtgcaagcgattgccgggacggcgatgacggactggcgctcagtgatgtgatgacgttcgcgaaggcatcgaaagcggcgaacaagatcatcatcctggatagctgccatggcggaatcgcgggcaaccaggccggcaaaggcggtctcgcggagatcggcgagggcatgacgcttctgaccgcgtcgaccgagaaccaatactcatacgagggcgggaacggggcgccgggcgtgttcaccaacctgcttgtcgatgcattgaacggggcggcggccaatctggttggcgatgtcacgcccggcagcgtatacgcccatatcgaccaatcgctgggaccatggggtggtcagcgtcccgtcttcaagaccaacgtccggtcgtttgtgtcgttgcgcaaggccacaccgccgattgctctcgaagagcttctgcagctcgccatccacttcccgcaaccgggattcaagttccagcttgatccgtcctatgagccggaaagatcacaggaaaagcgcgacgatccagcgatcccgccgcccgacccgataaggaatgccatcttcaaggtgctccagaactatgtcagagtgaatctggttcggcccgtcgatgcgccccacatgtggcatgcagcgatggagagcaagtcgtgcgagctgacagttctgggcgagcattatcgtcgattggtagcagacaagctcatctgagaccggggaggcgggatgtccgacaagcaatttactgtatccttcgcctcgttgatcgaagagcttgccgcgcttgagcatcggcgttgggcgcactggcagcgctatgttcatgaaaaaggcgagcgccgccccgacggttcagtggtcttgccggcagagcttgttgctcggtgggaacgcctgatcaacaccccgtacgaagagctcacaaacgaagaaaaggacagcgaccgcgagcaggtgcagaaatatctgccgatcctgaagcgttggctgcagcgcgttcgcggagaaaacgaaggtaatgcctgaatcattcaagtgcttccgtgacccgctcctttccctgtatcaatcggccgtcactgaaattgccaagaaaatcgacaagggagcggccgcggctccccggagccgtgccgggctgcagcgatccatggtcagcactctccccggtatcgcggcggacatcgccgagcgggaatatagtcgcgcgacgggaggtgtggcgcctgcttccccagcagggccctctgcacgagaactgtcgaagtccggcattgctgaggtctgtgccgaatgggggtggcgctacatgaaagcgctggcggcctccgatgccaacgccatccagcaactcgagaacgagttcaccgccgggacttgcgatcccgcatggttcagcaccctggtggaatacaggcgctttttcgagaacggcaagcgtaagcccattccttacgtcccggcgcccgctgtcggtccgaagacgatcgagatcaaggccaactcacgtatcgcgttgatgggagactggggcacgggagccatacctgccatcgaggtcttgcagcgcatcgccgatgagcatcccgatatactcttgcatctcggcgacatctactactcgggcacagccgcggaatgtcaatcgaacttcatcgatccgatcgactccattctccgcaaggacaaggcgttgccggtgttttcgctgtcaggcaaccacgatatgtactgtggaggcgtgggtttctacgacctcataacgaagctgaaccctgcgcccttcacgcagccagccagtttcttctgtctgcgatcagcggacgagaaatggcaattgctcgccatggataccggtttgcacgatgacaatccggccgctgtcgctggcgcactcacttaccttgaagaagatgagctggactggcactgcgaccgcatcagggaattctccggccggaccatcctgctgtctcatcaccagttgttctctgctttctctcccattggggccgccgatccgcagggtaagcggtctgcagtcaatcccttgctgctcaaagcttttcagcagatgacagcaacaaaggcgattgccgcctggttctgggggcatgagcacactctcagcatctaccagccatttgccgggctggagcgaggccgttgcgtgggccacggcgctgtccctgtctccgtcattgacgagatctacaaaccggtctccggtcttacagagacaccagctttgattgatcagtcgcggctcgcgacgcgaggaggcgtttacaatcacggctacgcgcttctaagcctcgaagccgatctatgcagagccgagtattatcaatcgacggctaaaggccgcgaactgatgtacagcgaatcatttcgttagccccaggctggcagcgaagccttcacggatggcgctgctgttgcccgatcgtctgcactaatcactgtcctcgaatcagcggcggctctgtatcatcggcccgggagaaccgatatgcagcgggtcaacacggcggcccttgtcgagggacttaagctcgaagtttcgtccaactttcccttccttgagggcgaaacatttgaggagtggatatcgcgggcgaaccagctcctgaatccatctcagcgcgccatgcttgcggctagtattggcacggtgcagcgcaagttggtcgccgagcgctctgcgcaaaagcgtgcttggatcgctgctgcccgtttggaatttcaaccaggacgccgacaagcctgctttgtttgcgggggattcgaaccaatcgcgcaggcgcaccatgtcgtgcccctgaacgagcagttcgaacatggcttcgataaacccgatcacgagtacgagtggctttgcccgaaccaccatgtcatcttgcatctctgcattgatcgcagcgcttcgacccagagtttggggcgccggatcgctcccagcatggccgacataccgctggagcacttcgacaagctgatggagttggtcggtcgtgctggtcggacgacccatcggccccgatcgtcgccgcagctcgccgctagctggtcggcggcttttgcgagatcatcagcgagaacgtcgtgatctcttccagatcaggaaattcgtctgcctctcggccccaccaactctgcgcatccttgtaaaagatgtgcaggaacttatggaaccgatcgtagaaatccgacatgttgagcttcggtcgcttgatcccagcatgcgcgagcgcaatgttcctggcgcggcgaaattcggtgggcagtgatggcgggatgctctcgggaaatgcgctgatgtgattttcccaactgggggccgtgccgtccaggatggcgtcccgtctcttcggcaatgactctgcaaatagctggcaatgtacttgtcagcattgacagcctgcagcgtgctaatggcgtgacgatcgcgtgcaatggcgcagagcgcaaattcataaaggtggtggacgaatctcgcgtaggcgtcatgcgccttgtaagcccgccgccgatcctgcccttgcatgattaggtcttcccccgcggaggcgaactgtctgaaggcctcatcgcagcgcagaaattcgtgcttcagggcgatgaagagcgccttatcagtctcatcgccgatcgtgaatttcatctcgtctaactcatctccggcttcttcttaggtttcttgcgcaagataattgacgatggcgttgaagttaaagcggcgaccgtgtaatcgggcacacgattacacgattttgggcttccacgatccagaagtccttatcaaacaaaaggccccgctcaggcacggggtctgcgctgcccttaacagcgctgcgagcagcatacctcacgacagcgcagcagccaaccagcgctatctgtaacctcattgcttcccgccagggatcacggtcggcttccacggcgagctttccctgatcgaggcgatcatggcttcgatgccgtcagcgacgaggggagacaactcatccctagcgccctcgttggtcgccgcgcgggggattgcccgagcaaaatgcgcaaaaccacagcgcttgacttgaccctccaaattcgctcgtcctaattctgttctcgtgcggccgattctgtcggcccgtcccattttgaatgacaacagcagccaccacgatccggccaggaaccatgcacgagatcatctgtccccactgtgacaaggccttcaaggtcgatgagtccggttacgcggatatcctgaagcaggtccgtgacgcggatttcgctgagcagctccacgaacggctggagctggccgagcgcgacaagcagagcgccgttgaattggccaaggcccaggtaagcagcgatctgcagaagacaacggctgctaaagacgctgaaatccaggacttgaagtccaagcttgaggggagtggcgttgcccagaagctcgcggttgctgaagcgctcagcgccgtcgaaaaggagcgggacaggctcgcgaacgcgctggccgagtccgagcgcgaaaagaaggcggcctcggagcttgctgacgcgctcctggcgagcgagcagcacaagattgctgctgccaaggaaaaagaaatccaggagctgaaggccaagcttcaggccgtcgagcttgagaagaagctcgccgtgactgaagcggtcggtgcgatcgagaaagagcgcgatgagctgaagaacggcatcaagcaggtgcagcttgaaaagcaactctccgagcagtcgctcaaggacaagtacgaaacccagatcaaggatcgcgatgacgcgatcgagcgtctcaaggatatgaaggcccgcctctcgaccaagatggtcggtgagaccttggagcagcactgcgagaccgagttcaaccgggtgcgctcgatggcgtttccgcgggcgtatttcgagaaagacaacgacgcgcggactggcagcaaaggcgattacatcttccgggattccgacgatgccggcacagagatcatctcgatcatgtttgagatgaagaacgagagtgacaaaaccgccacgaaaggcaagaacgaagacttcctcaaggagctcgaccgggaccggaccgagaagggctgcgaatatgccatcctggtctcgttgcttgaaccggacaacgagctctacaatgctggcatcgtcgatgtctttcaccgctactcgaaaatgtatgtcatccggccgcagttcttcctgccgatgattacgctcctgaggaatgcggccatcagttcgctgaagtacaagaccgagcttgcgctcgtgaaagcgcagaatgtcgacatcacccagtttgaaagccagctcgaaacgttcaaggcagcattctcaaagaactatgatcttgcttcgcggcacttccagacggcaatcgccgagatcgataagtcgatcgaccacctgcagaagaccaaggatgccttgatcggtgcggatcgcaacctgcgccttgccaatgacaaggcacaggacgtgacgatcaagaagctgacccggggcaatccgacgatggcggcgaaattcgcggagcttaagagcccgcctgccgaagccgcggagtgaggcggttaaagtagtgagtccgtgcgcgcgaaatcgtgtaatcgaattcacgatttcacggtctgacgccggaagggcggcggttagccgaagatatgactatgaccaaacataggcgacgattgccgcaacagcggccgttgccagggtcgcaatcacattgtccttcacttttgcgacgaactgcacgagcggcggcttgagaagctctgtgagggcggcaatgcgtcccctggcggcctgcgccgccgtgcagcggatactttgcggaccttgaattcggagtcttcagctactgtcatgcccaacgcggatctctctgcgaatttccaacaaaaaccagcgggtgaatgtcgtgggtcgacagggctatcgacttctcctaagatgtagcgggagtaagttcgcggagccgggtacgggtggggcagtgaacttccaggtgacggttctcaaggtgctggtcagctatccaggcgggttcgccgccatggccgaactcaagcgcgatatggcgattctggcgaccagcggacgggactggagcgagcgtacgaaacgattggcggcccgcgtgcccgacctggatatcttctcccaaggtctcatcgagcggatgaacggcggctggcgtgtcactgataaaggacgcgcggttctcgagatcatggaggctcggcctgcaccggtccaagcaacggaggagccgacaccaaccacgactttgtcaccgatgtcttcgatagctccaactcgacgcatgcggaaacgaagccgacgccaacgcgacgctctccggcgaagacgagcgattgcgtcgtgataaacctagctaaccagcggttttcgtctttcgggagataggaatatattccataatctatgttatgcagaaatcgagttggcatgaatatgtcgtctcatagcatgatgttgttccataacctacagagtccaaggaagccgatccaaaagaggcatggccttgtcgctaaagaacagaccattgaatcgcgccaccagtttacgtctcactccgtcattctggtttacctaacgcgccagactggcgaaactgtctgctggaacaaacgctgattcatcccggtatattcagcgaagcgctgcaggattcaaacgaacgatcgaccgcctcgcggcgcttggtcatgtcacagcgcgaacgcgtgctcgaaggaatgatcctcgacgcttcggatcgcctttactactgctcgaaccggcttcgtcacgcggcctctcgtcgctcgatcaattggacgcctttccactttcggccttcgatcaattcgcgggcaacttcccgcgtctctcctagaaccgcccgggcggcatctgtcatcagttctgccgatagcgaataaagatagttcgttcgcgtgatgggagcgtcgctgatggaaagggcgcgccacttgcccaacgtctcgtcggcctcgtgcaatgcggacatcggcttgatcgtggcacccatcccttcgctcacgcattgcatcagaagcgtcagggaatcgatttcgacgctcacgttcggcttcatgttccgcnnnnnnnnnnggccgtgagagctggttggcaggatcaagggaatctgggcaagttccgaaatcgagaccgattttcgattgtgggggatatagccgcttttttccgggaagatcacgaagagctcttcctccagcaggggctcggcgcacagcttggacgagacgtcattagtaaatagtatagcgatgtccagttgcccaaggcggatcatctgagcgacatgaccgctcattccttcgacgacattgagcaggatgccgggatatctgttccggatacgcttcatcagcgaaagtccgatggcccgctgagtagtcggtggcaaacccaaggacaccatgccttgcaggtctgtgacatcctttctcgcaatcgacagcgcctggtccatctgacgcagcatgaagcgggcatgatgatagagggccagcccgttttccgtcgggacgacgccgcgcgaggagcgctgaagcagcggtttcccgacttcgtcttcaagcttggcgacctgctggctcagcgccggttgggcgacgaaaaggcagcgggatgctttggagagacttccactttcaacgatctgagcgaaatagcgaagctgacgaaggtccatggaagcctcatccccgaggcgccgcgagttggctatacggcgcgcttatagccatcaatggaaaaccctatttttgcgattgtcaaacctgccctagcttgcatccgtgaacgaacaggaaggagcacggggtggtaaccatcggcgcgcagcgactgtcgaccagggaattacccgcctgcaggctcctgatcgccgggaaatggcagtctggcgcgagcgaagtggacgtccttgacaagtttcacaatcgtcctgcgatggtggcgcaacttccaagtgccgaacaggttggcgtgtgtgtggaggctgcattttcggctttcaaggccaatgcgctctctccttatgagcgaggcgccattcttgatcgtgcagcggcaaggctcgaggcgcgtgcagaccagctcgtcgaggtgctgcgtcaggaggcgggatttcctcggcgcgatgcgctgggcgaggtgcagcgatgtgccgcgacgttccggctctccgctgaggaggcgcgacgcctctcgggtgacatgattccgctggagtcggccgcagggcaggtaggtcggatcggatttacgctcagaatgcctcttggtgtggtttgcgcgatcacgccgttcaatgcacccctgaataccgttgcgcacaaagtctgcccggcgctcgcggccggcaatgccgtaattctgaaaccgtcgctccatacgccgatgacatcctgcattatggcggagtgcctgctggaggcaggcctgccgcccggtctgctgtctgtcctccacggcgatgcggaggtcgcgcaatggttgatcaacgaaaagaatattcatttctacgcgttcaccggcagcacgcaggtcggtcgcgcgatacagcagcgcgtcggtctgcgccgaacccagatggagctgggctccatcgcgcactgcattctttgcaatgatgccgatctgaatgtcgccttgccgaaggtcataaacgcgagctatcgcaaggcaggtcaagtctgtacgtcgatccaggtgctgctcatcgacagatcgctcgtggacaaggtcgagcaccgtctggcggaactcgtcgccgcgctgccgttcggcgacccggcgaacgaaaataccgtggtgggtccggtcatcagcgaagcggctgcggttcgagttgaatcctggatcgtacaagccgtgaagagcggcgcgcgccttctggtcggcggcggtcgcagcggctcggttgttcatccggcgctgttggccgacgtctcgaaggcaacaccgctgggctgtcaggaggttttcggacctgtcctgacggtcgcgccgttcgactcgttcgacgaggcgatcgagcgagtcaacgcgaccccttacggtctcgcgaccggaatcttcacgcagcatatcgggaatgcactcgaggcggcgcggaagctccaggtcggaggcgtacacatcaacgaaactcccagctcccgcgtcgatctcatgccctatggtggctcgaaggatagcggttttggccgggaaggcccgtattatgcgatccgggagatgagcgaagagcgcatggtcacgatcctggcctgatcgagaaacgcagccggagaagaacaagaaatgagcaagatgaagggtggcgaggtcatcgccgagtatctcgtcaagcagaaggtgccgttcattttcggcgtctgcggccatggcaatgtaggcattctcgatgcgctttaccaggtgcgggacaagatcagcctgatttcgccgcggcacgagcaggcggcgggccatatggctgacgcttactttcgcgtcaagcacagtccggtcgcgacgttgacgtcaacaggtccgggctcggcgaatatcgtgatgccgctgatcacagccctgtcggactcatcggcgttcatggcaatcacggcaaacgtgccgacgtcgcaggccaatcgtggacccttccaggagctctacgcgcacaatcaggccgactttgctcaggtcatgcggccggtggtcaagcggacgttccagcccacgcgcgtcgacatgctgcccctggcgttgcgccagggcttcgacacgatggtgaccggcaggccaggccccgtgaacttggatattccatacaatgtcttccaggaggaggatgacgtcgaactgccggcgccgtcacacgtgcacggcgggcatcgccccaatgccagccccgcggatattgcgaaggcgctcgacctgctgagcgcttccaggaaaccggttttctttgtcgggcaagggacgacgctgtccgaagccagccccgagatcacggcgcttcagcagaaatacggcatcccggttatcacgtctccgaatggcatgggtctcgtgccctccggcgacccgctgacgctgggctttatcgggcgcaacggtgcctatccggccaatcaggccggtcgttttgccgatctcgtgatctgcatcggaacgcgcttcgacgaccgctcgtcatcgtcatggcacccgggctattcctggaatttcccggagaccaagcttatccaggccgacatcgatcccgcggagctcgggcgcaactatccgccgacgctcggcgtcatcgccgatgccaagaccttcgcggcgcaactgctcgacgggatggccgagcggaaggacattcggcgggagaacttcgagccgtggcgcgccgaggttgccggttggcaggccgaatgggacgcgttcgtccgtcctcacttcaaggacgtgacgacgccgatccggccggaatatgtggtcgacgcgctgaccgacatcctgcccgacgatgtgatcctgtcgctagattccggcgtgcatcacaattggttcatgcagttctggaagccccgccgggcgcagagcatgctcaatagctggggctattcgtcgatgggcttcggcgtgtgcggcgttctcggtgcgcacctggcggcgcccgaccgcacctgtgttgcggtcgtcggcgatggcggcttcatgatggcgccccatgtggttgcgaccgcggtcgagtattcgctgccctgcatctggatcgtgtggaacaacttcgcctggggtgcgatccgcgacattcaatatggaatgttcggaggcagggagctcgggaccgccttctacaagggcaatcaggggcccggcggcgaacgatacaatccggacttcgcagcgtgggcgcgtgcctgcggcgccgatggctacacggtcaccaggagcgaggatctgcgcggtgtcgtggaaacggcgatcaagaatcgccgaccttgcgtcatcgatctgcatgtcgatgccgaggtgcgtccaccgtccacggggacgtggcaattgccgcccgtgccgtacaaggagccggtcttcggtaaaccgcagcggctgatctgaagcaataagtcgatcaacaagggaggagaacgttatgggttggatggatagtgcttgccggaagctgcttgcccgtttgacgactgcagcaatcgccagcctcgcggctgcaactggtgccagcgctcagacggatgatccaatcaggatcggcatgatttattcgaagcagggacccggctcgtcgatcggccagttcctggagcgcggcagcgaattggccgtcgaacaggccggcggcaaggtgctcggccgcaagatcgaggtcatctggctcgatgaatcggacccgcaaggctcccagcagaacatgcagcggctcgtggacgaaaataaggtcgtcgccgtcgtgggcggcaactacagttcgaatgcgctcgccatgatgagcgtggccaatcgcgcgaagattccgctcatcctgccgggagcagccgcgagcgaaatcacgggcaagagctgcagccgctacgtcttccgtacccaggcgacagtcccggtgcagacgagcggtctgatgccctacatcgcatcgatcgggaagaaagtctatttcctgacagcctcatatgcgttcggtcaggacatactgcgatcgtcgcgagccttgctgggcaagaccgggctgaccgaagcgggctccgacgaggtgccgatcaacacggctgactactcatcctacatcctcaagatacggcaagccaagccggacgcgatcatcggcggccttgtcggcggcgacttctccaccttcctcaagcagtggaatgagatggggatgaaggagaaaatcccgtacggcgccatagcggtgaccgatacggatttctgggacgtcggcccgcaggcctccagcggcatctacatcaagccctggtactataacaatcccaagaacacggcagccgagaaggcgatgaccgaagcgttccagaagaagtacggccagccgccgtcggacaagacttggtcggggtggattgcgatgcgcgcgctgctggagtcgatcgaggctgcgaagtcgaccaaagctcaggacatcattgtcgctctagagaaatggaaaaacacggaaggattgctgccgtactacttccgcgaatgggaccatcagatggtccggcctgccgtcatcgtgcaggtcaagaagaacatcaccgacaagtgggatttcttcgaggtcctgaaggacacctccgctacggcggaagagaccgaaaaagccttcgggaccaaggaagagatcggctgcaacatgccggcgctctgaagtagcccccgttttgatacccgttggcgagttggaaacatgaccgacatcatcatttcgcaagtcgccaacggcctcgtcctgggctttctctacgtcctgatcgcggtcggcctgtcgatcacgttcgggcttcttggcgtcatcaatttcgcgcatggcgctttcttcgcgctgggcgcttacgtgtcctggcaactctttcgttggttcggatggggagctgtcgccctggctccgatcgtcgttgctgccataggcatggcgacggagttcctgctgatacgtcggctttacgggcgcgagcctcttctgagcctcatcgtgacgttcgcactggccttgttgatcgaggctctcattcgcgcaacctggggcgcggacggcaaaccattcaacccgccgccgccgctcgcgggcatcgtcgagctgggaccattgctgatcacaaaataccgggtggcggttctggccgcgacgtcgacggcattgctcggcctctgggctttcctgtcctggacgccttatgggcggattctgcgtgccggaagtcgcgatcccgagatggttgagctgctcggcatcaagctgccccgcgtccttacggcggtattcggcctgggctgcgggcttgccgcgatcgcggggctgcttgcagccccgctctggaccgtctctccgtcgatggcggcgaatgcagttatgcccgcatttgtaattgttgcaattggtgggcttgggtcgttgcggggcgccgtggtggcggggctcgccgttggtgtcgtgaccgctctgaccatccagttctggccggcggcgtcgacggcctcgatgtacgtgctgatgttcgcgatcatgcttctgcgccctcgcggcttgttcggtgaacgctgggagcgcttcgaatgaaaggggcgttgctcgggcgtgtgtcgcgccatcccattgcgatcattgccgccgtattgcttgttgcctcggccattgcgcttggcatcggcatgccggttgcaagagtgactcagattgcgatctacactctttatgcggccggggtgaacttcctgatcgggtatctgggcttggtcccgttcggcgcatcgttcttcttcgggactgcaggttacgccgtggcgctgatcggaacgcgtcttctcggcgggaacgaactgggcgacgttctggtcgcagccggtttttcgatgctgctggcgctgacggtcggtgcggtcatcctccgccggcgaggcctctacttttcactgctcacgctcgcctgctcacagatcgccttcgagatcgcgttcaagtggacggacgtcactggtggagagaacggtatccaggatgtcgcgcggcccctgtttacctcggcgctcgagtttcactggttcgcgctcgtcgtcgtcctcggcatgttgtggctgttgtggcggatcgctcatagcccgtttggccggatgatgcaggcgctgcgcgacaacgaggagcgtgtcgccagtctgggctacaacacgtatcagacgaaactcgtcgccctcgtcatcgctggcggggcgatcgggatcgccggcggtctgatggtgctattgctgcagggagcttacgccaacaatctgagctggcagcacgccggcgatccggtgttaatggcggctctgggcggagttcatcacttcctcggacctctctggggttcgatcattttcattgtactcgaagatcgcctcagcgccctgaccgagaactggtggctgttctttgcgcccattatcatcgcattcgctctgttgtcgcatgaaggcgtgcaaggcatcttccagcgtcttgtcaggcgcgaccgctggacgctgacgcgcgacggcatttcaccgcgtcccgcgaagatcgtgccgtatacgccggccgccgcgaaagggtcaggcgacgggggcgcgccgatccttcaggtccgaaacctttccaagcgcttcggcaacatcgtcacccagaacgacatctcgctggagatgagccggacgggtctacactccctgatcggaccgaatggcgcgggcaagaccaccttcttcaatctcctgaccggccgctacaagccggactccggcgagatcctgttcgagggcgggtcgatcaacagcctgccgccctacaagcgggcgcggctggggattgcgcggtcgttccagatcctcagcgtgtttcccaatctgacggccttcgaaaacgtgcgggtcgcggtgcaggcctccaacaggacctatttcagcctgtgggccgacgcacatgcctcggagagcgtcaatgcgcgggtctggggcctcctggaggccgtcggcctgaccgaacgagcggctgaactctgcgtctcgctgtctcacggcgaaaagcgcctcctcgaaatcgcggtctcgctcgcgatcgacgccaagctgctgctgctggacgaacccttggcgggtctggcggaatccgatcgtcgcatcgtcggcgaactcatccgccgtctggcgcaatcccatgccgtccttctgatcgagcatgacattgatcgggtcctggcaatgtcggaccgcattacggttctgcatcagggccgtctgattgccgacggcaagccggcggaggtcgcacggcatccggaagtggtcgccgcctatctcggcgatgcccatccggtgcaggagagcgggcaagttgtggttcttccgacgaggaagggcggcgcggctgtgccggccgaccaggccccgctcctcgagctcaagggaataagcgctggctatggcggcagcaccgtgctcgagaacgtcgatctggccgttcacaagggcgaggtcgtcgccctgctcgggcgtaacggcgtcggcaagaccacgctgctgcgcgcggttacgggtgttctgcacccgtcggaaggacaaatgtcgtttgaaggccgcgatatatcgaagctgcggcccagcgacatcaacagactcggcatctcgctggtggccgaggggcggcggctgtttccgaacctgacagtacaggagaatctcaggcttgccgcgcggccggggggcgcgtcgatggaggagatattcgacctgttcccgaaggtcggagctcgaatccgttcgcgcggtgaaaccctctccggcggtgagcagcagatggttgcgattgcgcgcgccctgatggtgccgtccaggctcatcctgcttgacgagccgttcgaaggcttggcgcccgccgtggtccaggaagtgcgcgacgccgttggacgactgtcgacgagggcgagcatggtcatcgtcgagcaccatgcggagagcgtcctcgcgatggctgaccgtgcctatgtgctcgtgaatggtcgtgtagcctacggtggtgccgcaagcaccttggcgatggacaaggcgcagtgcgagcggctgctcggcgttgtccaggccgatgaggtggggcagcgcacccctgcgacaatgtgaaattcgaaccgatcaacgactggagacaacgcatgactatcgtggcgcccgccccaaacgcatttgcggatgcggaaaagaaaaaatacgcggtgactcgcaacctcgccgaactgcagtggatccagtatccgggccacttcaaccaggctctgtcgaaggcgatcgtcacgcccgaaaccacgggtagccggttcttcgatcaccgcatttcgacctacgaggcaggtgcgcatgtggaatcccatgtccacaaggtgcaggagcaaatctaccacgtgcttgccggcgaaggcgtgctggtcgtggacggcgagcgtcgcgtggtgcgttccaacgacgtgaccttcatcccgccgggcgtcgtgcatgagttccacaacacgggcatcgaccctctggtgttcctcgtgatcacgagcccgccgaccgacgaagagccggagccgcgttgagagaaaaatcgtgagcaagaagattctcgttacgggtggctgcggctggctcggtggcgccatcgtcagggcgctgctcgaccggggtgatacggtcgttgccgcggatatcgcggtttcgcccgcaatgaccgcgcttgccgcgagcaattcccggctgtcggccgaggcggtcgactttggcgagtggcatcaggtcgtgcggttgttcgaaaagcatccggtcgatgcggtagtgcacacggcagcgatcgtgggcgtcgtctttgcagcggacgccccgatcaagacgctgcgcgtcaacgtcgaaggttcgatcaacgtcttcgaggcgatgaggctgcgcaaggttcggcgtgtcgtgcatatctcgacggaagagacctacggcgatttccaggcacccaggatcgacgaggaccatccgcagaagccggccagcgtctatggtctcaccaagctggcagcagagcattacggtcgggtctattcacgcgaccacggccttgagtgcatcaacgtacgcacgtgctgggtttacggtccgcacctgccgcgcctgcgattgccgcgcaccttcatcgaggcggcactccggggcgagccctatcatcagacggagggtgcaaatctggccgtcgatcaggttttcatcgacgacacggtcgacggcaccctgctcgcgctcgacaaggagaagcatcgtttcgatgcctacaacatcgcaacgggcgaggctccgacgctccgggacaccgcagatgcggtcaatgaggcgatcccgggggcccgcattacggtcggcgacagcggtgtctatcgccatggcggcgtggtcccgaccgccgtcaagggggcgctcgacatcagccgtgcgcgcgccgagctcggctatgagccgaaatacgacatcaagaagggcatcgcggcgacgatcgccgcgacccgggcaagcttacggtaagcgagagttcgaggaacagaaatgaccaagccttcacccgtagttctgattttcggtggctcgcgcggcatcggcgccgcctgctgtagtgcgttcgagaacgcgggctggcaggtggccagcacctatgcggcggacgcgcccgcaaagccggtcgggcgtgcatacaaggtcgatatccgcgatgccaagggtgtggccgatgtctttgagcgcgtgaccgcggatttcggcgtcgcgccgattgctgtcgtggccaatgccggcatcaaccggccgccgcgtccgatggcggacttccccttggcggattttcaggagctcgtcgacgtcaacatcgtcggcgcgttcaatgtgctgtccgaggccgcgcggcgcgtgccgaagggcggctcgatcgtggcattgaccacatcgatgaccggtttgggaattcccgggggaggcccctataccgcaacgaaagcggcggtcgagagtctcgtgcggtcgatgtcgaaggaactggcgggccgcgaagtccgcgtcaacgcagtcgctccggggccggtcgatactgacctgttccgcgcgggaaagacggaagaagccaagcaaagatcggcggcaatgagcccgctgaaccgcattggccgcgcggaagagattgccgaggtggtgctgttcgcgtcctcgcagaacgcctcgtggatcacggggcagatcatccggcccaacggcggcatgatatgacccctgcggtggccgatgcctgggacgccatcgtcatcggcgcgggagcggctggtctgaccgcggcctgtacggcggccgctgcgggaaaatccgtgctcgtgctcgagcaggcggatgtcgtggggggcacgaccgcgatttcgggcggcatggtctggctaccggtcaaccacaagatggccgaagccgggcagcccgacagtatcgaggctgcgcggacctatctatcggttaccgtgcccggcaagaggcgggataagctcgagacctttctggcgcgggccgacgacgcgctgcgggatctggaggcgacgacgtcgcttcgattccagcccgtgccgacctatccggattactatccggacctgccgggcggaacggcgggtggacgcgttctcgaacctgtgccgttcgacggcaggcagttgggccgtgcattcgggctcgtgcgggaccctctgccggagttcacgctgttcggcggcatgatggtcagccgcaaggacattccacactttcgccgcgcgatgaagtcgctgccgtcgaccctgcgcgtcacgcggcttctgttggactacttcctccagcgcctcaaggcgcgccgtggcacgtcgttgtatctcggcaatgcattggtcgcgcgcctgcttcggtccgcactcgatctcaaggtggagatacggaccggcgtcggcgtcgaaagccttgagctcggaccggacggccgtgtctcgctggtcgttgcacaggatgcgcagggacgatcgaccaggctcgtggcccgccgcggcatcattctcgccaccggcggcatctcgcatcagcccgagatccgtcgcaactatgtccccgaagctgcgggaacgctgactgcaacggtcaaatccggtccgcagccgcggggagccgtcctcgccagtgccttgggtgccagcctgtcgtcatcgacaagggaaggggcgttctgggttccggcctctacctttgtccgcgcggacggcagcgcaggcgtctttcctcacacggtcaccgaccgcgccaaacccggcctgatcgccgtcgactgcaatggccagcggttcgtcaacgaggctctgtcctaccacgagttcgttcgtgcgcaactctcgcacgccaacagtgcgattccagcctggctgatctgcgactgcggcttcctctggaaatacggtctcggcaagatcaagccgttttcgacatcgatcaaaggcgatatcgcgtctggctatctcatcgaggctgcatcccttgcggacctcgccaagcagatcggcgtgccggtcgcggccctggatgagactgtgcgcaatttcaatgtcggggcagagaagggggaggatccggagtttggtcgcggcggtgatgtctaccagcgctcgctcggggacgccgacgtgaaaccaaatccgtgcgtcggaccgatcaagcaggcaccgttctatgccgtcaaggtcgtgccggccgatttgggcatgtcggcgggcatcgtgacggatgcctcgacacgggttctcagaccggacgggacggccataccgggcctctacgcctgcggtaacgacatggcgtcagtcatggagggggcctacccgggaccgggaattacgctgggtccggctctggtgttcggatggatcgccggcaaagaagcggtcaaggcacaccaggatgcgcgttagccacgagcgtaatgccactgaaggagagcaggtcatgatcacgatgggcatcaatacctacgcctacgcctggacgacgccggtgatcgattgcgtgcgccagcttgcggacctcaactaccgaacattcgagttcctggttcaccctcctcatctgccgcttgccgacttcgaccagtcttcaagacgcaagctcgcggcgctgttggacgaggtaaaggcttccgattgcgcgatgaaccttccgagtcttgatcacaacctggcgagcccatggcccgaggtgcgggcggcttcaatcgagatgttcaagcagacaatcgatctggcgtcagacatcaatgtgcattgggtggtgaccgtgcccggccgaatgagcccgttggcgccgcctaccgtcgaagctcgtacgaactggatgcgtgactcgatcgagaaattgctgccctacgcccaggcgaagggcatcaagctggccatcgagaatgtcccgatggcatcgttccccgatgcgaataccctcgggacattcgtccgcagtttcaaatctgaagacctcggcgcaacttacgatgccgcgaacgcctatttcattggtgagtcgcccgctgagggaattcggaagctcgccgacgtcctgcgcatcgtgcacgtctccgacacgaccaggaagattgtaagcggcatgaggcacccacctagc

SEQ ID NO: 165 - DNA, 138440 bp, Bradyrhizobium colbertium
  misc_feature (11134)..(11143): n is a, c, g, or t
  misc_feature (44894)..(44903): n is a, c, g, or t
  misc_feature (58647)..(58656): n is a, c, g, or t
  misc_feature (108565)..(108574): n is a, c, g, or t
cggagcctccaatcgtttccacacagcctgttgcgccggggctccaatgtcagcgagaccaacgttcgcttacttgctgtcgcggttcttgagcgcggtgcccaggatgtcgccgagcgtcgcacccgaatcggaggagccgtactgcgcgatggcttccttctcttcggcgacttcgagcgccttgatcgacacctggaccttgcgggccttcttgtcgaactggatcacgcgggcatcgaccttctcgccgacggcgaagcgctcggcgcgctggtcgttgcggtcacgcgcgagctcggagcgcttgatgaaggtggtgaagtcggtaccggcgatcttcacctcgataccgctttccttcacttcgagcacttcgcaggtcacgaccgcacccttcttgacatcgcccggctcggcgaaggggtcgccttcgagctgcttgatgccgagcgagatgcgctccttctcgacgtccacgtcgagcaccacggccttcaccatgtcgcccttcttgtagttgtcgatcacctgctcgcccggaagcttccagtcgaggtcggagaggtggaccatgccgtcgacgtcgccttcgagacccaggaacagaccgaactcggtcttgttcttgacctcgccctcgaccaccgaaccggtcgggtgactttcgacgaagacctcccaggggttgcgcatggtctgcttgaggccgagcgagatgcggcgcttgacggaatcgacttccagcacctgcacatcgacttcctgcgaggtcgacacgatcttgccggggtgcatgttcttcttggtccacgacatctcggagacgtggatcaggccctcgatgcctggctcgagctcgacgaacgcaccgtagtcggtgatgttggtgacgcggccggtgaagcgggcacccagcgggtacttggcttcgatgccctgccacggatcgtccagcagctgcttcatgcccagcgagatgcggtgcgtctcgtggttgatcttgatgatcttgaccttcacggtctggccgattgagagcacctcggtcggatggttgacgcggcgccacgcgatatcggtcacgtggagcagaccgtcgatgccgccgaggtcgacgaacgcaccgtaatcggtgatgttcttgaccacgccgtcgatgacctgaccctcttcgaggttctgcaccagttcctggcgctgctcggcgcgcgtctcttccagcaccgtgcggcgggagacgacgatgttgccgcggcggcggtccatcttgaggatctggaacggctgcgaattgttcatcagcggcgcaacgtcgcggatcggacggatgtcgacctgcgagcgcggcaggaacgccacggcaccgtcgaggtcgacggtgaagccgcccttgacctggttgaagatgacgccgttgaccttctcgttattctggaaagccttctccagcttgccccagctctcttcgcggcgcgccttgtcgcgcgacagcacggcctcgccgagggcgttctcgatgcgatcgaggaacacttccacctcgtcgccgaccttgaggtcgctttcacggccggggccggaaaattcgcgcagcgcgacacggccctcggtcttcaggccgacgtcgatgacggccatgtccttttcaattgcaaccaccttgcccttgatgacggagctttcctgcaggttgccgcctgcgaaggactcgtcgagcatcgcggcgaaatcgtcgcgcgaggggctataggtatcagcagtagtcgaagccatttgttctccagttgcggatgtcttgccggccgttgggttcatgggcgcatcgcacacgcagtgtcggaaggtccgcaaaaccttcgagcgaccgctcgttgccccggccttacgaccagaacagcggaagcgggccggcagaggcccgcgcgttcgatacgtggaaatctttgtccggagcctggatcgcgccggtcccgaaagcaggggaccgaaggtatcgacctcaaagaagcgggagcgggcacttcctccaatgacggctgcggcttacccccgcgaccggcccgctcggacggcctcgataatgtcgatggcggcccggacaccgccttctatatccagttgggagttgtctagcaagtaagcatccggggccggtttcaaaggcgcgatcggccggttcttgtcgcgctcgtcgcgctggatgatgtcggcgagcacggcggcctcgtccgcctcctcgcccctggccctggcttccatggtccggcggcgagcccggaccttggggtcggcgacgacgaatatcttcacgtcggcatggggacagatcacggttccaatgtcacggccgtccagtaccgcccccggcggatcggcagcgaattgccgctggaaattgaccagcacctcgcggacgcgcggaatcgcggagacgatcgaggcgccctcgccggctttctgggtcttcagggcgggattgccgaacttttcgggatcgagctgcaaagcagcctgcaccgcagccgcctcgtcattgagagcgtgcccggactgcatcaaggcataagccaccgcgcggtagatcacgccggtatcgagatgacgatagccgtaatgctgggcgagtcgcttgccgagcgtccccttgcccgaggctgccggcccgtcgatggcaatgatcatgaaaactcggcccctagcgaacgcatcatcggaatgaagtccgggaaactggtggcgatgaaggcggtgtcgtcgacgctcaccggccgatcggaggcacagcccatcaccagcgcggacatggcgatgcgatggtccatgtgggtcgcgacaacgccgccgcctggaacgtggccgcggccttccacgatcagatcgtcgccggcaacctcgaccttgacgccgttgacgcggagcatgtcggcggtggcttccaggcggtcggattccttgacgcgcagctcctgcaggccgcgcatgatcgtcgtgccttcggcgaaggacgccgccaccgccagcaccagatattcgtcgatcatcgacggcgcgcgctccggcggcacctcgacgccgcgcaatttcgacgcacgcacgcgcaagcgcgccatgggctcgccggcatcgccgcgcacctcactctcctcgatcgacgcgcccatttcgcgcagcgtggtgaacaggccggtgcgcagcggattggtcatcacgtccggcagcacgacatcggatccctcgacgatcagcgccgcgacgaccggaaaggcggccgaggagggatcggccggcacaacgacgctggcgccatacagctcgggctgacccaccagcgtgatgcggcggccgtgcggaccttcccgcgttgaggtgatatcggcaccaaaatgcttcagcatcagttcggtgtggtcgcggctggcctcggtctcgaccaccgtggtggtacccggcgcggccaggcccgccagcagcacggccgatttgatctgggccgaagcgaccggggtcttgtacacgatcggcagcggatcgcgcgcgccctggagggtcagcggcagacggccaccctcgccgccggcgatgaccttggcgcccatcttttcgagaggatcgaggatccggcgcatcgggcggctgcgcagtgaggcgtcgccatcgaaaaccgccgaaatcgggcagcccgcgacggcgcccatgaccaggcggcagccagtgccggagttgccgaaatccagcgccgccttgggctgggcgaagccgccaacgcccacgccgttcaccttccaggcgaaatcgccggttcgctcgaccctggcgcccagcgactgcatggatttcgccgtgttgaggacgtcctcgccctcgaggaggcctgaaatcctggtctcgccgaccgcgagcgcgccaaggatgagggcccggtgggagatcgacttgtccccgggcacccgtgctgtcccggtcaagggaccgctggcgcgagactggagcggcctcggttggtcggaatgggtcaagattgcgtccttggataggcccgaaggctcgggggcaggtaccacatggtccccgccccgtcacgggcatgtcgttctcctgtaatgcgctattgacagcgggccgccaactagccaagtgaagcaccgcttttcagacattcccaggattcctgccgtggccaagtccgaactcggaaccaaacgtatttgcccgaccacgggcaagaagttctatgacctcaacaagaatccggtgatctcgccctataccggcgaggtggtgccgatcgccccgatcgcacccgcacgctcgtcccgcggcgccgaggcccgcaacatggcccaggacaccacgcccgagccggccgaggccgaagagttggtgtcgctcgaggaagccgatgccgaggagaacacgggcaaggtcaaggccatcgtgcccgaatccgaggacgacatcgaggtcgacgagaccctcgacgacgacgatgacgacgattcgaccttcattgccgacgaggaagagggcgatgaggacgtgaccgacatcattggtgatgtcggaggtgatgaagagacttgagatcgatcctgatctgtgaaaaagggtgcaccgcgcgagtcgcctaggactcggcggttggggggatccaccagatcacctcgtccagggttaaggggccatagctcagctgggagagcgcttgcatggcatgcaagaggtcggcggttcgatcccccctggctccaccacgcttcgtccttcgagctacgcctggcgcagccgcgcggggagcatatcggaagtcgcactcggggcgagccttctcgaagaagcggctctgctaacccctactcctcgatcaccgcattcagcctgtcccgcagcgcgacgatctcgtccttcatcgccaccagctccgacaccgagcaattcgacgccgccaaaatcgactgcggcacggcccgcgccttttccttcagcgcctggccctgcggggtcagggagatcagcacctgtcgttcgtcctcgcgcgagcgggtgcgcttgacgagatgggcggcctcgagccgcttgagcagcggcgtcagcgtgcccgaatccagaaacagcctttcgccgatctccttgaccggcacgtcgtcgcgttcccacagcacgagcatgaccagatattgcggataggtcaggccgagccggtcgaggagcggcttgtagacgcggttgaaggcgtgcgcggcggaataaaccgcgaagcagatctggttgtcgagccgcagcggggcgtccgctgccgaatgcttccgggccatggcgaacctcacgaggtttgacgccattgtggtgcccggcgaccgcagattcaattgcgaacaattaaatgtgaggcatgggaatttcaattgcgcacaatctaattggaagcaatataggtcgcactcgctccaacaccagggagatcaagatgtccgtgaacgtcctctacaagaccagtgccaaggccaccggcggccgcgacggccatgccgcgaccctcgacggcgcgctcgacgtcaagctgacgacgccgaaggagctcggcggcggtggcggcgccggcaacaatcccgagcagcttttcgcggcgggctatgccgcctgcttcatcggcgcaatgaagttcgtggcttcgcagggcggccccaaggttccggccgatgcctcggtcacctctacggtcggcatcggcccgcgctccgaaggcggtttcggcctcgacatcgacctcgccgtctcgctgccgggtcttgcccgcgccgaggccgaggcactggttcagaaggcgcaccaggtgtgcccttactccaatgccacgcgcggcaacgtcgacgttcgcctgacggtcgtctgatcacgagcggatcggctggcccgggatccccctcgggctggccgcttccgtgatttgccacgtcacgggatgacgcggcggcgcatacggccccacgcgcggcgccattgctggcgcaaaaaaacctcgctaggcctgtgatcgaacgccgacacaggagaagcgaaggcatgagttctgaagccgcgggttctgaagccgccccaggtgccatgagcggactgcgcgtcatcgatctcacgcgcgtgctcggcggaccgtactgtacccagatcctcgctgaccacggcgccgacgtgatcaaggtcgagccgcccgcaggcgacgaggtgcgcgactggggccctcccttccacgaggaggacgcggcctatttcatcggcatcaaccgcaacaagcgctcgatcggcctcgacctcgcctccgagggcggccgtgccgtgctgctgaagatgctggagaccgccgacgtcctgatcgagaatttcaagccgggcacgctggagaagtggggcatcggcaacgagaccttgcgcgacaaattcccgcgcctcgtgcattgccggatctgcggcttcggcgccgacggcccgcgcggcggcaatccgggctatgacgccatcatccaggccatgaccggcatgatcgccgcgaccggctcgcccgagagcggtccgatgcggattggcgtgcccttggtcgacatcggcaccgggctctatgcggcgatcggcatcctgatggcgctgtcggaacgtcagcgctcgggcaagggccagttcctggagacgacgctgtacgagaccggccttgccatcatgcatccgcacaccgcgaactatttcatgcatgggaagccgccgagcctcaccggcaacgagcacccgaaccttgtgccttacgcgatcttcccgaccaagaccgacaacatcttcatcggcgtcggaaatgatggcaccttccgcaagctctgcaaggagatcggcaagccggagctgggcaccgatccgcgctttgcgcgcaacaaggaccgcatcgccaaccgggaggcgctgcgtgccgagcttgccgcggtgttcagccagcacgaggccgagccgctgtgcgatcgcctgctcgctgcgggcctgcccgcaggtcccgtccagaagatcgaccaggcgttgaccaatccgcacacgatctaccgcggcgatattatcgagaaggactggtacaagggcgttgcctcgccgatccggctcgaccgctcaaagccgagcctgcgccgcctgccgcccaagttcagccagcactcccgggaggtgctgggcgagttcggctactccaaggccgagatcgacgcgatggtggccaagggcacggtctgcggccccgagcgcaagcgttgagataagacgagcttcaattgcaatgcacgccctcttccgcttgcgggggaggggttgggagaggtgtctccgcaacgggataatctcccagaggacagagccctcacccgcgccttcggcgcgaccgctcccgcaagcgggagaggctttcgggcccgcggcctgttctttcggcgctcatgatctgatgccgcgctgcggcgcgggcacgatagtgcagcgcgaacgggaaaggctgcccgatccgtcttcgcctatttgacgagcagcgcttgccgctttcgtttcggccgcttacacagtcatgtgaacgtcatatggcgctgctagcgcaagcgcttcttcattgacgggcaagggaggttttcttgatggctcttcgacattttggtgcggctgctgctgttgcactcacggttggtttcggcgcctcgccggcactcgccgtgaccgaaatccagtggtggcacgcgatgaccggcgccaacaacgacgtcatcgtcaagctcgccaacgacttcaacgcctcgcagggcgatttcaaggtgatcccgacctacaagggcaactacgccgacacgatgaacgccggcatcgccgcgttccgtgccggcaatgcgccgcacatcatgcaggtgttcgaggtcggcaccgccaccatgatggccgcgaccggcgccgtgaagccggtctacaagctgatggccgagaccggcgagaagttcgatcccaaggcctatctgcccgcgatcaccggctattattcgacctcgaagggcgagatgctgtccttccccttcaactcgtcgtcgacggtgatgtgggtcaatctcgacgcgctgaagaaggccaatgtcgagatcccgaagacctggcccgaagtgttcgacgcggccaagaagctgaaggcggccggccacgcgacgtgcggcttctccaactcctgggtcacctgggtcaatctcgagcagctctccgcctggcacaacgtgccgctgtcgaccaaagccaacggcctcgacggcttcgataccgtgctctcgttcaacggaccgctccaggtcaagcatctggagaacctcgtcgagctccagaaggacaagacctacgactatgccggccggaccaacaccggcgaaggccgcttcacgtcgggcgaatgccccctctacctgacctcgtcggcgttcttcggcaacgtcaaggcgcaggccaagttcgccttcaccgcggtgccgatgccctactatcccgacgtgaagggcgcaccgcagaattcgatcatcggcggcgcctcgctctggatcatgggtggcaagtcggccgaggagtacaagggtgtagcgaagttcctgaccttcctgtccgatacggatcgccaggtctatatccacaaatcgtcgggctatctgccgatcaccaaggcggcctatgagaaggccaaggcggaaggcttctacaaggatcagccttatctcgagaccccgctgctcgagctgaccaacaaggagccgaccgagaactcgcgcggcctgcgcctcggcaacatggtgcagctccgcgacgtctggtcggaagagatcgagcaggccctggccggcaagaagaccgccaagcaggcgctggattcggccgtggagcgcggcaacaccatgctgcgccagttcgaaaagaccgccgtcaagtaaggcgacaagcggcaggccggtcagccggcctgccgctcccgcgggcatcatgcaaaagcaagccattttccagtcgaagctattgccctacgcgctggttgcaccgcagctcgcgatcgtcctggttttcttctactggccggccttgcaggcgatgatccagtcgttcctgctccaggatgccttcggcctttcgaccagcttcgtctggttcgaaaattacatcgatctgttcaaggagcccgcctatttcgaggcgatcctgcgcaccttcttcttctcgtttgcgatcgcggtgtcgtcgctgtcttttgcgctgctgctcgcggtgatggcggacaagccgctgcgcggctcgatgctctaccgcacactcctgatctggccctatgcggtggctccgccggtcgtcggcgtgctctggatcttcatgctgcatccctcgctcggcgtgctctcgcgctatctgcgcgcgctcggcgtcgactggaatccgctgctcgacggcgaccaggccgcagcgctgatcatcctcgccgccgcctggaagcagatctcctacaatttcctgttcttcctcgccggcctgcagagcatccccaaaagcgtgctcgaagccgccgcgatcgacggcgcccggccgatgcggcggttctggaccgtgacgttcccgctgctgtcgccgaccatcttcttcctcctggtcgtcaacatcgtctacgccttcttcgacacgttcggcatcatcgacaccatgacccgcggcggtcccggcaagtcgacggagacgctggtctacaaggtctataccgacggcctgctcggcggaaacctcggcagctcggctgcgcaatcggtgatcctgatgatcatggtcatcgtgctgaccggaatccagttccgcttcgtcgaacgcaaggtgacctactgatggtcgaggaagaaggcttccggcgctacatcgcccacatcatcctctggatcgggatcgcgatcgtcgccttcccggtctatctcgcaatcatcgcgtcgtcccaggacaacgcggtgatcgcgaacggccagatgtcgctgctgcccggcggtcatttcttcgagacctactaccagacgatcttcgtcggcacgagcggctcgacccgcgagccggtcggcaacatgatgctgaactcgctggtgatggcgctcctgatcgcgatcggcaagatcgcgatctcgatcatctcggcctatgcgatcgtgtatttccgctttccgttccggatggcgatcttctggctgatcttcatcacgctgatgctgccggtcgaggtgcgcatctatccgacctacaagatcgtcgccgatctgcacatgctcgacagctatgccggcctgtcgctcccgctgatcgcatccgccaccgcgacgctgctgttccgccagttcttcatgaccgtgccggacgaattgctggaggcctcgcgcatcgacggcgcaggccccttccgcttcttctgggatacgctgctgccgctgtcgcgcaccaacatggcggcgctgttcgtgatcctgttcatcctcggctggaatcaatatctctggccgctgctgatcacgacgcgcgacgacatgcagacgatccagatcggcatccgcaagatgatcaccaccaccgacgcgctgaccgaatggccgatcgtgatggcaaccgccgtgctggccatgctgccgccggtgttcgtcgtcgtcgtcatgcagaagctgttcgtgcgcggcctggtcgagactgaaaagtgagaggggcgaatagtgagtagcgaatggcgaatcgtacgccgacgatcgaacgggcgttgcattccaagcagatcaactactcgccactcacgatccgccactcgcccgagcggagctcgcaatggctaacgtcaccctgcgcaacgtccgcaagacctatcccggcggcttcgaggccatcaagggcgtcgacgtcgatgtcggcgacggacaattctgcgtgctggtcggtccctccggctgcggcaagtccacgctcctgcgcatggtcgcgggcctcgagaccgtcaccggcggcgagatcgacatcggcggccgtgtcgtcaacggaatcgaacccgccgatcgcgatatcgcgatggtgttccagaactacgcgctcnnnnnnnnnntatgagcgtctacaacaacatggcctatggcctgcgcaaccgcggcatggccgaagccgagatcaagacccgcgtcgaggaagccgcgcgcgtgctcgagctctccgcgatgctggaccgcaagccgcgccagctctccggcggtcagcgccagcgcgtcgccatgggtcgcgccatcgtgcgccagccgaaggtattcctgttcgacgagccgctctccaacctcgacgccaagctgcgcatcgcgatgcgcgtcgagatccgcagactgcagcgccgactcaacaccacgtcgatctacgtcacccatgaccagctcgaggcgatgacgctcgccgacattctcgtcgtgatgaacggggggcaggtcgagcaggtcggtaatcccctggcgatctacgaaaagccggcgaccaccttcgtcgcctccttcatcggcgcaccgccgatgaacttgatgtcgacgcgtcccgaggagatccggtcgcagctggcgggcagcgcggcggccgacgccggcgtcctcggcatccgcccggaggatttcgtcatcaccgaccagaccccggacggcggcgtcgcgctgccgctcaccgtggaagcgatcgagcgcgtcggcgcggaaaccttcgtctacggctcccgtgagcaggaggagaagcacgtcgccgccacccccggcgagctgccgcccggcgagatcatcgtccgcattcccggaaccgaagcccccgcgatcggcgcgaggatccgcgtcgccgcacgaccggcgaagctgcatctgttcagcggcgacgggcgcaagcggctcgaggcctgaggggttccggcccccgacaacccgagcgcaaaaacaaccccatgcacagtagaagacgccatgttttcgctggggtattcgcccgcaacttcgtcgtgcccgggcttgtcccgggcatgacgtccggcagcacctgacggccgggcgaccatccacagccccccgctacgtgcttgaacccacagcagaacgtgcccatattgctgggcaaggggtgccactacgggccccgacacaccaaagtcgcttccgcgaggactttgtaaactatgtctcgtgttccaacgctctccagccccttcctgctgggcttcgacgagatcgagcgcgtgctcgaccgcgtcgtcaaaggcgccgacggctaccctccctacaatatcgagaggtgtgaccgcacggacggccagcccgagcgtttgcgcatcacgctggcggttgccggattcacccgcgaccaactcgatgtaaccattgaggaaaaccagctcgtgatccgcgggcggcagcaggacgacaagacccggcaatacatccatcgcggcatcgccgcgcgccacttccagcgcaccttcgtgctggcggaagggatgctggtgctgggtgcggatctgaagaacgggttgttgtcgatcgatctggcccggcctgagccggagaggatcgttaagacaatcgctatcaatgagcacgaataatggaacgagtagcggactcgaccgcttagtgttccagaggagtcgagaccatgagtgaaggtcacgttgcgttcgaatacgaagccaagaacgtctctccggagacgctggcaactctgggcgaaggccatatcgcctatgtgaagcagatccgctccgaagacgtgccgggcctgtttccggaggcgccgaaaatcgcgccgggcctcaagctgttcgcgcttcatgccgccgacggcacgccgatcatgctgaccgacagccgcgaagccgcggtcgccaacgcctggagcaacgagctgcaagccgtcagcgtgcactgagcacgcgcgtcgtacgaagagagttttgagcgggcatgccttcgagcgaaggcgtgcccgttttcattttgagtgatgatatgcgcatcatcattcggagccgacgggttcgcgcaaagcgcggccgatgaggcttcgagacgcaatccagatcctcgcgcggagggactctggattgcttcgtcgcaaggctcctcgcaatgacggtgtcgagagctaggcacgaaaggcggatgttgccgcagttgcgcctcgcgatgaggctcaggccgccgtcgccggcggcagcgccagcaccgaatagatcgcctgggcatcgcgcgaggcgcggagcttcttggcgatgtcctggtcgcgcaagaggcgggcgatgcgggcgagcgccttcaaatgatcggcgccggcgccttcgggcgcgagcagcaggaagacgagatcgaccggctggccgtccatcgcctcgaaatcgatcgggcgatcgaggcgcgcgaacaggccgaagatcttttccagcttgggcagcttgccgtgcggaatggcgacgccatagccgaccgcggtcgtgccgagcttctcccgttgcagcaacacctcgaacacggagcgctcgttctgcccggtcagctcggcggccttggcggcgagctcctgcagggcctgcttcttgctgttgaccttcaatgccgggagaatcgcctcgggtgcgaccagatcggtaatcggcatggagggtttccgaggtgaatgaagccgtcaggttccgaattggcccgcttgatagaccaagctgagccggcgtcaataacatgaagcaggaggcggacttagcccaagtcccgttaggtcctgatgtggggggcttctactccaacgcaatcccggtgccaactcccgcgtgcggctttgccacggccattgttaagggccggaatggtacgggtgccggtcccccggcctaaccgtccgacttgccgtcgaccttggcttccggcggatcaatccagccgacattgccgtccgcgcggcggtaaatgatgttcacccggccggacgaaccatgctggaataccaggcacggagctccgctgaggtcgagttccatcactgcctcgctgaccgagagccgcttcagcgaggtggtttgctcggcgatgatgacggggctgtagccggtgacttcctcctcgtcctctccgggcgcttccagcacatagctggtggcgtcgagtgcagccatcgcctcggaggcggcatgggccttgcgggcggagcggtccttgaggcggttcttgtagcgacgcagccgcctctcgatcatcaccagcgcctggtcggcactggcataggcatccggcgcgttcgaatcagcttccagcgtaattccggaatcgagatgcagcgcgcaatcggtgcgaaagccgaagccgtccttgctgagcgtgatgtggccggaataattgccgtcgaaatatttgcgcagcacctcttcggtgcgctcggcaacgcggccgcgcagggcctcgccgacgctgatgctctttcccgaaacccggagagtcatttgatgcctcgcttggtttgattgcccagcttggatcgatcgcgaaagggagatgagagtagcgcgatttcgcgccagcgcaatcaggccggctcggtgttgcgggagcgatcagacaatgcggtggagaggacgttaccaagagcgctctgcttgtcgcggcggcgttgcaccgaggagggtatgcgcatggcttcgcggtacttcgcgaccgtgcggcgggcaatatcaatgcccgaggcgcgcaagcgttccacgatggtgtcatccgacaagatcgccgagggctcctcggaatcgatcagctgcttgatatggtgacgcacggcttcggccgaatgcgcctcgccgccatcggccgaggcgatcgaggccgtgaagaaatatttcagctcgaacgtgccgcggttggtcgccatgtacttgttggcggtcacgcgcgacaccgtggattcatgcatctggatggcgtcggcgacggccttcagattgagcggccgcaagtgagccacgccatgggtgaagaagccgtcctgctgccgcacgatctcggttgcgactttcaggatggtgcgggcgcgttggtcgagcgcgcgcacgagccaggtcgcgttctggagcgcgtcggtgaaataggacttgtcgccatccttgccgatcttcttcgacagctcggaatagtaggtctggttgaccagcacgcgcggcaacgtgtcgctgttgagctcgacatgccagccgccgtcggggcccggacggacatagacgtcgggcaccatggtctgcaggcgcgccgagccgaacttcatgccgggcttgggattgagacggcggatttcgccgatcatgtcggcgatgtcctcgtcgtcgacgccgcacagcttgcgcaaggacgcaatgtcgcgcttggcgaggagatcgagatgctcgacgagagcctgcatcgccgggtcgtagcggtcgagctcgcggagctggatcgccaggcattcactcaaagaacgcgcgcagacgccgggcggatcgaatttctgcagcaccgcgaggacggcttcgacgtcctgttgcgacgcgccgagccgctcggcggcctggccgagatcgggcggcaggtagccggcctcgtcgacgaggtcgatcaggtattggccgatcatgcgctgggcgggtgcggcgaaggcgaccgacagctgctcggcgagatggtccgacaaggttgtctcggccgcgacaaaggcttcgagattgtaatcttcgtcaccagaggcgccgccaccccattcggtataggtggtcggcgcggcgtcctgggcggtgcgggccgcagcctcggcaggctcctcggagaagacgttgtccagaccggtatccagggtctgctcgatctcggcgcgggtgccgagatccttgctcatccattcttcctggccgggctcgaaaccgtcgccgctgccgccgaatccgtcctcgcccggaccgtcgccgtggccatccccctggccaccctcggaatcgccgtaacttccgacctcggccggggactcgcccgccgggccctcgtcactggcccgttccagcagcggattgcgctcaagctcctcttccacaaaggtcgtgagatcgagattggacaattgcagcagcttgatcgcctgcatcagctgcggcgtcatgaccagcgactgcgactgccggaactctaatctctgcgtgagggccatgaagcaagaaccgttccctaaattggtccgatttttgcttatcctagtctgagcccgatgtacacgtcttgacgaaacgcaaaaacgggctagaggcggaattcctcgccaaggtaaagacggcgaacgtccggatccgcgacgatctcatccggggttccctcggtcaagatttccccggcatagacgatataggcgcgatcggtgagaccgagcgtctcgcggacgttgtggtcggtgatgagcacgccgatgccgcgattggtgaggtggcggaccagatcctggatgtcgccgaccgcgatcgggtcgatgccggcgaagggctcgtcgagcagcatgtagttcggccgcgtcgccagcgcgcgtgcgatctcgacgcggcgccgctcgccgcccgacagcgcgatcgaaggcgatttgcgcaggcgggtgatgttgaactcgtcgagcagcgaatcgagctgctgctcgcgcttcttgcgcgagggctccaccacttcgagcacggcgcggatgttctgctcgacggtgaggccgcggaagatcgaggcttcctgcggcagatacccgattccgagccgcgcacgctgatacatcggcagcttggtgacgtcgtggccgtcgagctcgatcgcgccgtggtcggccttgatcagcccggtgatcatgtagaacacggtggtcttgccggcgccgttcggcccgagcaggccgaccgcttcgccgcgccgcacataaatactgacgccgcgcacgacctgacggctgccgaaggactttttcacgccatgcacggccaggaagcccggccgcttcagcagctgaggaccgccgccattggacgcggcggcgcttctcagggggtgaacagcctgcgggcgcggcggctcgacctgatagtcaccctggaacggatcgggcgcgcgcatcggctggtcccgggcgatcggcggtgcgtcgcggacaggactgggcacgaggccaccgacgctgtcaccgagcgcggtgatgtcctggcgcgcaaatcctggccggccgcgcttggcggggcgccgacggaacatgctgaagagatcgaccatccccgccttctagcgttgcgcgtgctctttgcgcgacttttgcgcgatctgccgcgccagcctgaccaatccgctgacgcaactgggtgaagggatgtctcatgcccagtgaaacacgcccgaaaagcggcggccccgcttcgaaagccctgcgcgctagatacagtctcgccagccaagcttcaaccttggatcgggcgcacccgaagcaagtggttggacttacttttgtttacttgcaccgggcaattgcagaggcggcgccgcgccgggtttggcactctgccccgctgggccgcaatcgctgccgccgccctgcggcagcagcgcctgaacccggccgctgtcggattccacacgcgagacgccggtcgtcatgtcgaccatcaggcggtcaccgcgcagcacgttcttgcattgcgtcaagaccacgccaccgagcatggtgatgaggttggtcctggtgtcgaacacggcggtctcgcccgtcaccacctgatccttctgggtgaccacgacattgccgcgtgcctccagccgcttgatcgaggagctgcctccgggtcccggcgtcgccgattgcatcggagccgatttcgcgcccttcgccgcgggctgcggcgcggccggcttttcgccaccgccggaatcgtagaacaccacgagcgtcttcgaggtcatcgtggtgtcgccctgcaccaccttcacattgccggcgaaggtcgcctccttcttcttgtcgcgcatctcgagcgaggccgcctcgatctggatcggctgatcgcggttctgcgaaaagccctgcatcgcattgggcacgccctgcatcgtgctctgcgcgacggccgcaccggtgacgagcagcgcgaggccggcggcgagcgcggctgcgccagagatgccgcaccgcttgccggcgccacgcgaaagaatcctggtcatcaaaatcatcttgaactggcggccttgttctgaggcgtacgtggctttgccggcgggggagggtctgcaggcgcaggctgtgcggcggcaggatcatccagcttttccagatgcatcaccacattgccctcgaagcggatgagttcgccgccttcggtgatgcgcagcctgtctgcggtcagtgtgccgttggtgagcttgacgtcgacacgctcgtccgaggagaccgtgcccttgcccatgtcgacaaaggcggagttcagccgcgcctcatagccggccgaggtgcgcaggaagatgtccttgcgcagctcgagctgctgctgcttgttgtcgaagcggccggtgcgggcatcgagcaacagggtggattggtcctccatcagcacctttgcgcgcacatcggagagatcgacatgatccgggtcggtgatgtcctgggtcgcggtcttggcccagagctcgtagggccgctggtccggcgtgaagccggccagatgcggcgattccatcgtgatcttggtgcccgagaccaccaggttcccggaatcgagcggcagcttcggcatcagcatgcggaacgggttgaagatcgacacgccgacaatgaccgccatggacagcagcaccgcccccggcacggccacgcgcaggatccgcaccaggcggctgtggcgcgccgcgctggcaaacttcgccgcgagcgcggcgtcgtaggtcggattctgggccgaattcacctgggctcctgagtcaacctgggctcctgagatatgcctcgccttgtccggttgaaggacgttccactctatcccgggccggccaaatatgcagccggcgacaggcggttacgaaagtgtccgaaacggggcggcaagctcgggccaactgccgcgcagggccttcaggaatgcgcgaagatgtcctcttccgaccagccctggaggtcgagcaatgcccgggtcggcaggaagtcgaaacaggcctgggcgagcttgctacggccttcccggaccagcatggtgtcgagccgctcgcgcaagccatgcagatgcagcacgtcggaggcggcataggcgagctgcggctcggtcaggttgtcggaaccccagtcgctggactgctgctgcttggaaaggtcgatgttgaggacctcgcgcacgagatccttgagaccatggcggtcggtataggtgcgggtcaggcgggaggcgatcttggtgcaatagatcggcccggtcatgacgccgaaggtctggtaaagcaccgcgacgtcgaaccgcgcgaagtggaagatcttggtcaccgccggatcggcgagcagcgccttcaggttcggcgcgtcggtgtgccccttggggatctgcaccacgtcggcgctgccgtcgccgggcgagagctgcaccacgcagagccggtcgcgatgcgggttcagccccatggtctcggtgtcgatcgccaccgctccggtgtagcgggacaggtcgggcaagtcgccgcggtgcaggcgtacggtcatggcgtgtcaaaacctcggatcgattcggtgcgcgatatcataggctaatcggatggaccgcgatgtagccagtggcggcaggtgacgcaagcggcggccgtgacttacgggcggtcagatcgcggcgagcatgatgcagatcatcgccgcaaccgcgatgcggctgggcccatcccggaacgcgtacaggatcggatcgtccggcatctcgcggcgatgcgccatcatcagggcgcggccgaaccagtacagcagcagcggggtgagcagccacagcatccagggacggctgtagagcggcgtcaccgcagacgaggagacatagagtgagaacaccgtcaccgcgttcatcgcactcgccgccgccatcgcggcgatgacgtgcaaatcggtgatcctgtagtctcgattggagggatcggcgagccctgcgctctcgcgcatgctgagttcgctgaagcgcttgatcagcgccagcgaggtgaacacgaacagcgagaagatcaggagccattccgacagcaccacgccgacaccgacggcgccggcgacgatgcggagcgtgtagagagcggcgagggtgacgatgtcgaccagcatcttgcgcttgagcacgagcgaataggcgatcgtggtggcgagataggcgccgagcacagcgaggaagaggggcgagatgcagaggctagctccgaccgcaagcaaccacaacacggggatcgccgccagcgccgacgagatcggcaattcgccggcggcgagcgcgcgatggcgcttggtcggatgctgccggtccgcggcgagatcgagcagatcgttcatcagataggcgcccgacgcgcaggccgagaacgccagaaaagcgagcagcgcgtagccgagcgtctggaagttcagctgatgcgcggtgatgaccggcacgaataccagcgtgttcttggcgtattggtagacgcgcagcgccttcgcccaggtcttgaggccgggcctcggggtgccgcgacgttcgatccgctcgatcgcggcgcggtcgaacggcaggccgcccgcagcgagctcggccggcgtgacgatgccgtcaaagccgagatgcgtcgcgatgccggcggcatgaccggcaaagcgatccgcgacgagatagatcttctcaccccgcgcccgcgccgccagcgcccggttcagcacgtcggaatcatagggcagatgggcatagtcgatctcggcccgcgccaggacatccgtgagcgccgccatgccggcgcgtccgccggcgccgaagcgggccagcatgcgtccgggactggacaacagcgcctccatcagcagctcggaacgcagcagggcgccttcgagatcgatgacgagcgtccggtccgccgccgggcttgctgccggctcggacacgccaggatcgtagtgccgggcaggctgctccatccgaaaacgctctgaattaccgcaacatgaccggcattcggccggggagcagggaaatggaaggtcaggacattagcggagcattcgctaaaggcggcttaatcggcggaccagggcagcggtacgaacctcgatcgggctgcaggactgttgcagggatcccacaaccttcagggatcccgtattccggcacaatgtgcgccgtgcggcccgtggaaatcgtgcttgctcaccccatctgccagttccccctccccttcgccctcaaccaggtgccaatgaccgaacagacgctcgcagcgcccgtcgacgatccacagcaacgccagcgcggcttctcgcgctaccagatgctgctcatcgcgctgctcgcgttcacgcagttcacgatcattctcgacttcatcatcatgtcgccgctcggcgcgatcctgatgcccgcactcgacatcacggcggggcagttcggcgtcgcggtatcggcctacgcgttcagtgcgggactctcgggcattctcgccgccggctttgccgatcgcttcgatcgcaagcgcctcttgctgttcttctatgtcggcttcacgctcggaacggcgctatgcgccgccgcgcagaactatcacgtgctactgctcggccggatcgtgaccggattgttcggcggcgtgatcggcgcggtcgtgctggccatcatcaccgacctgttcccgctgcatcagcgcggccgcgtgatgggtttcatccagacggcgtttgccgcgagccaggtgctcggcattcccgccgggctgtttctcgccaattactggaactggcatgtctgcttcgttgcgatcgtcgcgctgtcgatcgcggcaatcgccatcatcgccttcgccatggagccggtcgacgcgcatctgaagctgaagcaggacagaaacccgttccaccatctggtcgcgaccatcggtcagccgcgctatacgctcgccttcctcgtcacgacgctgctggcgacgggcggttacatgctgatgccgttctccagcgcctataccgtgcacaatctcggcatcgacatcgcgcatctgccgacgatctatctcgtctccgggctgttcagcatcgtcacgggaccgctggtcggccgcgccagcgacgccttcggcaagtatccgaccttcgtgttcggatgcgcgatgaccgtggtcatggtgctgatctacacaaacctcggccacgtctcgctcgcgactgcgattctagtcaacgtcctgatgttcgtcggcatcttctcgcgcatgatcccgtcgcaggcggtgatgtccgcgatccccgatgcgagccagcgcggctcgttcagcgcggcgagcgcctcgctccagcagctctccgggggtatcggcgcggtgctcgccggcgcaatcatcgcgcaagcgcccgatggcgcgctgatccatttcgaccggatcggctacgtcgtcgtcgcgacgacgatcatcacgctggtggcgatgtatttcgtgcagaaggccgtggcggagcagacggggaaactggtggtgtaagggcaccatgcagcagcagcagcccggctcgtcgatcagccgccaccgaacttggatggatcgtcataagctggagggtcgtcgtggtcggtccgcagaccgccgggaacggagtcgtcgcgatagatgcgcacaccattcggagtgacgtagactggcaccacggcctggcccggccgaacgacgacatgttgcgacttgtgatgccctcgtgcggcggccttcgcggaaacgcacggaccgatgaggaggcaaaggcccaagacgctcgatcccaagacactcgatcccaagacgcaccatccagagacgccgcgcattgcacctactccgatgaatcagccgagctcccaaccggcagcacgggttgcatcagctaacgatggctgtatctccattgcaaagagggcaccgccgtcggcctaaggcccgataccatcgcaacactctgaaagggcttatctatctggatctgcttgcgatccaggaaagcatggtgcccaggaaaggactcgaaccttcacggccgttaagccactggcacctgaagccagcgcgtctaccaattccaccacctgggcatgccgtttggggcacggaggcggttactacggttcggtgacgccgttgtcaattcatgcttgaggcccggttcgggatgccgattgcgcatcgcaaaccggcccgatacaagcctgacaagacgcactctttcggcaggacgggacccctcatggcatcgaatctggacacgctcgtcacggttttcggcggatcggggtttttgggccgcagcgtcgtccgcgccctgtgcaagagggattaccgggtccgggtggcggtccggcggccggaactcgccgggcatctccagccgctcggccgcgtcgggcagatccacagcgtacaggcgaatctgcgctatccggcctcggtccaggccgcgctgcgtgattcgcatgtcgcgatcaatctcgtcggcgtcctcaccgagggcggcgcgcaaaccttcgacgccgtccaggccaggggtgccgagaccgttgccaaggcggccgccgccgctggggcacagctggtgcatgtttcagcaatcggcgccgatgccgaatcgccctcgcgctacgccagggccaaggcggccggcgagaccgcggccctggccgcggtgccgtcggcgacgatcttccgtccctccgtgatattcggccccgaggaccagttcaccaaccgctttgccgcgcttgcccggatgtcgccggtgctgccgctgatcggcggcgaaacgaagatgcagccggtctatgtcggcgacgtcgccaccgcgattgcggacgccgtcgacggcaagaccaaggcgggcggcacctacgagctcggcgggccggaagtgctgaccatgcgcgagatcatccagaccatccttgagatcaccgatcgcgagcgaatgctgatcccgctgccgttcggcctcgcccggttcaaggcggccttcctgcaattcgcgccgggcgctttcaagctgacgccggaccaggtcacgctgctcgagcgcgacaatgtcgtctcggaggcggcgaaggcggccggcctgacgctggaaggcctcggcatcaccccggattcgctggaagcaatcgccccgcaatatctctggcgtttccgcgcagccggtcaattccagcgcaagagcgcgtaaagcgtcattgctctgggctgggcagagagcctaccgtcagcgcggcagcggtcagaacttcagcttcttgaacaccgcttccggcagcgtcttgatgatcagcatcacgaggcgccatttgccgctgacatagacgacgtcggtctttctctcgaccgcctgaagaattgcatcgcccaccacgctcgcctcgacggtgagcgggccgatcagcttcatgccttcggtcatcctggtgcggacgaagccgggcttcaccgtgaccacgtgaacgccgccacggctggagcgggcgcgcaggccggacaggaaggcggagaagccggccttggccgatccatagacatagttcgaggcacggccgcgatcgcccgcgaccgaggacacgccgacgagcgtaccgctcccgcgtgccaagaacttctccgcgaacaggccgaggatcagcgacggcccctcgtagttggagcgcatgatcgcggtggcgtgggcgagatcgctctcggcattctgctgcacgccgagcaggccgacgatggaaatcacgacgtcgggcagcgccgaaagggacccggcaaaggcgtcgaatgaagccgtgtcgagcacgtcgaacctggcgagaccgacgtcgatatcgtagcgcgcgcgcagatcggcggcatccggatcgagcgcggcgacgtcgcggccggcgagcaccacatcgtatcccgccttggcaaaggcgcgcgcggcggcgcggccgatgtcggaggagccaccgagcaccaatacagtcttgcgtgacgtcatggcctagacctcatcgaagagacgttgcgacaatttcgagcggatattgccagcgggatcgagcgatttgcgaatggcgttgaagcgcgacagagcgggatagcccgccgcgaacgtcgcacgcgactggcgcgcatccttggcgaggtagagacgtccgccggcggcgacgacgagacgatcgatctcgtcgagaaaattcaggatgtcgcccctcaacgggaaatccagcgccagcgtatagccgggcagcggaaacgacaggatgccgtcgccctggccgagcctcttcagcaccgccaggaacgaggcatcgccgcgtcgcgcgactcgatcgaggaggtcgccgagcacatcgcgcgcaccggtttcgggaacgacgcattgatgctgcaggaagccgcgcttgccatagatgcgattccagtccttgagactgtcgagcggaaagaaatagggatagagcgaaaccacgcggccgccgccggcgcgccgcgcgcccatgcggtagtacagctcgttgaaggcgcggatgctgaagcggttcagcgtcatcgagggcaggtcgacgggcacaccaaggccgggatctttgtcgacgggaaacgcggcggcgccggcagggagttcgtcccttgccgcctgctcgccgagatagatcagcgagcggccgagatcacgcccacgcgcggcgcaatcaatccacgccaccgaataggtcgcagaatcgctcatctcgagcgcgcgcatcgcggcgtcgagatcggatgccgaaatcacgcgctcccagatccaccccgtttcgacctgccgcagccgcaacgtcgcttcgaggatgattccggtcagtcccatgccgccgatggtggcgaagaacgcatcggaattctgctcgcgcgaggcttcgatggtctcgccctgtcccgtgcgcagcaggatgctgtcgacatagcggccgaagccgccttcgcaatgatggttcttgccgtgcacgtcggccgcgatggcgccgccgatcgacacgaaacgcgtgccgggcacgacgaagggcaggaaaccgcgcgggccgaaggtgtcgatcaggtccgagagcagcacgccggcctccaggcggatgcgcccgctcgccggatcgaacgacctgacccggtcgaagcccgtcatcgtcacggtcctgagggcgccgatcgcggcatcgccgtaggcgcggccattgccgcgcgcgatgctgccggccgagacggcctcgccgaccgctccgaacgaacgcggacgcagcacttcgctatcgacgaccgggaaacggccccagccgctgacgagggtcatggctcagctcctgtgccgggcgcgccgcccggctttggaaactgactaccgatcaaaagcttattttgggttgaggcgcaggaggagcgtagcctggatggagcgccagcttgatccgggatcgcgccccaagtgataccggccccgggttacgcttcactgcatccggaccaccggcccgaaatctaccgtcccagcgccagcgcgatcaggccgagcgtgccgacgatgacgcgccaccaggcgaacaccacgaagccgtggcgggtgacataggtcaggaacgtcttcaccacgatgatggcggtgatgaacgacaccacgaagccgatcgcgacgatgttgatgtggtccatcgtcatctcggcccggctcttgtagaagtcgtaggcgaaggcgccgatcatggtggggatggcaaggaagaacgagaactccgccgctgcgcgcttgtcggccccgagcagcattgccgcaacgatgctggcgccggagcgcgacacgccagggatcatcgccacgcactgcgcgatgccgatatagagatacgtcagcagaggaaacttggtggcgtcatgctcgcgcggcttgagatcgagcttgtcgacccagagcaggacggcgccgccgacgatcagcgtgaagcagatgacccacggattgaacagcaggctcttgatgtacttgccggcgacaaggccgacgatcacggcgggcagaaacgccaccagcacaccgatcacgaagcgccgcgcataggcgtcgccggtaaacagaccgatcgcaacgtcccacagcttcctgaaatacagaccgacgatcgcgagaatcgcgccgagctggatcagaaccgtaaacgaatcccagaacgcgccctcgccgagatgaaagaagcgctccgccagcaagaggtgaccggtcgaagatacgggaaggaactcggtcacaccctctatgatgccgaggatcactgcccgtattgcgtctgacatatttacggtccatttcggctggaaaagcggggctcttctcgcccattcgttcccacgctgcaatcgcaaaatgcgaaatcacgcccttgcttcgcggttttgagggactagtgtggcgccgcacaaacattgatggattcttaagcaccatcaaatagtcaaaggcttcatgtttacgctgtatcatcatccgttctgtccgcattcgcgcttcgtccgcttgatcgcgggcgaatacgggttcgacctgaagctgatcgaagagcgcagctgggaacggcgcgaggcatttctgctgctcaatgcggccggcaccacgcccgtcgtggtggatgacgagcagccgccgatcccgggcgcggcgatcatcgccgaatatgtcgacgaggcctatggcgccgagatggggccaaagcgcctgatgccggaaacgcttgccgggcgcgtcgaggtgcgccggctgatggcctggttcaatgaaaagttcttcgaggaggtctcgcaccctctcgtcaccgagcgcatctacaagcgcttcatgagcgaggagaacggcggcggcccgccttcggccgacgtgatgcgcgcagcaaaagccaatgtgcgctatcatctggcctatatcggctggctggcacagacccgcaatttcctcgccggcgaccggctcacctacgcggatctcgccgccgcggcccatctttcggcgatcgactatctgggcgacgtgccatggagcgaggacgacgcagcaaaggcgtggtacgcgcgggtgaagtcccgcccgtcgttccgtccgctgctgagcgaatggctggcgggcgtgccggcgtcgcggacctacgtggacctggatttctgagctccgatccgactgaactgaagaccgcgcttgcccgcgaagcgcgcgcgctcggcttcgactgcatcggcgtcaccgcgccgggcacgatcgagagcgccgggaactacttcctcgaattcatcgcatcgggcggccatggcgacatggactggctcgcagcccagcccgagcgccgcgtcgatccgcgcgggctgtggagcgacgtgcgcagcgtgatcatgctcggcgtcaattacggccccgaccgggatccgctggcggttctgaggcagcgcacgcgcgctgcgatctcggtctatgcgcagggcgacgactatcacgacctgatcaagaagcggctgaaggcgctggcgcgctggctggtcgcgaccgcacccagcgaggtgaaggtattcgtcgataccgccgccgtgatggagaagccgctcgcccaggccgcgcatctgggctggcagggcaagcacaccaatctggtctcgcgcgagttcggctcgtggctttttctcggcgcgatctacaccacgctcgagctgccgcgcgacgatgcggagatcgatcattgcggctcctgccgggcctgcctcgacatctgcccgacggcggcattccccgcgccatacaagctcgatgcgcggcgctgcatctcttacctcaccatcgagaacaaggggccgatcccgcgcgaattccgcaaagcgatcggcaatcgcatctatggttgcgatgattgtcttgccgcatgtccctggaacaagttcgcacgggaggggcgcgaggcgaagctcgcggcccgcgacgagttgcgcgcgcctgcgctcgccgaactggcacggctcgacgagggggcgtttcgcgcgctgttcacgaaatcaccggtcaagcgcatcggccgcgaccggttcttgcgtaacgtgctgattgcgaccggcaactcgggtgacgtgtccctggcggacgaggcgcgacgattgctggacgatgagaatccgctggtgcgcggggctgcggtgtgggcgctgcggcagctggtggcgcgggaggagttcgaggtgctgaggctgcacgctctcgaactcgagcacgacgagagcgttcgcgaggagtggcaagcagaaagcactgccggctcctcgccatgaggatcgtggaccttgatttccccatccattcccgcaatctcgcacgcatgacaaacatgcctttcttcacccgcgacggcgacacattccatccgacggaagtcgccaatggtccctgggatccgacatcgctgcacgggcgcgtcatcatcgggctgctcggcttcgtcatcgaagagcgccattccggtcctgaattcgtgccggcgcggctcaccgtcgacatgtttcggctgccgaccatcgataagccgatcgaagtgacgacgcgcctggtccgcgacggactgcgaatacgcgtggtggaagcggaattcttttccggcggggtcggcatggcgcgcgcctcgtgccagttgctgcgcaagacacaaaatcccgaaggcaatgtctggtcgccgccgaactgggacgcgccgaagccggccgagattcccaagccaaccgatcccaggctcggcatgaacggcaaatgggcaacgcgccccatcatcggccatatgggctcgctcggaccgcgccggctctggatgagcgaggtgcgcgagctcgttgcgggcgtgccgatgaccccgttcgtccatgtcgcgaccggcgccgatttcgccagcccgtttgcgaatgcgggcgacaaggggctcggctacatcaacagcgacgtcacgatctatctgcaccgcctgccggtcactgaatggatcggcttcgaggtcgtgaaccaccacgccaccgatggcgtcgcgatcggcgaatgctggctctatgacgaacagggcccgatcggcacggccacggtcgccgcgctggcgcagcgcaagccgatggcaaatccgtcgaagcgataactcaccgtcgtcattccggggcacgcgtagcgtgagccccggaatgacgagtggagagaccctaacccagatgccgctgcatctcggggcgcgccttcagttcggcgccttgcttggccacgatcttcgcaatccgttccggtgcgaatttcaagtcgacgaacgccggcgcggtgttggcgacctcgtgatagctcgcaatctttccgtcgcgcagcgtcatgatcgccacgccctcgaacatcgcgcgcgcgccgttcgcctccggcagggttgacttgtagctgaacgtgtagcgcgcatagagcgtggtgccgtcggtgacggggtggtgcatgtcccagcggaagtcggtcgccgtgcggtagaaccagtcgtcgatcatcgcggcgatcttctcgcggccttcgaaggcgccgtagaagacgtcgtgatagacgccgtcctcggtgaagagttcggcaaaggcgcggccgttgcgctgctcgaccgcatcgcagaaggcgcgcagcagggcggtggtggtcattagcttgcctcccagtgcttctttttgtgtttttgtgccctctccccttttgggagagggcagctccgctcgtcgaaacacattcgctcgggaggtttatctcccccgatctccgccaccgccgcaaggatgcgcgcgatatcctgcgggcgggagaggcggtgatcgccgtcctggatcatggtcagtacgacgtcgtcagcgggcagacggtgcgtcaatgcgaaagcgtgctgccagggcacgtccggatcccttgcgccttgcaggatgcggacagggcaaccgagatcgatggcgctgccgagcacgaggtggttgcggccctcctcgatcaggttccgcgtgatcggatagggcgagccgtcgtcgtattccgacggccgcagccagacgcccttggtctcgatctccttcttcaccgccggcggaaaagtcttccacatcagttcctcggtgaagtcgggcgcaggcgcgatcagcacgagcccggccagcgacgccttggcaggacgtttcttgatttcgcgcgcgagcagcagcgccatccagccgcccatggaggagccgatcaggacctgcgggccctcgcagaagcgctcgaacaccgcaacgctatcttcgagccagcgtccaatggttccatcgacgaagtcgccgccggattcgccgtggcccgaatagtcgaaccggaccatggcgcggccgtgatccctggcccaggcatccagcgccaaggccttgctaccctgcatgtccgacttgaagccgccgagccagaacagtccgggcccctgtccacgccgactgcgcacggcgatcctgcgtgtgcacgggccctcgcccacatcgatgaagtcgagcacggcatctggaattatatccgtcatggaacgtttactctggctatgcggtttgaactgaaccgggcgtgccgccacgacgcagcccgatgccgacattggccgtttgggacgcttgcggaacagaagcaaggtgtctatgtcgtcagcgtgcccaggcgtggccaaaatgcctcgcatttgagggtttttcgcgcctcgcacgagcgacttgcttgccggcaaacgcatcttccttcaagatagccgcttccttcacaactttggagaaccacccattcgccgtcctaataaagctccgcccgctgccagcaaagacgggccgcgcatcaatgatgatatccgcaatgcgcagatccagctgatcgaccagaccggtgagaacaagggcacggtcgagaccgtcctcgccatccggatggctcaggaagtcggcatggatctggtcgagatttcgccgaatgccagccctcccgtctgcaagatcatggactacgggaagtacaagtattccgctcaaaagaaagccgcggaagcccgcaagcggcagaagaccgtcgagatcaaggagatcaagctccgcccgatgatcgacgaccacgattacgacgtgaagatgcgcgcgatgcagcgattcttcgaagagggcgacaaggtcaagatcacgttgcgctatcgcggccgcgaaatggcgcatcaggagatcggcaccaagctgctggacaagatcaagaccgacgtcgccgagctcgccaaggtcgagcaggacgcgcggtttgaaggccgccaggtcgtcatggtgctcgcgccgcgctgacgccggtgtgttgggactgagagttcaacggcccgtccggatctccggcgggccgttttgttgttcacctctcccgctcccgagagaggtcgcgcccaaggcgtgggggaaggttcttacccctccgggctctcgcttgcgagacaccctctgcccagccatcctcgcaagcggaggagggagcgcaccagcttcctggcgactacgtgcgcgttgcctgccagatgccactgcactggtcgccggaaatgacgcctttccacgatcccgtgccgttcatgccaccgaggcggccgccgccgctggcatgggaggcgccgaccgagacctggacggcgacggcgccggaacgattgaccctgcccgagacgcggccgccgccggcggacgagacgcggctgccggttaccgtgaaggggacgctgtagcccgagctgcaatttccccgcgtggtggcgaaggtgacgttccagatgccgtcatagccgcggacacgggcatcggcggtcgacggcagcgcggccgcggcaagcacggcgagcagcgccaggcgacgcgggcggccaagggtcggcaaagaggagatcgattgcgggaaatgggccattttggtcctgctccgggtgcgactgggggcatgaggtggcgacagccgatagtctccgggcctgttccgcgggttcatcgttgccatttcgccgatcctctgtcataagcccagccttcatcgcccggctgattaagggctgccgtggcggtgtctcgtgcggggtttcgcgctcgttcgcaaaacctaagcacaatcaacgctctaacgagcatttttgacggtccagccgccttcgcgggcggatccctgtggccattaggagagccaaatgcccaagctgaagaccaaatcgggcgctaaaaagcgcttcaaggtgactgccaccggcaaagtgatgcacgcccagcgcggcaagcgtcacggcatgatcaagcggacgaagaagcagatccgtcagctccgcggcacccgcgtgctgttcaagaccgacggcgacaacgtcaagaagtacttcttgccgaacgcctgatcgcgtccacgatcactgccactctgccgcgcatcccgcggcaatccgataaccaaagtcatctctgaaggatttcgtcatgtctcgcgtcaaacgcggtgtgaccgcccacgccaagcacaagaaagtctacaaggccgccaagggtttctacggccgccgcaagaacaccatccgcgccgccaagccggccgtcgagaaggcgatgcaatatgccttccgtgaccgcaagcgcaagaagcggacgttccgcgcgctctggatccagcgcatcaacgcggcagtccgtccgttcggcctgacctacagccgatttatcgacggcatggccaagtccgggatcaccgtggaccgcaaggtgctgtcggatctcgcggttcgcgagcccgccgcgttccaggcgatcgccgagaaggccaaggccgcgttggcggcgtaagccgtcctccactgtgctctgcgcagcattcggcttgtgatggcccgggcagaggtgcatctcgcgccttaaagccccggccgtcatttcttgcgcaaacacacttctccgacgtggatgcccggcgaatctaacgcgaagacgcgcttcgcgcttttgggccgggcgtgacgggctaggatcatcggctcagcatcctggccaaaagggattgccatgaccgatcttgtccaacttcaagcccagatcatcgccgacatcgccgcggccgccgacgaggcggcgttggaagccgtgcgcgtcgcagccctcggcaagaagggttcgatctccgcactgctcgccacgctcggcaagatgtcgccggacgagcgcaagacgcagggcgccgcgatcaaccaggccaaggacgaggtcaccacggcgctcgccgcacgccgcgacgtgctgaagtcggccgcgctcgacgcgcggctcgccgccgagactgtcgacgtcaccctgcccctgcgtgatgcgccggccgaggccggccgtatccatcctctgagccaggtctgggacgagctgaccacgatcttcgcggacatgggattctctgtcgccgaaggcccggatatcgagaccgacgactacaatttcaccaagctgaatttcccggaaggccatccggcgcgcgagatgcacgacacgttcttcttccatccgaaggaggacggctcgcgcatgctgctgcgaacccacacctcgccggtgcaggtgcgcaccatgctcagccagaagccgccgatccgcgtgatctgcccgggccgcacctaccgcatcgattcggacgcgacccacacgccgcaattccaccaggtcgaaggcctcgtcatcgacaagagctcgcatctcggccacctcaaatggatcctgcacgagttctgcaaggcgttcttcgaggtcgaccacatcaacatgcgcttccggccgtcgttcttcccgttcaccgagccgtcgctggaagtcgacatccagtgccgccgcgacaagggcgagatccgcttcggcgagggcgaggactggctcgagattctaggctgcggcatggtgcatccgaacgtgctgcgcgcctgcggcatcgatccggacgagtaccagggctttgcctggggcatgggcatcgaccgcatcgccatgctgaaatacggcatcgccgacctgcgccagctgttcgacagcgacgtccgctggctgggccactatggcttcaggccgctcgaagtgccgacgcttgccggagggctgagctcgtgagggcggtgatccaatgtgagattgcgcagactctctccgttccctccccccttgtgggggagggtcagggaggggggtagccgcggatgccgcacgcagttgtgagcgagcgtcaacgcagcaaggcgaagcagcttcgccgagcgatgtcgcacgatgaaacactgctgtggcgctacctgaaagccaatcgcatggatggtgtcggcatccggcggcaaacgccgatcggaaactacatcgctgactttgtgtgcttctcctctaagctcatcattgagctcgacggagaatcccacgatttcgaggagcgtcagaagaaggatgagcgtcgcgacgccttcttcgccgccgagggttttcaggttctgcgcttcaccaacgatcaggtgatgacgaacctcgagggagttgttgaggcaatccgccaggcagcttccgccggcgcccgcggctcacccccctcccttaccctcccccacaaggggggagagtacactgacatcgaccaagatcaattcttagacacagacaagagccaaggcgcacagccatgaaattcaccctctcctggctgaaagaccatctcgacaccgacgagcccctggaaaagctcgccgacaagctcaccatgatcggtctcgaggtggagaacatcgaggacaaggcgaaggcactgaagcctttcaccattgcgagagtgatctcggccgaacagcatccgaatgcggatcgcctgcggatctgcatggtcgacaccggcgacggcggcgcgccggtgcaggtggtgtgcggtgcgccgaatgcgcgcgcaggcctcgtcagcgtgttctcgccgcccggcacctacattcccggcaaggatatcacgctcggtgtcggcaccatccgcggcgtcgagagccgcggcatgctgtgctcggcggccgaattgcagatctccaatgaccatgacggcatcatggaattgccggcggatgcaccgatcggggccggctatgccgaatgggcggcgctcggcgatcccgtggtcgagatcaacctgacgccgaaccggcaggactgcaccggcgtgcacggcatcgcgcgcgacctcgccgccgccgacatgggcaagttcaaggaccccacgatcaagccgatcaagggcgaattcccctgcccggtgaaggtgacggtcgaggatgccaccttgtgtcccggcttcgcgctgcgcctcgtgcgcggcgtcaagaacggaccgtcgccggaatggctgcagaagcggctgaccgcgatcgggctgcgcccgatcaacgcgctggtcgacatcaccaacttcatgaccttcgaccgcgcgcggccgctgcatgtgttcgacgccaagaaggtgaagggcaatctcgtcgtgcgccgggcccgcgagggcgagagcctgctcgcgcttgacggccgcacctacaatctcgatccctcgatctgcgtgattgccgacgagcatggcgtcgagtcgctcgccggcatcatgggcggcgaggcctcgggctgcgacgaagacaccaccgacgtgctgatcgaatcggcgctgtggaacgagatcaacatcgcgcagaccggccgcaagctcggcatcaattccgacgcgcgctaccgtttcgagcggggcgtcgatccggccttcatggtgccggggatcgagctcgcgaccaagctggtgatggagatgtgcggcggcgcgccgtccgagaccgtcgtggtcggcaaggcctttggcgacgatcgcctgatcgaattcccgatcaccgaggtcaagcgcctgtcgggcatcgaggtgccgcaggccgagatgaagcgcatcctgacccatctcggtttcatgatggcgggccccggcccggtggtgaaggtcgcggttccgtcctggcgttccgacgtgcacggcaaggccgacatcgtcgaggagatcgtccgcatcttcggcgtcgacaaggtgccgatgacgccgttcgagcgcggcgatgacgcacgcaagccggtgctgaccccgctccagcttcgcacccgccgcgcgcggcgcgcgctcgcgagccgcggcatggtcgaggcggtgacgtggtcgttcatcgccaagcccgccgccgagctgttcggcggcggccagcgcgcgctcgaagtggccaacccgatcgcctcggatctctccgacatgcgtccgaccctgctcgccggcctgatcgcggcggcacaggccaatgccgatcgcggttttggcgatgtcgccctgttcgaggtcggccagctgttcaagggcgatcgcccgcaggaccagttcatggcggcgagcggcgtccgccgcggccttgcgtcgtccgaaggtctgggacggcattggtcgggttcggcgcaggctgacgtgttcgatgccaaggccgacgcgctggcggtgctggccgccagcggtgcgccgacgcaggcgcttcagatcgtggccggcggtcctggctggctgcacccgggccgctccggcacgatccagatcggaccgcagaacgtgctgggctatttcggcgagatgcatccgcgcgcgctggagacgctgggtgccgacgggccgctgatggtgttcgaggtgatcctcgaccgcattccagaggcgaagaagaagccgacccgcgccaagcccttgatcgagctgtcggcattccagcctgtatcacgcgactttgccttcatcgtcgaccgcagcgtgaaggcgggcgacatcgtgcgcgcggcgcagggcatcgacaagaagctgatcaccggcgtgaatgtcttcgacgtctacgagggcaagggcatcgatgagggcaagaagtcgattgcgatcgcggtcacgctgcagccgcgtgagaaaaccctcaccgaccaggagatcgaggccgtcggcgccaagatcgtggccgaggtcacgaagaagacgggcggcactctgagagcatgacaccggaaggcgtgaagcggtcttcggacagcatcatgctccagaatgacagagcatgagtctcgccgactttctcccgacggacgtcagcttcgccatcgcgatggcactttgcgccgtcgccttcgtttcgggcaccgcgcgcggcttctccggcttcggctcggcgctgatcttcatgccgctggcgagcagcatcgccgccccgcggctcgttgccgccctgctgctcgtgatcgattttgtcgcggcggcgccgctgctgcctgacgcctggcgcaaggcggaccgcaaggccacggcggtgatcgtgctcggcgcgctgattggcgtacccgtcggcacctatttcctcagcgtgctcgagcccgtcaccacgcgctggatcatctcctgtttcgtcgcagcgctcttgctcctgctgctgtcgggctggcgctatcgcggcaaggaccacgcctggctctcggtcggcatcggcggcctctccggcttctgcagcgggctcgcacagaccggcggcccgccgatcgtcggctattggctcggccgccccatcccaccgatcgtcgcgcgcgccaacatcgtgctgttcttcggcgcgtcggatttcttttccatggtcagctatgcggccaccggtctgatcagccgtgagtctctggtgctctccctgatcgtcggcccgatctatgcgcttggcgtcgccttcggcgcctcgctgttcggccgcgccagcgagaaagtgtttcgcggcatctgctacgccctgatcgccatggctgtgattgccgggctgccggtgctggacgggatcttgcggtaaaccaccgcctcaccgtcgaggcgctctgcgcttcttcgtcgactgggtcggcacatcggcgggctcgctcttcagcgcgccgatcttgcgcaaggctgcctcagcggcgcgctcgccgctttcccaggcgccatccaccgtgccccacaaggtctcgtgggtggcttcgccggcgagaaacacattgccaacaggctcgctcaggatctttcgcgagagctggccgccgggcgatgctgccgacatcgcgcccatgacatagggcgaggcattccagcgcgtggcgctggtcttctgcaccgcggccgcggcctcgctgccgaacaacttcgtgatccactccttcgagaaggcaaccatcgcgctctcgccctgctgggagagatcgcggccgaacgagccgccgacatcgatcgagcacagcgacgagccgccgatattcgcgaacagcagcgccgtgcgcgtcgaattgctttgctcgacgaggatatcgtcgcgcgagaggccgagcggattgcccggcaattgcagcacgatgcgatcgtaactgccgaggcccagcttggatgccgcgtccagcgtgcgcttcgggatgtcgggtgcgaacctgatcgcacccgatgtcagcacgttggtggagactgtgacgatggcggcgcgcgcgccgatcttgccggcttgtgtctccacgctgacgtcgcggctgctccacgcgatgcggctcgccggcgttgccagcgccaccggcacctgctcgccaagtttcgtgatcagcgtgccgagaccctggcggcaggcgatcgcggcgttgcggtcctgcgcgcggcccttgtcgatcgcggacagttccttgaggtccttgccggcgaagctcgcgcccagcatgaactcggccgcgccggcccagtcgccgagatccttcggcagcaccgatgcgcaggacgtatcgagcttggcgcgcgcggcctcatcgatggcgcggttggcgcgcaccagcgccgccaggaactgctcggtctcgcccgcgcgcgcgttgcggcggccgatacgcatcttctggcccgatggcgccggcagcacgtcgagcccaacgctgcgagccagccggatcatcggattggtatcggggttgtacatccagcgcgcaccgcgctcgaacggcgtgtcgaacgtcgtgctgtcggtgacgcagcggccgccgacttgggatgccgcttccaacaccacgaccttgcggcccgtcgccatgatacgccgcgctgcggcaattcccgcagcccccgccccgatcacgacaatgtcggcctcccgcggcaggggcgctgcggtggcgcgcaggaccggcagcgcggcaaaacccgctgacgcgacaaggaaaccgcggcgcgtgattgtcatgtcatggtttccggagacttgcggcgaacgggaacagccagcgaaccttgccgcatctgatgttgcacggcaaccatcatggtgaatcaatcgtgcttgacctcacggagtgatgaaccgaattgcaacacgtttcgaccatgatagagatgggaaaaagacggccggaaaaggccgtggggggagtttgacatggggacggtcctggattcggtcggcaagctgattgccacgtacctctcgaaggaggtgccgggctatgagccgttcacgccgagcgaccccgagcatctgcgcggcgtcatcgagcccggcgacgttctgctggtcgagggcaacaaccgcatctccggcatcatcaagtatctgacgcagtcgacctggtcgcatgccgcgctctatgtcggccctgtcgcgggcgcggaggagccggacggcgagccgcatgtgctgatcgaggccaatatcggcgaaggcgtcacctccgcgccgctgtcgaaatacttcccctaccacacccgcgtctgccgcccggtcggcctgtcctatgaagaccgcaccacggtctgccgctatgcgatcaaccgcatcggcttcggctacgacaccaagaacatcgtcgacctgatgcgctacctgttcccgctgccggtaccgcaacgctggcggcggcgcatgatcgccatcggctcgggcgacccgaccaaaatcatctgctcggcgctgatcgcgcaggccttcgacgcggtgcgctatccgatcctgccgaagatcaccaaggccggcagccgctccgcccgccgcgagatcctgcacatccgcgattcgtcgctgtacatgccccgcgacttcgacatctcgccctatttcgaagtcgtcaaacccaccatcgtgcacgggttcgactacaccgccctgcactgggccgacaagcagaagccgctcgaggaggtagcgggctcgttcagtgtgtttccagaaacgttcgtggcgccgccgctcgttcctgaagcgagtgacgaagaggcgtcggctcaaattcccgctgaagaagtgagcgcgcagcttgcggagacgggcaccacgttttccgcgcatttcgtgcaactgagcgaacacgcgacctaccgcgcacggcgccgcggagacgtatgcgaggtcgcggcataacactgctgttgtccctgcgaacgcaggggcgacaggcgtgagtggggcgcgagccatccacaacactcgtcattgcgagcgcagagaagcaatccaggctgtcaccacggtggcagtccggcttgcttcgtcgcaagagctcctcgcaatgacggtggagagatcgtgcgctaccgctccgcccgtccgatcaccgccatcaactccgcgatcttctcgcgctggtcggccttgtcgccgctcgcgatggcgtgctcgacgcaatgggcgacgtgatccttcaggatttcctcctcgacccgacgcagcgcggcgcgcaccgccgagatctgcgtgacgatgtcgatgcaatagcggtcttcctctaccattttcgacaggccacgaacctggccctcgatccggccgagacgttttccgacagatgccttgatgtccttgcgcatgcggtttatatacccctaccgggtatgggttgcaagaccgaaactgagatcggagcaggcgatgacaagcagcgagcatgagcatcaacatcacgtggacggacattccggctgcggttgttccgccaaggccgcaccagccacgccgaagccagcgtcctcgtgttgtggcgggcacggggaccatgccggccatgcccatcatcacgcgcatgtctccggtgatgacgcggcgaaggtcctcgatcccgtttgcggcatgacggtagatcctgcgacatccaagcaccggttcgagcatcacggtgagaccttccatttctgctcggccggatgccgcaccaagtttgccgccgatcccgccaaataccttgcgaaggagagggcgcccgagccggagatgcccgcgggcacgatctatacctgcccgatgcatcccgagatccgccaggtcggccctggcagctgcccgatctgcggcatggcactggagccggaagtcgcaagcctggagaccggccccaatccggaactcgccgacatgacgcggcggttctggatcggcggcctgctgtcgctgccgccggtggtgctggagatgggcggccatctggcgggcccccacagctggatcgatccgacgctgtcgaactggatccagctcgtgttcgcaacgccggtggtcctgtgggccggctggccgttcttcgtccgcggctggcagtcgctgctgacgcgcaacctcaacatgttcacgctgatcgcgatgggcacgggtgtcgcttacgtctacagcctcataggcaccctcgcgccgcaaatcttccccgccacgttccgcggccatgaaggcgcggtcgcggtctatttcgaggccgctgctgtcatcaccgtgctggtgctgctgggccaggtgctcgagctgcgcgcccgcgatgcgacgtcgggtgcgatcaaggcgctgctccagcttgcgccgaagaccgcccggcgtgtggacgcagatggcagcgagcatgaggtcgagatcgacacgctccatgccggtgagtccttgcgcgttcgtcccggagagaaggtgccggtcgatggcaccatcctggagggacgctcttcgctcgatgaatccctggtcacgggcgagtccatgcctgtcaccaaggagaccggcgccagggtcatcgccggcacgctgaatcaatcgggcagcttcatcatgcgtgccgacaaggtcggacgcgagacgctgctgtcgcagatcgtgcagatggttgcggacgcgcagcgctcgcgtgcgccgatccagcggttggccgaccaggtttccggctggttcgtgccgacggtcatcgtcgtcgcgctcgctgctttcggcgcctgggcctggttcggaccggagccgcggctggctttcggcctcgtcgccgcggtcagcgtgctgatcatcgcctgcccgtgcgcgctcggccttgccactcccatgtcgatcatggtcggcgtcggccgaggcgcgcaaggcggcgtgctgatcaagaatgccgaggcgctggagaggatggagaagatcgatacgctcgtggtcgacaagaccggcacgctgaccgagggcaagcccaaggtggtcgcgaccgtgccggcggccggcttcgcggaagacgacattcttcggctcgccgccagcgtcgagcgcgccagcgagcatcccctggcggacgccatcgtgcgcgcggcgaaggagaagcagatcagcattggccaagtcgagcaattcgattcgccgacgggcaaaggcgcgaccggaaaggtcgacggcaagaccatcgtgctcggcaatgcaaaatacctgacctcgatcggcatcgataccaaatcgctcgacgccgaggccgaacggctgcgtggtgacggcgcgaccgtgatcaatatggctgtggatggccggcttgccggcctgttcgcgatcgccgatccggtcaaggcctcgactccggaggcgctgaaggcgctcgcggccgaaggcatcaaggtcatcatgctgactggcgacaaccgcaccacggcacaagccgtggcccgccggctcggcattgccgaggtcgaagccgaggtgctgccggatcagaagagcgctgtggtcacgaagctgcagaaggccgggcgcagcgtcgcgatggccggcgacggcgtcaacgacgcaccggcgctggccgccgccgaggtcggcatcgccatgggcaccggcaccgacgtggcgatggagagcgccggcgtcaccctgctcaagggtgacctcaccggcatcgtgcgcgcgcgaaaactgtcgcaggcgacgatgagcaacatccgccagaacctgttcttcgccttcatctacaacgccgcaggcattccgatcgcagccggcgtgctctatcccgcctttggcctgctgctctccccgatcatcgccgccgcggcgatggcgttgtcctcggtgagcgtcgtcggcaatgcgctgcggcttcgtacgacgcggctgtagggacaccgtagcccggacggagcgaagcgcatccgggtgcatgcccacacatcggcccgtcccggattgcgctccgctccatccgggnnnnnnnnnngttcaccggaccggcgagacgtatgaggagcatctgatgcagcgaattacgatcaccatcgaggacgatctgttggcggagatcgacgccgcggcggaggcgcgcggctatcagaatcgctccgagatcatccgcgatctcgcccgcgccgggcttcagcaatccagcgaagacacggcacagaccggcccctgcgtcgccggcctcgtctatgtctacgaccatgccgcccgcgatctctcaaaacgcctggtgcaggaattccatggccatcacgacctcgcgctggcgacgctgcatgtccatctcgacgacaacaattgcatggagatgacggcgctgaaggggtcggcggacgaggtcaggcatttcgccgaccatatcatcgccgagcgcggcgtgcgctacggccgggtggtgatgattccgaccggggaagggaagccgacgaaggggcggaaacacgggcacggccatcggcatgagtaggctggattgaccctcccctggagggtgagggtcagcaggagatggcgccacctttgccgcggcccactcctcccttgccgagacgacatcgggtgtctacctctcgcgaagtgttgacctcagagggtgcccccatgctggatgccgccgtcaaggcgctgtcgcaaatgatctctccgccgatgcgctcgatcctgtggcgatcgatcgggctggcgctggtgttgatcaccgtgctggcgattggcttgcaacggctcctcagctggtttgcgacccatggcgcggtctggctggagggcctgcttggggcgggctggcattcttcgatcgaaatcctctcgtggatcgtctcgatcgcggcgggcttcggcgtcgtgttcggcggcgtcttcctgatgcccgcgatcacctcgctggtagcgagcctgttcgtcgacgatgtcgccgacatcgtcgagcgtgagcattaccccgctgagcggccgggcgtggccctgccgttcagccaggcgatcctcgaaggcatcaaaaccgcctttttgacgatcctgatctatctcgtagcgctgcctctggtgctgttcgcgggcgcgggttttctgatcttcttcctcgccgccgcctggctgctcggccgcgaatatttcgaactggcggccatgcgcttccgtccgccggaggaggccaaggcgatgcggcgcgacaacgccgcgacgatcttcacggccggcctgttcatcgccgccttcgtctcgatcccgatcgtcaatctggcgacgccgatcttcgggatggccttgatggtccacatgcacaagcgcctgtcaggcccgcggcccgagctgatcgagccggcgcggtaggtgcggtgacggcgcccggctcgacgctgtctcacaccgtcttctccggccaccgacagagatcgttgatcaggcatacctcgcagcgcggcttgcgggcgaggcaagtatagcggccgtgcaggatcaaccaatgatgggcatgcagcatgaactcggccgggatcaccttttcgagtccgagctcgacctcgagcggcgtcctgcccggcgcaagtccggtccgattcccgacgcggaagacgtgcgtgtcgaccgccatggtgtgctccccaaaagccatgttgagcacgacgttggccgtcttgcgtcctgcaccaggcagcgactcgatctccgcgcgcgtgcgcggcacttggccaccgaactcgctgagcagctttgccgacagcgcaatcacgttcttggccttggtgcggtagaggccgatcgtcttgatatactcgcgcagccgctcctcgccgagatcgaccatcttctgcggggtgtcggcgacttcgaacaaggcgcgcgtggccttgttgacgccggcatcggtcgcttgagccgacagcaccacggcgaccaggagcgtgaacggattaacgtgttcgagctcgcccttcggctccggattggccttgcggaaacggctgaaggcctcatggacctcagccggggtccaacgccttatcgccttcagcgtcttcctggcgggggcgttgggcttcgcgaccaccgcttttgcctttttcttcggcacggccgctttgcgcgtgaccggcttgcgggtgattttcgccatgatcgggatatactgatggatgatgagcacaggcaacgaaattgagcgcagcgcttctggggatccgcgtgacgtgcaaatattctcggcgctgctgacgccgcaccgctcgctgaaccgcaccggctttctcgccgtgatgctgttcctgagcgtcgtcagtttcgtcaccggcctcgcttttttgatgatgggtgcgtggccggtgttcggcttcttcggccttgatgttctcgtgatctggtgggccttcaaggccaatttccgcgccgcgcgggcccgcgaggagatcgtggtgaccccttccgaattgcgggttcgccgtgtcagccaccgcggccaagtcgccgaatggacgttcaatccgctctgggtccggctcgaccaggaggtcgacgaggaatacggcatcgagcatctctatctggtttcgcgcggtcaccagatccagatcgcccgttttcttggtcctgaggaaaaagcaagcttttacaaaggcttggttgaggctctgaatgccgcgaggcgtggaccgacctataatccgatcacctgaatcccggtcggaaatcgggtggctccaaacccttcgctctcctacattcccggtcatgatgacccttgcgatacatgaccagcgcttggccaggccgggcacacagaacgccgcgttgcgcgattacgattcggtgcggcgggcgatcgccttcatctcggcgaactggcgcgcccagccgaccatcgaggcgatggcggatgcggccggggtcacgccggacgagctgcaccatctgttccgccgctgggcttcgatcacgccgaaggcgttcatgcaagcgctcacgctcgatcatgccaagaacctgctcagggactccgccagcattcttgacgcggcgctcgattccgggctgtccgggccgggccggctgcacgatctcttcgtcacccacgaagcgatgtcgccgggcgaatggaagaacggcggtgccggtttgacgctacgctacggcttccatccatcgccgttcggcaccgcgatcgtgatcgccacggatcgcgggttgtccggacttgccttcgccgatcacggcgaggagaagatcgcgctcgccgacatgacgcggcggtggcccaacgccacctatgtggaagatcacgacggcacggcgcagctcgcaacgcgcatcttcgacccaaagctgtggcggccggatcagccgctgcgcgttgtcctgatcggcaccgatttcgaggtgcgggtgtgggagacgcttctgaaaattccgatgggacgcgccgtgtcctattccgacatcgcctgcaacatcaagagcccgaaggcctcacgcgcggtcggcgccgcggtcggcaagaacccggtctcgttcgtcgtcccctgtcatcgcgcacttggcaagagcggcacgctcaccggctaccattggggcatcacccgcaagcaggcgatgctgggctgggaagccggccagctggggatgcagtgaaggaccaccgtcattccggggcagtgcgtcaacactgaacccggaatgacgcaaccaggattaccccgccagatccagcttcgaggcgaccgtcgaatccgcattgagccgatagatgatcggcacgccggtggcgagctcgcgcttcaggatgccttcgggcgaaagcttctccagcaccatgatcagcgcgcgcagggaattgccgtgggcggcgacgagcgtgcgcttgccattgagcacgccgggcaggatctcctgcacgtagtacggcagcgcgcgcgcgagcgtatccttcaggctttcgccgccgggcggcggcacgtcgtaggagcggcgccagatcagcacctgctcctcgccccattttttgcgcgcatcgtccttgttcaggccggagagatcgccgtaatcgcgttcgttgagcgcgaggttcttggtgatcggcagtcccttctgcccgagctcgtcgaggatgagatcaagcgtgtgctgcgcgcgcgtcaggaccgaggtgaaggcgacgtcgaacacgagaccctgcgccttcagcttgcggccggcttccttggcttcgttcacgccgagctcggtgaggtcggggtccttccaacccgtgaacaggttcttcagattccattcgctctggccgtggcgcacgagcacgagaagacgttcgctcatcaactgctttccgtttggtttcatgttctgagcatgaccttgtcggaaaccgcgtcacgcttttccgggtcatgctgggtgttcagatgtcggacaggccgagcacgtcggccatggaatagtgccccggctgcttgccgtgcgcccacagcgccgccttcagcgcgccatgggcgaacagcatgcgatcctcggcctgatgcgacagcgtcaggcgctcgaacggaccgaggaaagtgacgctgtgatcgccagccacggtgccgccgcgcaaggaggcgaaaccgatattgcccggcctgcgggcaccggtgatgccgtcacgcccacgctcggaatggtcgtcgagcgtgacgccgcggccgctggctgcggcctggccgagcatcagcgccgtgcccgagggcgcgtcgaccttcatgcggtgatgtgtttcgacgatctcgatgtcgaagttctgatcgagcgccttggcgacgcgcttgaccaccgcagcgagcaggttgacaccgaggctcatattgccggattgcaccaccaccgcgcggttcgtgacgctcttgatcaccgcattgtcggagccggacagcccggtcgtgccgatgacatgcacgatgccgcgctcggccgcgatcgcgacattggcgatcgtcgccgccggtatggtgaagtcgaggataccgtcggcctccctggacatggcccagagatcggcggacagcttgatgccgttggccggcaggcctgcgagcacgccggcatccttgccgagcagctccgagcccggcgcttccagcgcaccggccagcaccgcgcccttgctctcggcaatcgcccgcaccagcgcccggcccatccggccgccggccccagcaacaatcaagcgcatgtcggacatggtgtgatcctcttcggagccgttgtagcgggggcaggcagttccggcaaccgagggggatcaaacgcaaatggtcattccggggcgatgcgcagcatcgaacccgaaatctggagagtccccggtgcgcgatgcgcacctgtagtctggtccttcggaccatcccggaatgacaggatacctcagccgtcctgcggctgcgggccgtcatagccctcgatgatgatgaggtcggcgaccgagtgcggctggcgcaccttgatgttggcctggtattccggcgagttgtagcaggccagcgcggtctcgtagtccgggaattcgatcacgacgttacgggtgcggctggcgccttcgacggtggtgaacttgccggcgcggacaacgaaacggccgccccatttcttgaagatcggaccgttggcgaccgcgtagggcttgtagccttcgtcattgctcacgtcgacacgcccgatccagtagccctttgccatcgttgttctccctgttgtgttggcggttagccgagcgcctcggcgatctcttcttggatagcttcagcggccgcctttgggtccgccgcttccaccaccgggcgcccgacgacgagataatccgcccccgcagtgatcgcacggcccggtgtcatgatgcgcttctggtcgccgctggctgcgccggccggacgaatgccgggggtgacgaggctcatctggtgaccgacgatcttgcgcaggctcccgacctcctctggcgaggacaccaggccgtcgacgccgagcacctgagcctgctgcgcgcgtgcctcgaccagctccgacacgctgagccgatagccggccgcatgcaaatcgtcgtcgttgtaggacgtcagcaccgtgacggcgaggatcttcagggcggcgccgccgcggccttcgacggcgcccttcatggtctgcggataggcgtgcacggtgacgaaggtggcgcccagcttggccacgctctccacgccgcgcgtcaccgtattgccgatgtcgtgcatcttgagatcggcaaacaccttcttgcccctgttggcgagcttgccgatcagcggcaggccgccggcataagcgagctgatagccgatcttgtagaacgagacgctgtcgccgagcttcgcgatcatcgcctccgcggcatcaacgctcggcagatcgagcgcaacgatcaggcggtccttggggacgatctcggctggcctcatgtcacctcacatcatgcgttgggaaacgtcgatcaattgtcgcacaagctccttcagcgcggcgatatcgttctcgttcttcagcctgtccatatcgtcataggcctggtcggcaaaggcgagcgtgagctggctggcaatcacgttggcttggcaggaggagaggatcagccgcaaggcctggagcgcgcgggctgctccaagccggctctgtgacgcgccggcgagcgcgaagacgcggttgcggaacacctcgccgcgcgcctcgtgcagctcgtgcacgcggctgacccagtcgatcgcattcttgagtagcggcggcaccgaggcgttgtattccggcgtgacgaacagcaccccatgatgggcgccgatcatgcgcttgagattgatggcgtgcttgggcacgccggatttggcttgaagatcgccgtcatagatcggcagcggaaaatcggcgagcgaaatgcgggtgacgtcgacgccggcctgagcgaattcataggcggcaaccgctgcaagcttcgcattgtgcgagccggtgcgcagcgagccgggaatgatcaggatcttgggagccgacatccaatcccacgcgttcggcgaaacgagcacgccgcgcaaggaaggccgccggcggaattagtccttgcgatacacccagacgcgggcgggcggaaggttcatccagatccgttccgacgcctctgtggacacgccgggcagcgatttcgggatgggcggcaccaccgcataagtaaattggatgaacggcgcaccgggcgcaagcgccgcgaaggcgtcgcggatgagccgcaaccgcgtcagcatcggctttgtgaccagcggcaggcccgaaacgaccgcgccagccggcgcactcaagacgttccagagcgtgtcgcgcaggcggtaggcgtcgccctgcacaaccttggcctgcgggtagcggtcgcgcagcagcgcgcaaaagccgggattgtattcgacgaggacgagacgcttctggtccacgccgcgctcgatcagcgcggaggtgatggcgccggtaccgggtccgagctcgacgaccggtgcgtcggagtcgacatcgacgtagtgagccatggtccgcgccagcagcttgcccgacggcatcactgcgcccatgtgcagcggcttttcgatccacgacctgagaaagcgcacctcgtcatcaagacgaggcttcttcaacgcacgcgcggacgatggcaatggcatgtcgggaccggacgggaccgcgggaccgcggcgtgtcagaaaatggtcataaagacgtataggccgaaggcggcacggtcaagacgagtcagttcgcccgattaccgaagaaatccttgaccttggcgaagaagccctcggattccggctgcgtattgccggaggagagtttctcgaattcggccagcaattcctgctgcttcttggtgaggttctgcggggtctcgaccacgacctgaacgtacatgtcgcccatctggcgcgagcgcagcaccggcatgccctttgatgcgatgcggaatcggcgacccgattgggttcctggcggcaccttgaccttggtcttgctcttctcgatcgtcggcacctcgaattcgccgccgagagcggcggtcaccatcgagatcggcacacgacaatgcagatcggcgccgtcgcgctggaagaactggtgctgggccagcgagaggaagatgtagagatcgccgggcggtccgccgcggacgccggcctcgccctcgccggcgagcctgatccgcgtgccgtcctcgacgccctggggaatgttgaccgacagcgtacgctcgcgcgtgacgcgcccctggcccgcgcaggacgggcaggcatcctcgatcatctggccgcgcccctggcaaccgggacacgtacgctccagcgtgaagaagccctgcgactgccgcacgcggcccgcgccgccgcaggtcgagcaagtcttcggcttggtgccggccttggcaccggtgcctgaacaagcctcgcaggtgaccgagactggaatctcgatctgcgcagtcttgccgccaaaggcttcctcgagcgtgatttccatgttgtagcgcaggtcggccccgcgctcgcggccgccgcggccgcgctgtccggccatgccgaacaggtcttcgaaaatgtcggagaaagaggaggcgaagcccgcgccgaaacctgcagcgccgccaaaaccgccgccctgctcgaacgcggcatggccgtagcggtcataggcggcgcgcttgtccttgtccttcaggacctcgtaggcctcgttgatttccttgaacttgacctcgctggtctcatcccccggattgcggtcgggatggaatttcatcgccagcttgcggaacgacgatttcagcttgccttcatcggcatcgcgttcgacttccagggtctcgtaatagcagcgcttggtggacgtggacatgttgagctcggtctatccaatcgcgatttcaagtcggagcgaaacgacgtcgccacgcggctatatgggcagcctcctgccttgcggcagaggacagcatggcggcgtccagcattacgatggggaattgatcggtcgcaacgggcactcgtcccgagcccgacacggtggcctcccccgcgagggaggaggccgacagcgcgtgtggggtccaagccgcccgcatgatcaccctctcggggcttaagcggacttcttgttgttcttgtcgtcgtcgacttcggtgaattccgcgtcgacgacgtcgtcctgggccgcatccttcttggcgtcggcttcggcctgctgcttgtacatggcctcgccgagcttcatcgaagcctgggccagcgtctgggtcttggccttgatcgcctcggcgtcgtcgcccttcagcgcttccttgagatcgctgacggcgtcctcgatggcgcggcgctcgctctcggcgaccttcgaaccgtgctcggcaagcgccttctcggtcgaatgcaccaggccatcggcctcgttcttggcggtcacggcctcgcggcgcttcttgtccgcctcggcattggcctcggcgtccttgaccatcttctcgatgtcggcttccgacagaccaccggaggcctggatgcggatctgctgctccttgcccgtggccttgtccttggccgagacgttgacgatgccgttggcgtcgatgtcgaaggtcacctcgatctgcggcatgccgcgcggggccggcggaatgcccatcagatcgaactggccgagcatcttgttgtcggccgccatctcacgctcgccctggaagacgcggatggtgacggcattctgattgtcttcagccgtcgagaacacctggctcttcttggtcgggatcgtggtgttgcggtcgatgatgcgggtgaacacgccgcccagcgtctcgatgcccagcgacagcggggtcacgtcgagcagcagaacgtccttgacgtcgccctggagcacgccggcctggatcgcagcgccgatcgccacgacctcgtccgggttgacacccttgtgcggctccttgccgaacagctgcttcacgacctcctggaccttcggcatgcgcgacatgccgccgaccagaacgacctcgccgatctcaccggcggtgacgccggcatccttcagcgctttgcggcagggctcgacggtcttctggatgaggtcatcgaccagcgcctcgaacttggcgcgggtgagcttcatcgtcagatgcttcgggccggtctggtccgcggtgatgaagggcaggttgatctcggtctgcgtcgtcgaggacagctcgatcttggccttttcagcggcttccttcagacgctgcaaggcgagcttgtcgttgcgcaggttgatgccctgctccttctggaattcatcggcgagatagcccacgaggcgcatgtcgaaatcttcgccgccgaggaaggtgtcgccgttggtcgacttcacctcgaacacgccgtcgccgatctcgaggatggagatatcgaaggtgccgccgccgaggtcatagacggcgatcgtgccggccttggtcttgtccaggccataggcgagcgcagccgcggtcggctcgttgatgatgcgcagcacttcgaggcccgcgatcttgccggcgtctttcgtcgcctggcgctgggcgtcgttgaagtaggcgggaacggtgatgacggcctggtcgaccttctggccgagatgggcctccgcggtctccttcatcttctgcaggatgaacgccgagacctgcgagggcgagtaggtctggccgtcggcctcgacccaggcatcgccgttggaagccttcacgatcttgtacgggacgagcttcttgtccttctcgaccatcgggtcgtcgtagcggcggccgatgaggcgcttcacggcgaagaaggtgcgctcgggattggtgacggcctggcgcttggccggctggccgacgaggcgctcaccgtcatcggtgacggcgacgatcgacggcgtcgtgcgcatgccttcggaattctcgatgactttggcgttcttgccatccatcacggcgacgcacgaattcgtggtgccgaggtcgatcccaatgacctttcccatggtcctgatatccttctttttgcggcaggttggctgggcccagaaggcacccgaaccgaaaccccctaagatcaaacatccgcgatattgcgatgattgaggctcatataggaggggggtaggggcccgcaaggaccgaacctacgtttgtgccgcgaaaacatcgggttttggaagatgatatccgggctccaccgcccttgcgggtgaggaattattaacaggttcgcccttcggcaagcccccgctaccgcaaccggcccgccctgtcgcggcgaggccaaacccgctaaaaggcggaccggccggagaaccggtgcagctgcttcgcgcgacaaagcggcccggtagccgaccatcgaacggcctcaatgtgaaccaatcagagtgcccatgaagctgatccgccccctcgccgcgctcgccctcctcgccgcaacagcgtttccggccttcgccgccgacgccgtcttcccgcccggcttgcgtctcggcatggtgccgttgatcgggctcagcacggccaagagctttccgggcttcgagagcgaggacggcagcgtcaaagtgctgatcaccgagttgccgccggcggcctatggcgaggtcgcgagcgccttcaactccggtcccgccggcgtcaatggcgtcaagcaggacaagatcgaaacgcccgcgggcctggcctatttcaccaccgagagtggtaaggccggcgatactccggtgaagcgctattcgatgatcgtgccgggcgccgggttctccggttatgtcgcggtgcaaattccggagaatgcgaccaagatctacacggatgaagcggtgcggcagatgttcgcgagcaccgtcacccgcaggcaggtctcggcggaagagcagatcgcgctgatgccgttcaagatcaccgatctggccgacttcaaggatatccggacgctcgcgccgggctcgagcatcatcctggccgacggcgatgagagcatcggttacgagtcgaagccgttcatgattctaggcgtgatcggcgcgaccccgcagcagcccgacgaccgcgcccgcttcgcgcaggaggcggcactgcagattcccggcgtgcgcgaatcgcgcatcaccatgtccgagccgatccgcatcaacggccagcagggcttcgagacccggatcgacggcgtcagcggcaaggacaagatccccgtgaccgtggtgcagtggatccgcttctcgagcggcggcgcctcgctgcgcatcatcgccagcgccccgcgcgagcagtggctgcccgccttcacccgattccgcgccgtgcgcgacgggattcagccgaagggctaggccaaggcggcatcgaatcctcggtgtcgcctaaatagcgcgagccgccgagcaaccccgcggctcctcaccatgaggatccgagactcagttcggcgcgccgctcgactcattgttgttggccgcgggcgccgccttcgcgccgcccttggcaacgccgaccagcgccgggcgcagcacgcgctcgccgatcgtgtagccggcctgcatgatctgcacgacggtgcccgacggcaccgaggcatcaggcacttcgaacatcgcctgatggaaattcggatcgaacttctgcccctggggatcgagtttcttgacaccgtgcttctcgagcgcgctgtgcagcgagcgctcggtgagctcgacgccttcgatcagccccttcaggccggcatcggcattggcgcgcgcctccgccgggacggcatcgagcgcgcgctggagattgtcggcgatgtcgagcacgtcgcgggcaaagccggtgatgccgtagaggcgggcgtcggcgacttccttgctggtgcgcttgcgcagattttccatctcggccagcgtccgcagcatgcggtcgcgcgcttcagccgcttccttctgcaacgtctcgaccgaaccgggctcgggatcgtccggcatgatgtagggtttcgacaccacgggctcgccggtcgctgcagtcgtgtcttgaggttgccggtcttgctcggtcatcggctctaatctcgaactgtttcagggatgttggcccggatatcgtgcctaaactcgcgaaaatcaagcgcccgtgatcggcggaaacgccggtcagccccccagaaggcggctgacgatccgtgcggcgtagtccacggtcgggatcacgcgggcataattcagtcgcgtcgggccaatcacgccgaggacgccgacgatgtggccggcggcatcccgatagggcgagatgatggtggacgatcccgacagcgagaacagcttgttctcgctgccgatgaagatgcgcacaccctcagcggtttcggcccggccgagcaggtcgatgacgccgcgcttggtctcgagatcgtcgaacagcaggcgcacccgctccaggtcctccagcgcgtgcagatcttcgagcagattggcatggccgcggacgatgagctggcgatcctcgttctcgccgccggaccagctggcgatgccggccgagatcactttttgcgtcagctgatccagctcggcgcgcgcagcgccgagagcagtctcgagctcgagccgcgcctcggccagcgtgcggccgcggatgcgggaattgaggaaattgccggcctcggcgagtgccgaggagggaactccgggcnnnnnnnnnnacgcggttttcgacctggccgtcctcgccgacgaggatcaccagcgccttctccggttccaggcggacgaactcgatatgcttcagccgcgcattggattttggcgtcaacacgacggctgcggcgcgggtcaggcccgacagccgcatcagggcctggtccagcgccgcctcgaccgactgcgcctcgccgacggaggagagctggctctggatcgactgccgctcggcctcgttgaggtcgccgacctgcatcagggcgtcgacgaagaagcgcagccccaattccgtcggcagccggccggcggaggtgtggggcgcatagatcaggccgagctgttccagatcggccatgacgttgcggaccgaggccggcgacagcggcatggcgatcaggcgggaaatattgcgcgagcccaccggctcgccggtcgcgagatagctttcgacaatttgacgaaagatgtcgcgggaacgctcgttgagctgggcaaggcctgcgcgcggcgcgatcagatggatcggatcgtgatgggccacagacggcaactcctctcaggtgctcgtaatttgtccatccggaccgcttctgacaagcgcggcgtttgcggcctccaggggtgaaaaagccttgccgcccatccctgccgcacctacaagcaccgccagcagcctttcccgcgagttttggaggattcccatgcggccaagccgccgtgcgcccgacgaactgcgccccgtgacgctggagcggggcgtggtcaaatatgcggaaggttcctgcctggtgaagttcggcgacacccatgtgctggtcaccgccacgctggaggaccgcctgccgccgtggctgaaaggccaggggcgcggctgggtcaccgccgaatacggcatgctgccgcgcgcgacctcggagcgcacccgccgcgaggcctccgccggcaagcaaagcggccgcacggtcgagatccagcgcctgatcggccgctcgcttcgcaccatcatcaatctcgaagcgctcggcgagcgccagatcacggtcgattgcgacgtgcttcaggccgacggcggcacccgcacggcctcgatcaccggcgcatgggtcgcgcttgccgactgcatcaactggatgaaggcgcgcaacatggtcaaggccaacgtgctgcgcgacaacgtcgccgcgatctcctgcggcatctacaacggcacgccggtgctcgatctcgactatgccgaggattcggaagccgagacggacgccaatttcgtgatgacgggcgatggccgcatcatcgaggtgcagggtaccgcggaacgcgaaccgttcacggaagccgagctcctggcgctcatggcgctggcccgcaagggcgtcgcgcgtctggtggacttgcagaaactggctgtggcgtagtcaataggccatgcaccgccgaatcacggacaagctcgtcatcgcgacccacaatcccggcaagctcgccgagatgaaggagctgcttgcgccgtacggtatcgcggcggtatcggccggcgagctcggcctgaccgagcccgaagagaccggcaacgatttccgcagcaacgccgcgatcgccttgatcgcggcggcgcaggcaaccaagcttcccgccttcgccgatgattccggcatcgtcgtcgacgcgctcgacggcgcgcccggaatctacagcgcgcgctgggccggcccctccaaggatttcaacgcggcgatggcgcagatcgagcgcctgttgcaggagcgcggcgccaccacgccggacaagcgcacggcgcacttcgtttccgcgctctgcgtcgcctggcccgacgaccatctcgaagaggtcgaggcccgcgtcgacggaacgctgatctggccgccgcgcggaaatgccggatttggttatgacccgatgtttctgcccgatggtcacacgcgcacctttggcgagatgaccagaatcgaaaagcacggcctgccgccgctcggtctcggcctttcgcaccgcgcccgcgccttcgtcaaactggcggagatctgccttgagccgcgctagagcgttttcgagcgaagtggataccggttcgcgccaggaaaacgcgtcgaaacaaggatccgaggccttcggcgtctacgtgcactggccgttctgcctgtcgaagtgcccctattgcgacttcaacagccatgtccgccacgccgcgatcgacgaggcgaggttcgcctccgcttttgctcgcgagatcgcaacgaccgccgagcgtgcgcccggccgccaagtcacctcgatcttcctcggcggcggcacgccgtccttgatgcagcctgcaacggtcggcgcggtgctcgacgcgatcggcaagcactggaccgtcgccagcgacgtcgaagtgacgctggaggcgaacccgaccagcgtcgaggccacgcgcttcgcaggctatcgcagcgccggcgtcaatcgcgtgtcgctcggcgtccaggcactcgacgatgcctcgctgaaggcgctgggtcgcatgcacagcgcgcgagaggcgctggatgccgtcgccatcgcgcgccgctcgttcgaccgctattcgttcgacctgatctacgcccgccccgaccagacgccggcgatgtgggccgacgagctgcgtcttgcgatcgatgaagcggccgagcacctgtcgctctaccaattgacgatcgaggaaggcacgccgttcttcggcctgcacaaggccggtaaattgaagacgccggacgaggcggtcgcgcgcgcgctctacgacgtcacgcaggagacctgcgacaagctcggtctgccagcctacgagatctccaaccacgcccgccgaggcgccgagtgccggcacaatctggtctactggcgcggcgaggaatatgccggcatcggccccggcgcgcacggccgcctcgacatcgagggcgtgcggcacgccatcgccaccgagaagcgccccgaagcctggctgatgcgggtcgagaccggtggccatggcatcgtcaccgacgagctgctcaacagcgaggagcgcgccgacgaattcctgctgatggggttgcgcctcgctgaaggcatcgaccccgagcgctacaaggccctttcgggtcgcccgctcgaccccaagcgcatcgcgctgctgcgcgaggaaggcgcgatcacggtggacccgacgggccgcctgcgcgtgaccagcagcggattcccggtgctggatgcggtggtcgcggatctggcggcgtaagcctgagcgcctaaatcagcgctccctcgcccgcttgcgggagaggtaaaccatcacgccccaaagctcttcggtgagcccgcgaccgcaacaccgccaccttgcgtcaccttcatcaccgcgagcccgcgctcgttcgtgccgtcggcgcggaagcggaacaggccgtcgatgccggcgaagccggaaggattggtgagcacgtcggacgagaagcgcgtggtgccttgcgtgcgcgcgagcgcggcgacgagagcgaccgcatcataggcgagcgtcgcggtgcggatcggctctgcgccgtatttggtacggtagcggcccgagaaggcgcggaagccggccgggtcgggcgcggcgtagaggccgccctgaagcgccgggctcgcatagacgcgcggattgtcccacagcccggtaccgagcagctggatgttgcgcaggtttgcgcctgccgccgtcatggcatccgccaccgtcacgacggcatcgccgtcgtcggcgatgaacagcgcatccgcgctgccaagctgctgcgccacggtgcgcgccgggttggcgcggtcggcgccatatctctcgaacgcgacgatgcgcccgccgcgccgcggcaccgccgccttcaccgcggcctcgacgacattgccataggcattgtcgggcaccagcacggcgacggatcgctttccgatgctggcggaatattcgatgatgcggttgacgtcggactccggcaggaagctcaggagatagacaccgcgtccggcgatgctggaatcggtcgagaaggcgatgacggaaatgccgcgcgtgcgcgcgacctgcgccacggccggcacggactgtgcaaacagcggccccaggatgatctcggcgccttcgtcgaccgcctgctgcgcaccggcttgcgcgccttgggggctgccattgtcgtccttgatcaggagctggatgttcggattctggaactcggccagagccatctcggcggcgttgcgcatggattgcgcggcgaggccggcattgccggccgccgagagcggcaggatcaggccgaccttcacgccgccggtgccggcggtcgtggcctgttgctgcggacccgccggctgggccggcggcgcggaactcgagaacggattggagaattggctgaggctttgctgcacgccggcgcaggccgacagcacgggcgcgccgagcaacaggccgagcgcactccgccgggtcgctcccgacgagcggaaccccggaacgggagactttggatgacgcgggcccaccatggcagcttctcttctgaccggccgtcgccagccgctcatgacattccttccgcgacacaggccgcggattcaggcatatagtcggcgaatagttaaccgaaacaaaaggataataaccgcttaacgcggaagcctccccgtcccggcaactgctcgccgtcttcgttcagcatcaaggcggcgtttccgtcgtgaatatggcgcgaaggtccccattcccgccccgcgtgatcttgatcgatcacattcccgtccgttatccgccccacctcggcaccatctttttcagccagccggttcccagccctgcgcatcatgcctaagttgacccattatgcgcgcaaacccggctccgataaatacgtcagaagctcaggacgccgccccgcgcggtttctccatcgatgcccatcggctcacggcgtcgaaggccgcaccgggcctccacctggtcgcaacccccatcggcaatctcggcgacatcacgctgcgcgcgctgcagacgctcgccggcgtcgatgtcatcttctgcgaggacacccgcatcacgcggcgcctgacggagcgctacgccattgcggcccagctcaagcaatatcacgagcacaacgccgaagccgcgcgaccaaagattctggaagcgctcgcggctggcggctcggtcgcgctggtctccgacgcgggcacgccactaatttccgatcccggtttcaagctggtgcgcgaggtctgcgccgccggccatgcggtgcatgcgctgcccggcccgtcctcggtgctggcagccctgtcggtcgccgcgctgccgaccgatcgctttttcttcgagggcttcttgccggcgaaatccgccgcgcgccgcgctcgcctggccgagcttgcacgtatcgacgccacgctggtgatgttcgaatcgggcaatcggatgcaggccaccctgaccgacctcgccgagatcatgggcgagcgggaagccgcagtctgccgcgagctgacgaaattgcacgaagaggtcaggcgtgcgcctctggccgaattcgcgcggcaggccgacgcgcctgagacgcgcggcgaattcgtcctggtgatcggcccgcctgcagccgacgccgaggtgctggcatcggacgcactcgacgatctcttgcgcgagcagcttgccgctcacaccgtgaaggacgccgtggcgcacgcggtggcgctctcggggcggccgcgccgcgaggtctatgcccgcgcgctcgagctcgcgaaggatctgcgaggcggcgatggcgaagactgagaacccccgggaaccaaaggtcgcctcgcccgagcgcgtcgccgcgtttcgcaccggcatctccgccgagagccgcgccgcggcctatctgatggccaagggctaccgcatcctcgccaagcgctaccgcaccccgcatggcgagatcgacatcgtggcgcgccgacgcaatttgatcgccttcgtcgaggtcaaggcgcgggcgagcctggacgacgccgcgttcgccgtgacgccccgccagcagcagcgcatcatcgacgccgcgcaaggctggctcgtggcgcatcccgagcatgccgaattcgaattgcgattcgacgccatgctgattgcgccgcgctcgcttccgcgccatgtgttggcggcattcgacgcctcgacctgaaaggcagaccatgaagctcaacgtcgccgtccagatggaccccattgcccgcatcaacatcaagggcgattccacctttgcgctgcttctggaggcgcaaaagcgcggccatggcctgtcctattacacgcccgacaagctctcgatggtcggcgatgaactggtcgcaccggttcagctcctgaccgtgcgcgacgagcccggcaatcacttcactctcggagagcccaggcgcgaagcgctgaacggcttcgacgtggtgctgctgcgccaggacccgccgttcgacctcgcctacatcacctcgacgcatttcctggagcgcatccatccgaagacgctggtggtcaacgatcccgcctcggtgcgcaacgcgccggagaagctgttcgtgatgaattttccgcagctgatgccgccgacgctgatctcgcgcgacctcgacgagatcaatgcgtttcgcgacaggcacggtgccgtcgtgatgaagccgctgcacggacatggcggcgcggcggtgttccgcgtgatgccgcaggacatgaatttcggctcgctgttcgacatgttctcggtcactttcaaggagccctgggtgatccagcaattcatcccggaggtgaagcacggggacaagcgcatcatcctggtcgacggcgagttcgccggcgcggtgaaccgcgtgccggccactgacgacctgcgctccaacatggtacgcggtggggcggcacaggagaccgagcttacgccgcgcgaacgcgagatctgtgcgacgctcggcccggcgctgcgccagcgcggcctgttgttcgtcggcatcgacgtcatcaacggcaacctcaccgagatcaacgtgacctcaccgacgggcatccgcgccatcgcgcggctcggcggccccgacgtcgcagcgaagatctgggacgtgatcgagcacaagcgtaagaagtagcttcttgcggcccggatgcgcgcggcgacctcgcggtgcgcgctaaccacccgttcaccatggtgcccccgcgcctcgcgcggacgcgcgtgtcaaactgcgtgaaactacggagccgcgcgccggtcgaataacgccgcgttcaccatctgccgaaatccggcatcgcgactgacgcgcgcgttccgcctcgcaacaccccttatacttttactccctactcatcgacacgggggaacacgccaggtgcggttcgagtaccccgcgtaagagtagaagagtatgaataccgcacgcattgtcgttctcgtcattgcgctgggcgccggcggcgtcgctgcgtatctggcgagcggctaccagaacgcgcccgcgcctgtcctgtccgtcgccgagaagctgccgacggtcgaggtcctcgtcgcgaagaacgacatccagcttggccaagccgtcaagcccgacgacctgcaatggcaggcctggccggccgcgaccgcgagcagcgccttcatccgccgcgacagcaggcccgaagcgcagacccagatcgccggctcgatcgcacgcgtgcctctgatgcagggcgagccgatccgcgagcagaagctggtcagggccgagggctccggcttcatggccgcaattctgccgtccggaatgcgcgccgtttccaccgagatttccgccgaaaccggcgcaggcggcttcatccttccgaatgaccgcgtcgacatcgtgctgacccgccgcctgaagaatccggatggcgataacggtccgaccggcggcaacgacctcgttttgtccgaggtcatcctcaccaatatccgcgtgctcgcgatcgaccaggcgccgaaggaaaaggacggccagaacgccgtggtcggcaagaccgtcacgctcgagctccggcccgaccaggtcgccacgctctcggccgcacgccagggcgggacgctgacgctcgcgctgcgcagcatcgtcgatgccaacgcggtcgacggcacgcccgaggatcaggcgatcaggcgaacgggcggcgtgaacgtgatccgctacggcgtgcaggcacggcaactgacgtcacagaagtgatggggacagcatgaactacgggggtgaaaggtcgggcatgcgcattcgggggaagcgcgcgcgctcgttcctggcggggacggtgttgatgctggggctgctcgcggcttccgatgtcgtcagagccgcggatgcgccggtcggcgaccaggcgccgatgcaggcgtcggaccttggcctgtcgccggtcgcgaccgtcgccccggcgaggacgcgcttcctgtcgctcggcgtcggcaaatccgtcgtcatcgacctgccgcgcgaggtcaaggacgtgctggtggccgatcccaagatcgccaacgcggtgattcgctcggcccagcgcgcctacatcatcggcggccaggtcggccagaccaacgtggtgttcttcactgccgacgggcagcaggtcgcctcctacgacatcgctgtgaagcgcgatctcaacggcatgcgcacggcgctgcgccagtccctgccaggcgtgcagatcgaaggcgtcggcgacagcgtgatgctgaccggctcggtgtcgagcccggtcgaggcccagcaggccggcgacgtcgctgcaaagctcgtcggcggctcggacaaggtcgtcaacaacatcgtcgtgcgcggccgcgaccaggtcatgctcaaggtcgtggtcggcgaagtccgccgcgatatcgtcaagcagctgggcgtcgatctcagcgccagcctcaacgccggcacggcggtggggaatttcaacaattccaacccgttctctgtcgctggcgggccgatcgtcggcagcaatggcctcggcctcgccggcgtttccaagggcgtcgccacggtcagtgccacgatgcgggcgatggaaagcgccggtgtcatgcgcacgctggccgaaccgagcctcaccgcgatctcgggcgaatccgcaaccttcatcgccggcggcgaattcccgattcccgcaggctattcctgtgacccggtcacccacgtctgtaccacccagatcagctacaagaagttcggcatctcgctcaacttcaccccggtcgtgctcagcgagggccgcatcagcctgcgcgtgatgaccgaggtctcggagctgtcgaatacgaactcgatcacgttgacgcaggcggtgtccgcgacatcgagcaactcgatcaccatcccttcgattcagacgcgccgcgccgagacgacgctggaaattccctcgggcggctcgatggcaatggccggcctgatccagcagcagaccaagcaggcgatcaacggcctgcccggcatcgaccaggtgccgatcatcggcgcgctgttccgcagccgggacttcgtcaacaacgagaccgagctgatggtgatcgtgacgccctatgtggtgcgcgcggtcgcccagaaggaattgtcgcgtcccgacgacggcttcgcaccggcatcggatgcgcagacggcgctgctcggccgcatgaaccgcctctatggcgtcgcgcgccgcgtcgatccgatcaacggcgcgcccgatgatttcggcttcatcatcgactgaaacgaacggtttggggaccggtaggaacggggcaagaggggaccaggcgatgatgacaacatcagccgatcgacgtcgcaaccgacggatcgcgctggcattgacggccctgtccgtcatgctcggcgcctgcaacaccacggagatcgtcacccagacggttccgaccgactatcgccagcgccacccgatcgcggtgcaggaaggcaagaagtcgatcgtgatcttcgtcggcaaggcgaggggcggcctctcggccgcacagcattcggacgtcgccggcattgcccgggaatggttgcacgaaggcaccggctcgatcgtcgtcgacgttcccgtcgacaccgccaattcgcgcgcggcggccgcgacctttcaggagatccggtccgtgctcacgtccgcgggcgtgccatcgcgtgccgtcgtccagcatccgtatcgccccgaggaccccgggctgctgcccaccatccgcttgagctattcgaagatcaaggcagtcgcgggcccctgcgggctctggcctgaagacatcggccccaacatcctcgaccccggctataacgagaaccggccctatttcaacctgggctgcgccagccagcgcaatctcgcagcgatgatcgacaatccggccgacctcgagcagccgcgcggcgagacgcccgcctataccgcacggcgcaacatcgccttcgagcgctaccgcaagggcacgccgatcgcgacgccctcacccgacgccgacaaggccaaactcagcgataccggcaaatgacaggcatccacgacgacgcggacgatccgcggcaccccgaggaacatatcgcaccggttccccgtatttcggtgcaagccttttgcgagaccgagcagacgctcgctgcggtgaccgcggcgggtcaggatcgccggcttgccaaggcccacctcaccgcgcaggagggcggcctcgccgcggcgatcgaggtctatgaatcgatgccgaccccgaacgtgatcgtcatcgaatccgacggcacgcgcgacatcctcgaggggctcgacgacctcgccggcgtctgcgatcccggcacgcgcgtggtggtgatcggcaaccccaacgacaccgcgccctatcgcgagctggtacgccgcggcgtcaacgattacgtggtcggaccggtcgagaccctcgatgtcgtccgctcgatctgcagcctgttctcggcctccgaggccatcatcaccggccgtgtgatcgcggtggtcggcgccaagggtggtgtcggtgcgtccaccgtcgcgcataatgtggcctggaccatcgcccgagacctttcgctcgattcagtcgtgatcgacctcgacctcgccttcggcaccgccggcctcgactacaaccaggatccggtgcagggcatcgccaacgcggtgctgtcgcaggaccggccggataccgcgctgatggagcggctgctcgccaaatgcaccgatcgtctcagcctcctggcagcgcccgccacgctcgaccgggtctacgatttcggcgccgaggcttttgacgcggtgttcgacacgctgcgcatgaccacgccctgcatcgtgctcgacgttccccatcaatggtccggctggacacggcgcgcgctggtcaacgccgacgacatcgtgatcgtggccgagcccgacctcgcgaacctgcgcaacaccaagaacatgctgagcgtgctgaaggcagcgcgccccaacgaccggccgccgctgtactgcctcaaccaggtcggcatgcccaagcgcgcggagatcgaggtcaaggcgttcgccaagaccatggagagccagccgatcgcggtgatcccgttcgactcgaaactgttctcgaccgcagccaacaacggccagatgatcgcggaggtcgccaagaaccatcgcaccactcttctgttccagaacatggcgaaccgtctcgccggccgcggcgaggtgaagaagccgaagcgctcgctgctcgagccgctgctgaaaaagctgaaaggcaggccggggcgtggatcagcgccacatcgcaaggcgtcgtaagcgcacaccaaaaaacgcggattacctgtccgcccgctgctgcttcttggccagcagctgccgcagcgcggtgaccttggccgctgcctggtccggcggcagatcggctttcacgaggatttcggcctcggcctcgcggccctgcaatcccagcacgagcgcgagattggcgcggacccgcacatcgctctgattgcgctgataggcgcggccgagcacctgttcggccttcgccagattgttttgcagcatataggataggccgagattggacagcacggtcggctcgtccggcacgatcttcaacgccgcggcgtaatattgctgcgcctcctcgttgcggccgagctgatcgagcgctgcgccctgcgccgacaggattcgccagtccggatcctcaggcgcatgcgcacggccgagcacgtcgaaggcccgctggaagttgccgctgtcggcgagcgcgcggccatagccggcgagcagcgccttgttgttgggatgggcaagcacggcctgctccagcaccgcgacggcctgcgcgcgctggccggtgtcgcgcagcgccttgccataggcgagcgcgacgccgggatcgctcggcttggcacgatagcgctcgcgcaacgcgtccagctccggcttggcgtcggacctggcggccgtttccgatttggcgccgagcgcgccggtcacatcctctatgccattggtctggcagccgccgaggacaaggaccaagaacgcaggaagcaggaatctcgccgaagcaagggcgggggacggacgcttggacatactctgatcactcggcgactgatcagagatgctgaccgattaacgctaaagcctcgttaaagaggcggtcctcaagaccttaatcgacgaactcggcgccgaactcgcagccgatgcgccagcgcaggcggcattggcgggaatagtcgggcgcgaagatgatggtgaactgcggcggcacttccaggaattccgccaccactttcacgccgccatccgaaatatccgtgatcgtgcaatcccgcggcagcgagcccgcgccaaaatggatcttggcgagccggctgcacacccgacgttcgcttctccggcgatttaccagcatgttgctacttcacttgttagaccacggcccatcccgcaccctcagcagtagcggacattcgttggaatgtgctgaggacggaagcccgcattcgaaacgtagtctccgcaacacgtttacgattggttaggacttgcatggctacggcgaattgttcccgtattgttcttgcgaggcgggggtcgtgcctcagtttgaaatttctgcggcttgatcccgcttcttgtaggggccgcgcttcttcggcgggccttcgcgcaagtcgatcagttgaacgatgtccgtcatggtcatgcggtctgaaacgagaccggcagccatcgcgggcgtagcgcccttaagtgatttgtgcgccttcacgaaattataccacacgaagtagagcgagagcgcgtgatagtggttctccacctttttcgaaaaggcgttcgtgaggcgagtgaagcggcgcattgacatgcgcatggtgaggttctggcgctccacgtaagacgtggaaatgtgcgccacgtcgggcgaaccaaggatcaaatccttatcgatgccgatcagcttcgccgggctgtagcgcttctgcggctgcggatcgctgccgtacagcttcacgagcattccgtagtccacgccatccgggccgaattcctggctgaccgcgtggaggtaggccttgtggccgtccgtagtgagctgcacgcggttcgcgaggcggggcttaaggtcggcaatgaaggcgttggcggcgctcgcgtcgcgatcaccgacaagccaagtcaggatcagcttggagtcggcatcaatagccgtccacgtccacacatcgccggagccgatcggagcggccttggcgctcgcgacgttcttcgccttggcataggcgaagctccagatttcgtcgcattggatgcgctcggacttcacgttgcgaacggtggcgtcatggaaggcggcgcaagcgctgccggcatcgaccaagagcttcgtgaccgtgttcagggaaacgtccgtgacccgagagatggagcgcatagaagaaccctcgcagagcatctggaggatttgggcgcgcttctctgtagggagtctgttcatggactgcatatgaacagaacccctacagatgtcaagcatttagttcagtttggattcccttgactactaaatccttgtaaccttttggattcgtagggttttttagttgcgatgggcgtaaaactaccccatagtcatccacgcgtgccccgggttggactcgaaccaacgtcctccgagttagcagctcggcgctctctaggcttttcacggctccactgagctaccggggcgcacgcagacgaacttgcggcgggtttccccaccgcaagccggtcacgatcagaactagctggtgtcgtagcggtgcttacccatcgccttcacctcccttctaaggaccctggtgtagcagcaccggggtctttcgcttctgccgccgacgggacgaggaaccaagtttggccctcacgccgcaccatcggcggtgtctccttggagagccgatagaggctcatcccaatggttttgtagtggatttggcgattaaggaaggtctcgaccttccgccgcatcagcgacgctttttcgcctttggcgccggcctgcttcaggtagagcaggattaagtcgcggattgacggctctgcgcccgctgtgagcgtcgtagacgctacggtaggcacgggtggggccggaggggctgggttggggatagctgcagtgcccacgatccgcggcgcagcgtcctcaaataagctcggcgccttttctgaagggcgccacatgctggccagcctattcgagttcggcggtctcacgatcatcgccggcttcacgtcctccggcaaagcaatatcgaccccgaatagacggccggcagcgcggcaatcgaacaaggcgcgatcaaacccacgaatttcgcggtcgatgtcagaccgacggcgaagcgcgtccgcgcgctgcgtcatcagatcgttgtacttatcgacgaccgccttggcggcagtcctgcgaacatcgtcgtccatctacgtccacccgattcgaccggatgggttccttgtagatgttctacacaacggatacaagggtagggtttacgattcccaacgcttttgcgcagctttcttgccaatctcgctccgacgttcgggagaaagcgcgccagcccgggctttgccgccaacggcgccgcccttagcccggttcggggccttgctaggggtgtcctccacctcgccggtcgcgatcctgccgatcagcatggcgttctgtacggtgtcggcgtggcgcttctcgccttttggacccttgggcatggagctttctctaagccattgatattggttaacaaattttaacttttggcggtgcttgaaccctattgcgggtttctcgttctaagcgtatataggcggctacctcgcagaacctactagatttaacaggaactgcgagcatacagagggctcctgcgggagcccttatttattttttgggggggcgcgacatgaaacgaggggcggtcttcgtcgatgcgggctatctgtttgcccaaggcggtgtggcgctcacgggcagtaaaaaaccccgctccattttggatttgacgccggaagcggccattagcgagcttctcagagtttttactgagcgtgcgacggactgcgaattgcttcgcatctactggtacgacggagccagctttaaaggacctacgatagaccaagacaggatggcgcacttggataacgtcaaggtgcgcttgggtttactcaacagtgctggagagcaaaagggggtcgattcgctgatcgtcaccgatctaatcgaattggctcgtctgggggccataacagatgcggttctgttgtcaggcgatgaagatgttcgtgttggcgttcaaattgcccagaactatggcgttcgcgtccacttgcttggaatagagccagcgcgagggtcacaatctaaagctctgatgcaagaggctgatacaacatccgttctggaaaaagctgatgtcgccaagtttcttgtcgtgcgtccgtctgtacaatcaagcgggacattaggagctgcaactgaggcctgggctgaagtcgctcacgttgaagtccaaacctcttctggtgacgatcgaatctcgcgtgtggccgcctccatcgtagcgtcgatagacgccgagggaattaagggcattcatgaatactgggccacgcagcgtggcgtcccgccggagtttgatgggaagctgcttggtcaatgccgtgctgaactaggccgcgatctttcgcttgaagagcgtcgccaagcgcgcgaggcgttcagcagcgcggttagaaaaaacggctcgcctcggcgtggcatgttttccagaaagaactagctcacaaattcaaactgaggcaccaccgaggcggggcgcttgctgctaccctcgattgtgaaagaacgggcaggctggttcgagcatggttcagcgggtttccaccgtcgcctttgaggggatcgaggcccgcgcggtcgatgtgcaggttcaggtcgcccccggcctgccggcctttgccatcgtcggcctgccggacaaggcggtgtcggaggcgcgcgagcgggtgcgcgcggcgctgatcgcctcggggctggcactgccggcgcggcggatcatcgtcaatctggccccggccgacctgcccaaggaaggcagccattacgacctgccgatcgcgctcgggctgatggcggcgatcggcgccatcccgccggatgcgctggccggcttcaccgtgctcggcgagctcggtctcgacggctcgatcgcgccggtggccggcgttcttcccgcggcgatcggcgccaattcgcgcgaggaagggctgatctgccccgcggcctgcggctccgaggcggcgtgggcgagcccggacatccagatcatcgcggcgagttcgctgatccagatcgccaaccatttcaagggcacgcaggtgctgtcgcggccctcgccgaaggtgcacgaggccgccgcctccacgctcgacctgcgcgacatcaagggccaggagagtgccaagcgggcgctggagatcgcagccgccggcgggcatcatttgctcatgatcggcgcgccaggggccggcaagtcgatgctggcggcgcggctgccctcgatcctgccgccgctgtcgccgggcgagctgctcgaagtctccatgatcgcctccgtggccggcgagatcgagggcggcgcgctgacggccaggcggccgttccgctcgccgcatcattccgccagcatggccgcgctcaccggcggcggcatgcgcgccaagcccggcgagatctcgctggcgcatcagggcgtgctgttcctcgacgaattgccggagttcgatccgcgcgtgctggattcgctgcgccagccgctggagaacggcgaggtcgcggtgtcgcgcgccaatcaccgcgtgacctaccccgcccgcttcatgctggtcgccgcgatgaatccctgccgctgcggcaatgcgttcgagcccggctatgcctgcaagcgcggccgcatcgaccgctgcaccggcgactaccaggcgcgcatctccggtcccctgatggaccgcatcgacctgcgcatcgaggtgccggccgtgaccgcggccgacctgatcctgccgccgccggccgaaggatcagccgaggtcgccgcgcgcgtggcggcggcgcgcgacatccagctcgcgcgctatgcggacgcgggcctgccccacattcgcaccaatgccgaggcgcccgcctccgtgctggaggagatcgcaaggccggatgcgcaaggccaaaagctgctgcgcgacgccgccgaaaccatgcgcctgtcggcacgcggctatcaccgcgtgctgcgggtggcgcgcaccctggcggacctcgatcattccgacaagatcggccgactgcacctcgccgaagccttgtcctaccgcgcgctcgcggaggatgtgcggcagatggcttgagcgccttgcgcatcaacccggcggtaacgagtttcctttacgctctgcaaaccataaggcccaacgcgtttcggtcgtaagttcacaagggcccggcgagtacagcgtcatgttgcgtttcaagttcctggcctcggtcgttcccctgttggccgctgcggtgttcgcccgcgcagagatcgggtcggtttcgcatccctgcatcgcgcttggcgaaacaacggtggagctcacgcccctgttctggactgctggcgtgcatgtcgccttcaccgacgatcccgcgcgagccacggtgcgggtccggatcaccgacgacgcggacacggcggacttcaccgtggtggacggccttggttccgagccggactcctgccaggccaatccgtcgacgcgactcgtctcgattgctgcccagcccgtcgatggcggccaggtgatctatctctccagcgaaggaccggcggattaccgcatctatgtgcgctcgaaaacgttctcgcagcgcgaggcggcggcactgatcgtcggcgcccgcggcggccagcgccatctccaggcggcctcgctgtaaagccgttaacatctcgtcaaccctgtttggaggcagtgcgaaggcctcaagttgttcgcaaggtcgacgcgccatcgtcgcccgcggcagcggggtttcaggcgagagtcggggtcgatggcgatgggtcggacgttccggatcaaggtgcgcatgcgccgcttcaggcgccagcatcccaggctggccttcgcgatccgctccttcctgattttctcggcgacgttcggcggcgcttatggcttcgtgtccggcagccggtccgagaacgccggttacgatccgcacgcatttgcgatcggtgcgagcttcctgttcgcgctcgcctgcctcggccttgcgacgctgagcatacgtctgcgcttcgtcaacaaacggctgcgaacgctcgccgcccacaatgaggcgttgatcgaccgcaattgggagctgaaggaagcggaagaacgagcgcgcagcctgttcgagcagcagggcgatctcatcgtgctgcgcgataccagcggccgcatcacctttgccaacgaggcctattgcgcactcgcaggacaggcgcgcagcgcgttggtcggcacgcggttcgatttcgacgtgctggagcagggcgacagcgcgcgcgagagcaacggcacgcgcatccacgaccagaagatcgcgaccccgctcggcgcgcgctggatcgcctggcgcgagggctatgtccgcgccgatgccggacagcccgccgaactgcagagcgtggggcgcgacgtcaccgaccggaccgagagcgaacgcgcattgtccgacgcgcgcgaccaggccgatgcagccaaccgggccaaatcgcgcttcctcgcaatggcctcgcacgagatccgcacgcccctgaatggcatcatcggcatgggcggcctcctgctcgacaccaatctgacaccggagcaggcgacctatgccagggcggtgaagacctcgggcgaagccctgatggcgctgatcgaggaactgctcgactattccaagatcgaggccggcaagctcgacctcgaccaacgtcccttcggcctctcgagtttggtcgaggagatcaccgagctgctcgcgccccgcgcgcaggcgaagtccctcgagatcgcagcctatgtcgacgagcgcctcccgctggaggtggtcggcgacgccgcgcggctgcgccaggtgctgctcaacctcgcaggcaatgccatcaagttcaccgcaagcggcggcgttgcgctgatcgtcgagccaggcatctggccgaacgagatcagcttcctggtccgcgacaccggcatcggcatcgcagccgaggcccagcagcgcatcttccgcgagttcgagcaggccgacgagcgggtcgcccgcacctatggcggcaccgggctcgggctttccatcagcgagcgcatcgtcaagcgcatgggcggccggatcacgctcgaaagcgaaccgggcaagggctcgaccttcgaggtcgcggtgccgctgccgtcctcgcaggccaacgccgcgcagacggcttttcccagccccgacctctctggcaagtcaatcctcctcgtcgccgccggcatcgaggcatccttgatcgcgcggcggctcgagcgctggggcggccagacctgcatggttgcagatgcggcggtcgccgaggcattgctgccggaacgctcatggcatgcggtgctgatcgatcgcgagatcggtcctgccattgccgaccgtctgggtgaggcggcccgcgcgcatgctctgcagcgcctcgtgctgctgacgccgagctcgcgccacgacaagctgtcgccggcgttcaccggcttcctggtgaagccgctgcgcgcggcctcgcttgccgcacgcctcgccctgacggctgaggtcgcctcgcccgatctcgcgccggaaccgccggcgtcgtccgccggcatagcaccggcgaaaggcctggcgatcctcgtcgccgaagacaacgagatcaacgcattgctgatgcgctcgctgctgaccaagctcggccaccgcgtcgtcattgcgatcaacggcgagaccgcgctggaatcctggctcgctgcctcgtccgccggcacgccctacgatctcgtgctgatggacattcagatgccgcagctcgacggcatcgaggccacaaaacgcatccgggcccaggaggccgccaccggcggccaccaaacaccgatcctggcgctcaccgccaacacgctcgtggaggatcgctatgcctgcttcgaggccggcatgaacggattcctgatcaagccgctcgatcgcgaaaagctcgaggaggcgctggcggggctggcggcgtcccggccggtggcggtcccgagtccggcgggaacctgatctcgaccgacaatccgtaattgaaatcggccacgttgcgcgtcaacatcctccggggcattttgcaatagaggatattgcgcatgaacgtgctttgccgcctcgcactcattgctctcttcgccggcatctcccaacacgccgcagccgatacgccggaactcatctcttccctcaagcaaggcggctacgtcctgatcttccggcacacggcgaccgacgacacccagaaggatgtctatcccttcaagttcgacgacatgagcgcccagcgtcagctcagcgacaagggcagggacatggcgcgccagatcggaacagctatcaaggacctcgcgatcccggtcggcgatgtctacaccagcaggctgaaccgcgcggtcgaggccggcaagctgatctcgggccgggaggtcaagccggtggatgcgctcacggacagcagcaacgccagcgcatccggaatggcaaacccgactggtaccaatgctaaggccgggcaggccgtgcgccagctcgtcgatgcaccgccgaagccaggcaccaacacattcctggtcacccacaagacgaacattgccgacgccttcggcaaggaggccggcaacgtgcaggaaggcgaagctttcgtctacaaggccagcgattccgggcccgccggctttgcgggacgcatcaagatcgtggattggaccgcgaagcccggccagtgatgggcggcgtagctccgcccgaacggccggcgcgaaggaaagtccggaccatctcacggccgatcgccgcaaggacgttctgacgcactgtcagagctggcgggctggcggccagcaccgggcgggttcacgagcgaatgttccggccagatctcggcaaaccggtgcccaaacgccgcggcgacgcagcggaacaatcgggccggcgtgacttgccgctccgccacgatgctgtgatacggacgtgtcatgacgagcgaccgaaaggctggcgaccacgtgagaacatcagaagaccgttcattcctcatcttgctggcggcgatctccgttgctttcgggtgggtgctctggccattctccggcgcattgctatgggccacgctgctggccatcattttcgctccgctttatcgacgcgtgctggaaaccctcccgggaagggacaatctcgcggcgttgttcacggtcatcgtcgtcatcgtgatggtcctgatacctgtggcgatcgtggtcgcttcgctcgtcgaccagggagcggagctgtatcagcgcatccaaagcggggagatcagtttcgctcatcccctgcagcagctgaaatccgcgctgccgggctgggctgcttccctgtcggatcgtctggtcggcattgatttttcggcccttagggaacgcctgtcgggtctggtcgtcccagccgggcaacagcttgccgggcatgcgctcaacatcggacagttgacggtggagttcgtcgcaagcctgctcgtgatgttgtatctgctgtttttcctgctgcgtgacggtgaagagctcaacgcacgcattcgcgacgcacttccgctccgcccaggccacaccaacgagattctcgatgccttcaccctcgcggttcgcggaacgatcaaggggatcgttctcgtcgccctcattcagggtgcgctgggcgggctcatcttctggctgctcgggttgactgcgccgctgctggccggcgcgctcatggcgctggtctcgctgctgcccgtgctcgggtccgccctggtctgggttccggtcgcgctctacctgctcgtgtcgggcgcagtcacgaagggtctcatcctgctcgctttcggcaccttcgtgattggccttgcggataattttctccgcccgatcctggtcggccagtcgatccagatgccgagctacgtcgttctgcttgccaccttgggcggccttgcgagtttcggcgcgaacggcttcgtcatcggcccgctcgtcgccgcgatgttcctgacggcgtggcacatctatgtcggctcgaaagtgccgcaggaggcccggaagtgaccgtcattccgcggcgcgaacggacgctcggcaccagccgggtttgggatccgcccgatccggaatgatgtggcgttggcgataaaccggggcgcggacagcttgtcgggcggcgcctggcttcctcggaagatggtgtctgcctgcgccgcgcgcttgcagtgcgggcacacgaagagatgcgcgatgaccggggttggctcgtctgcgagcagttccgagcggaaccacttcatctccacatggcagtctgggcaggtcggggcttccagctgccccgcagcgctcctgagacgatcaaccatggtgtcctccccgccgttttgcgagagttagcggaataccgttggccggtctgcatcaaaagatactctgactgaactgccaagacccacattcatcgccgtgaattacagccgcctgagcgccacgctctcgaccgtgtggtcggcgcccttcttgagaatcagcgtcgcgcgtgggcgggtcggcaggatgttgtcctcgagattggcgaggttggtgcgctcccagatcgcgatcgctgtggcggtggcttcctcgtccgacagcagcgcgtagcggttgaaataggatttcggatcggtgaaagcggggtcgcgcagggccaggaagcgcttgatgtaccattgccgcagcgccacttcgtcggcgtcgatatagaccgagaagtcgaagaagtcggagacgacaggcaccgccttgccgtcacgcggcagcttgccggtttgcagcacgttgacgccctcgacgatcaggatgtcgggctggtcgatctcggcccactggttgggcacgatgtcataggtcagatgcgaatagaccggcgcgcgcacatggcggcgcccggccttgatgtcggagaggaagctgagcagcagcggcagatcgtagctctccggaaagcccttcttctgcatcatgccgtgccgctccagcaccgcattgggatagagaaatccgtcagtggtgatcagctcgaccttcggacgcggcgaccagcgcgccagcagcgcctggagcacgcgggcggtggtggactttccgaccgcgaccgagccggcgacgccgatgatgtagggcaccttgcggtcgcggatgttgaggaactggcgctctgcgtaatacaggcgctgcatcgcatcgacatagatcgacaacaagcgcgacagcggaagatagatgtcctcgacctcctggaggtcgaggcgatcgtgcagcgagcgcagccggtcgaactcgcccggctccagcgtcatcggcgtatcatcgcgcaagcgcgcccactgctcgcgcgtgtagacgcggtacggattatactgctgctcgggtgcgcggatatccatgacgcggtctttccgttgcgaactgttcgccctagcctagccgcccttgcgcgacgctttctcttccaaccccgacatcgaggtccgcttctccagcgcggcctcgacctcctccagctttatgccgcgtgccttcaacagcacaaggaaatgatagagcagatcggcactttcagctatcagatgcgcgcgatcgttttcgactgcagcgattacagtttcgactgcttcctcgccgaacttcttggcgcaatgctcggcgcccttgtcgaggagcttgcgggtataggacgcttcgccgccggaagccgcgcgggcatcgatggtctcggccagatcatgaatcgtgaaacgctgcatcggacttactcaaaaaacacacgggaccacggcggccgttcgcggctgcgagcgtagcattcttatgaaccggagtcgtcaggcatcgaggcgcatcggcagtccccgtcgcgccatgtgctccttggcttcgcggatggtgaattccccgaaatggaagatcgaggcggcgagcaccgcggtggcgtgcccgtcgcggataccgtcgacgagatgatcgagattgccgacgccgccagaggcaatgacgggaacgggaacgctgtcggcgatcgcccgggtcagcgggatgtcgaatccctgcctggtgccgtcgcgatccatcgacgtgagcaggatctcgccggcgccgagcgagaccacttcctgggcatattcgaccgcgtcgatgccggtcgagttgcggccgccatgggtgaagatctcccagcggtcgccgccggggcgcttgacgcgcttggcgtcgatcgcgaccaccacgcactgctcgccgaatttctcggcggcttccttgacgaactcgcgtcgcgacaccgccgcgctgttgatcgaaaccttgtcggcgccggcgcgcagcagcgtcttgatgtcgttgacctcgcgcacaccgccgccgaccgtgacgggcatgaagcaggcttccgccgtgcgccggaccacatcgagcatgatgccgcggttctcatgggtcgctgtgatgtcgaggaaggtgagctcgtcggcaccggcggcgtcataggcgatcgcggcctcgacgggatcgccggcatccctgagatcgacgaagttgacgcccttgacgacgcggccgtccttgacgtcgaggcaggggatcacgcgcaccttgaacatcggatgtctcctaggcggcgcgcgcgtcgcggatcagagcgagggcggcggcgggatcgagccggccgtcatagagcgcgcgcccggcgatcgcgccggcgagctttttcgcgcgcggcatcagcatggctttcacgtcttcgatcgaggcgagaccgccggaggcgatcacgggaatggagatggcgtcggccagcgcaattgtcgcatcgaggttcagccccttgagcaggccatcgcgcgcgatgtcggtgaagatgatggcggcgacgccggcgtcctcgaaccgctgcgcgatctcgagcaccgtcacctgagaggtctcggcccagccttcgaccgcgaccttcccgtcgcgcgcgtcgagcccgaccgcgacgcggccgggaaatttcttcgccgcagacttcaccaactccggatcgcgcaccgcggcggtaccgatgatgacgcgggtgatgcccttgtcgagccaggcttcgacggtcttcagatcgcggatgccgccgccgagttgaaccggaatcttgatcgtcttcagcatcgcctcgacggcttgcgcgttcaccggcttgccggcgaaggcgccgtcgagatcgacgacgtggagatactcgaagccctgctcgacgaagctctgcgcctgcgcggccgggttgagattgaacacggtcgcgcgtgccatgtcgccttgctcgagacgcacgcactggccgttcttgagatcaatcgcgggaaagaggatcatgtcataccttttgccgttctcctcgagagaacggcgctgccacccatgtaccccgtggaaggcgtcgtagtcgtcacggtttccatcgcaggaagttcgagatcagggccagcccgaaccgctggctcttctcggggtggaattgcgtaccgatggccgtgtccttgccgacgatggcggtcacgggcccaccataatcggcgcgcgcgagcacgtccgcctcgctggcggcattgaggtgataggaatgcacgaaataagcgtgctggcccttcgggccgagcggcagcttgttcaggaccggatgctcctgcagcacctccagcgtattccagcccatgtgcgggatcttcaggctctcgtcccgcggcctgatcttctcgacgtcgccgccgatccagttcaggccttcggtgatgacgtgctccttgccgcggcttgccatcagctgcatgccgacgcagatgccgaagaacggccgcgccttgacgcgcaccgcctcgttgatcgcctcgaccatgccgttgacggcatccagcccccgccggcaatcggcgaaggcgccgacgcccggcagcaccaggcggtcggcctcgtaagcctgatcgggatcgctggtgacgaagaccttttgcgggttctccaggctgcgcgcggcgcgctcgaaggccttcgcggcggaatgcagattgccggaaccgtaatcgatgatggcaacgctcatcttgatcctcccggttccggaaacaatccgatgatgccgccggccggaatcggcggcgggttcgagaattgctgacccggcgtgctgcgggtcggcggcgggccgccgcggtcgacggcccattggtcgttgacgatgccgtgctgcttctggctccagcgctcgaagaagcggcgttcggcggtgtcgccgttgtcggcaatcacgacatcgagctgccgccacttgccgcgcgacaacgtccagcggcgcaggctcgatgcctcgaagcccatcagcagcgcgaccacgagattggcaaagacgatcgagctgcggccgatcccgaggctggacagacccgcgctgaacgcggcggtgaaaagcacccagccaatcagcgccagccagagccggttccacagcagccagaacgggccgaagatcatcgcccagaaatggaagccgtcgcgcacgaacacgaacttgtcggtcgcgcgcagatcggctccgccaggggagggagcatgaactgtgtagacaggcatggtgatgccccgttctgaagaaaatcagtgatccgccggcagcgtttcgtcaaccgacggaggttcagccgccgagcgagcccttggtggacgggatttcgcccgccgccttcggatcgatcgcaacggcggtgcgcagcgcccgcgccaggcccttgaagcaggactcggcgatatggtggctgttatcgccatatagggtctcgacgtggagagtcacgccggcgttgatggcgaaggcctggaaccactcgcgcaccagctcggtgtcgaactcaccgatcttgtcgcgggggaagtcggccttgaacaccaggaacgggcggcccgagatgtcgatgaccacgcgcgtgagcgtctcgtccatgggcatgtgcacgccggcatagcgcgtgatgcccgccatgttgccgagcgcctgcttgaccgcctggccgagcgcgatgccggtgtcttcggtggtatggtgatgatcaatgtgcaggtcgcccaccgccttgaccgtgaggtcgatgcgggaatggcgggcaaggagatcgagcatgtggtcgaaaaagccgatgccggtcgcgatgttggccacgccggtgccatcgaggttcacggtgacctcgatgtcggtttccttggtcttgcgcttgatcgtcgcggtgcgcattgaaagctggctttcatcctagctagggagccgaaaacggcggtcttttaacagccaaatgacgccttcgctactgcgggaacgctgcggcaggccggcacttgcgcctatggtgagcgaaatctagggccggaacggcccgttgtgcccgtggcccccaccgcctaaatcaggccggacaacgaggatcattcatgcaggcttcccagaacagctcgcccgtctggcacggcaccacgatcttgacggtccgcaagggcggcagggtggtggtcggaggcgacggccaggtctcgatcggccagaccgtcatcaagtccaacgccaagaaagtccgcaagctcggcaagggcgacgtcattggcggctttgccggcgccaccgccgacgccttcaccctgttcgagcggctggagtccaagctcgagcaatatccggggcaactgacccgggcggccgtggagctcgccaaggactggcgcaccgaccgttacctgcggcggctggaggcgatgatgatcgtcgccgacaaggacgtctccctggtgctgacgggcaccggcgacgtgctcgagcccgaggctggcgtgatggcgatcggctccggcggcaattacgcgctggccgcggctcgggccctgctcgacaccgacaaggacgccgagaccatcgtccgccgctccctcgacatcgccgccgacatctgcgtctacaccaaccggaatctgaccatcgagagcctggcaacggggtaggggctgtggccggacagcggagctccgaactgcctgcaacctctcccgcttgcaagcgggagagggggcacagcacggctgtggtcgctagatgattcaaagctacaccttccgcccgatgaccttggccgacatgccgctgatccggcgctggctggacgcccagcatgtcgccgaatggtggcacgatccggagacgctcgaattcatcggcggcgacctcgatcaccccgacctcgcgcagttcatcgtcagccacaacgatcggcccttggcctatctgcagtgctaccagctcggcgaatggcacgtcagcttcggtccgcacccggctggcacgcgtggcctcgaccagttcatcggcgaggctgacatgctcggatgcggtcacggctccgctttcatccgcgccttcatcgaccatctcttcgcgcgcgacgtgccgcgcatcgtgatagacccgagtccgtccaatacacgcgcgattcgtgcctatgagaaagctggattcgtgccgaagcacgagatcgtcacgccggatggtcccgcgctcctgatgatccgggacccatgacgctcgccgcaagccccgccgccaggaccgcatttccgccgctcgcctgggtcggcatcgcgctgctgctgctggcgctgcaggcctcgatcctgctcttgatgggacgcgtgccgatctgcacctgcggcaccatcaagctgtggcacggcgtggtgaacagctcggagaattcgcagcacgtcgcggactggtacacattctcgcacgtcctgcatggcttcctgttctacggcctgacctggctgctgttcgtgcggctgccgttcctgcccttgtcctggcccgtccggctgatcatcgccatgctgatcgagggagcctgggagatcgtcgagaactcacctttcatcatcgagcgctatcgcgccggcacgatctcgctggattattacggcgacagcatcgtcaattcggtctcggacaatctggccatgatcctggggttccttgccgcccgcgcgctgcctgccagtgcgaccgtcctgcttggacttgccttcgagatggtgctggcgctccacattcgcgacaatctgacgctcaacatcctgatgttggtccatccgatcgaggctgtgaagcaatggcaatccgggcccccgatcatctgacccaaaatgcggcttgtcccaggccgcctcccgccctagctaagcagacatgacagacttctccccccgcgaaatcgtttccgaactcgaccgtttcatcgtcggccagggcgacgccaagcgcgccgtctcgatcgcgctgcgcaaccgctggcggcgccagcagctcaccggctcgcttcgcgaggaggtgctgccgaagaacatcctgatgatcgggccgaccggcgtcggcaagaccgagatcgcgcggcgactggccaagctcgcgaacgcaccgttcctgaaggtggaagcgaccaagttcaccgaggtcggctatgtcgggcgcgatgtcgagcagatcatccgcgatctcgtcgaggtcgcgatcgcgcaggtgcgcgagcgcaagcgcaaggacgtgcaggcgcgcgcccagcttgccgccgaggagcgcgtgctcgacgcgctggtcggcgccaacgcgagctccgccacgcgcgagtccttccgcaagaagctccgcgccggcgagctcaacgacaaggagatcgagatcgagacgcaatcgtccggcggcggcatgccgatgttcgagattccgggcatgccgggcgcgcagatgggcgccatctcgatcggcgacatcttcggcaagctcggcggccgcagcaagacacgacggctgacggtggaaagctcgcatgagatcctggtgaacgaggaatccgacaagctgctggacaccgagcagctcacgctggaggccatcagcgcggtcgagaacaacgggatcgtgttcctcgacgagatcgacaagatctgcgctcgcgacggccgcgtcggcggcgacgtctcgcgcgagggcgtgcaacgcgacctcctgccgctgatcgagggcaccacggtctcgaccaagcacggcgcggtcaagaccgaccacatcctgtttatcgcctccggcgccttccacgtcgcaaagccgtccgacctgttgccggaattgcaggggcgcctgccgatccgggtcgagctgcaggcgctgacccgcgacgacatgcgccgcatcctgaccgagcccgaggcctcgctgatcaagcaatatgtcgccttgatgcagacggaaggcgtgacgctcgacatcaccgacgccgcgatcgacgcgctcgccgacgtcgcggtcgccgtcaactccacggtcgagaacatcggggcgcggcggctgcagaccgtgatggagcgggtgctggacgagatctccttcaccgctccggaccgcagcggcgagacggtcaaggtggatgccgatttcgtgcagaggcacgtcggcgacctcgccaagaacgcggacctgagccggttcattttgtgatttggggcggtcacgctattgatgcggcgtgaccgtacccatcgtgcaaaatccgtggcggcttctgctcgcgattaacgcggcggtcatcgttggcgtcttcatccacaagatacagctgccaccttacgtcccctatatccacctcctcgttgactatcatttcggcttcatcaagcgcgcgctgatcggcgcagtggtcgcgctattcaccgacaaggtgccggtctggctggtgttcgcgctcggcggggcgacgtggctggtgacgctcgggctatatgccaagctgttccagaagaccttcggcttcaccgcaggaacgctgccgctgttcgtcttcaccgcgggctcgccgttctttttgaagaacttcatgcacaccctcggccatttcgacatctttggctgcgcgctggcgatcgtcctgctgctgatgccggcgggctcgctgctgttcgtggcgacggccgcgctgttctctatcgttctcgtcctgatccaccacattcatctcctgatgtatgtgccggcgatcgtcaccatcgtcgtgatcaggcattatctcgcctgcggctgcaatcgcaggaacgtcgcgttcggcgcgaccgcgctcgccgtcgcgtcagcactcttctttgcggcgcagttcctggggacaatgccggtccccgaagcggacttcgtcgggtatctgaaaacccggatggtcgatccgtcgcgaaccgacctgctgcagttcagctacatctggtaccagccactcgcgaaggagatcgccgacacgtggggccgcctgccgcacaacattctcggcgtgccggtgttcgccctgctgatctggctgcacacgccgctgtggcgctatcttgcgcgcctgatcggcgcgctcgcgagcgagacacaccgccgcctcgtcgtcgcggcgctgatcggcatcggcctcgcctatgtcgtgatgttcgcgatggtgttcgactattcgcgctggatctcgaactgggcggtctgcatgttcctgatcctgcatgcggtgaagatgctgccggcaaagcaggaagctgcgctgatcccggcggaggaccggaagacgagcatcttcggagtgatcatcacgctgatcccgcgcgtcggaatcatccggccgttctaggcgaggctcagtcgcaacctcggaaggtgcgctccctcccccgcgtgcgggagagggtcgggggagagggcttttatccgcgatcagaaccccgaggggagagacccctcacccgccgcgcttcgcgcgacggcctctcccgcaagcgggagaggcgagagagcccggagctaggctcattcctagatcctcgcccgccggatccgcacatacagcgcgccctcgccgccatggccgatcgcggcttgctcgaagccgacgacgaaggcgcggaattccggcaggctgagccattccggcacctgacggcgcagcacgccgctttcgccgccgctgcggcccttgccggtgatgacgagcacgaaggtcaggccatcatgatgggcgcggtggagaaagccggacaaggcgcgatgggcacgcatctgcgtcatgccgtgcagatcgagccgcgcctcgatctcgctgcggccgcgcgacagccttgtccgctcgcgcttgccgatcggcgcaagcggcgggacagacggttttggcaggcgcggcgccggggccgcggcgaccgaccgtggcgacgacgcggatcgcttggcaggcgcggtgggcggcaattcggcgcgcggcgcggcatgcgcctttgcagcgcggtgcttcttcagcggcttgacctgctttgccacgaggtcccacagctcgcgatcctcctcgctcagcgcgcggcgacgcggcgaggggcgaggctccagcgcgggcggacgggacgaccgtttcattgctgccgatgcgggcgattcttcacgggccggcgcggctctggagccgactcgatggcgggacgcggcaccggtagcgggacgggaccggcgatggcaaccgtttcgttcttgtcctgggacccggcggccgcaggcgttgccgccttggccgggagggtttgcggaaacagcttcgcaatcttctcggagggccgggggtccgggaccggcagcttcgcggcgcgcggggcaggatcgaggctcttcggcaccagcatcacgaattgcatgggatggcgcagccggccggaaatgcggccggcttccgcgccggcgccgaaaaacagatcggcgcgcgcgggcccgatgatggcggagccagtgtcctgcgcgatcatcagccggcggaacggggtcttggcgcggtcggactcgatcggcagctcgccctcgatgaagaacggcgtgccgtaaacgtgcagcgccttgtcgaccgcgatcgagcgtcccgccgtcagcggaatgccctgcgcgcccaccgcctcgtccttgtcggacaggttgacctcgcggaagaagatgtaggcgcggttggcgcggcgcagctccttggcgccgtcagggttttgcgccatccattccctgatcttctgcatcgacatctcctctttcgggatgatgccgcgctcgatcaggatgcggccgacggccgtgtagggataaccgttataggcatcgtaattgagccgaaccgagctgccgtcgtcgaacctgatccgcgccgagccctggatctgggcgaacaggagatcggtcgggtccttcagccaggcaatctccagcccgcggccggcgatcttgccgtcctcgatctcgccgcggtcgtagtacggcaccagcttgcggcggccgatcttgcgatagaccgggcccttgttgggcaggctgagcgaatcctgcttgtagccgcgcacgaacagattggatggacggcgatagaccggcacgttgtagacgtcggtctgggtgcgcgatccctccagcaccggctcgtaatagccggtgacgaaaccatccggctcgccgaggcgcgagatccgtaccggtgcgaaattctcctcgaagaaggtcttcgctttgccgtcgtcggcgaggtcgagcgttttggcagcccggcaaggctcgctgagcgagttgcccagggccttgggctcggccgcgccgttctgcgcgttgatcgggcggcagctggcgcggaaggtcttgtaggcggcgagatgattatcgtcgtcccaacccttcacgtccgtccaggccagcggcagatattgcgcgccgggaatctccaacggcaggggcagctgcggatagggcaaggcccgcggcggagcggcgggcattcgcggaagatgatggtgatggtgatggtgatggctgcgatggtggcgacgcgccgcctcggcgccgagcgaaaacgctgacagcgcgacagcacctgcgcaaagcgccgtcgcgctggtcttcagaaagatcttaattcgcgcttccggtgccaaccagcttccagttcggatcgcgagaggaggtgtcgcgggcgaaagtccagatgtcggtgatgtcggcgaccgtgtcggcgctgccgtccacgatgttgccggccttgtcgcgggtggccgagatcatctgcgaaacgaagcgcacggtgagctgggcagtgcggtcgcgcatctcggcgccgacgagctcggccttgtcgatagagacgaagcgcgtctccgtcttctgctcgttcttctcgcgttccttgatcgcggcgtcgaagctttcatagacgtccggcgacagcaggtcgcggagcgcgcggcggtcgccattggcgaaggccagcacgatcatctcataggcgccgcgggcacccgagatgaaatggcgcggatcgaagctggaatccctctcgacgatggcgtcgaggccctgtgccagcgcagtacccggctcggccagccccttccaccgatcggcgggcggggtcggctcggccgttggcgccagcggggcctgatcgatcaccttgcccggcatggtcacgacgttgttgtcctgggcaccccccagcgcattgcgggcggcggtacgatcgaacggtggccgttcgttgccggtgcgctgccccagcacgctacgcagtctcagaaagataaagactgccagcgccaggaatatgatggtgtagatgtccacgtcgtattcgctttctggtcttttcagggctcgctgccgggaaaatcaatccggccagtagaccgttccctacggaaacggcaagtccacatcaccattttggatccacgtcaggtccgtgggatgtaggcacgaaatcttgctcggccaatggcgccttttggcacagcaccaagtctagcgcgttttatgcttaaggggaaacccgatcctgagcggaaatcgcgcatcttcaaacgtttagggcacaatttcgcggaaagggcacgacgagcgtccaagttacgggcgcggccccgaccctcacatccgggaccgttcgtccttgtggaacgaggcggccctatgttagccaaccgccgcgaaattcagccccaatcgggtaaggagagactttcatgaccaacggtaacggcacccctcccgaggcggcccaggctccccagctcaatgtgctggcgcaatacactaaggacctctcattcgaaaatcccaacgcgccgagctcgctccagcagcagaaccagccgccgcagatcaatatccagatcaacgtcagcgccaacaatctcagcgaacaggagttcgaggtgacgttgtcgatcgagggcaaggccgaggccgcggccaaggtgatgttctccttcgagctcgcctatgccggcgtgttccggatcgccaacgtgccgaaggagaacctgcacccgctggtcatgatcgagtgcccgcgcctcttgttcccgtttgcacgcgagatcatcgcgaccgcggtgcgggacggcgggttcccgccgctgatgctggacccggtcgacttcgtcggtctctatcgccagaacatggagcggcaaatggccgctcagggtcaagccggtcaggcctgagcggcgaccgccgcggctggagcgggcaggtactcgttccagatcgccttgtcgccgagggttgcgatgaaggcccgatgggcttcgcgctcggcttccgtaatgcgcggcgcgagcggcaccagacgctgccgccgcggcgcatcgcccgcgctggcgacccggatctcctcgccttccgcagccagcagcagctgcgactgccgcgccccgaccagatcgacatagacttcagccagcagctcggcgtccagcagcgcaccgtgcttggtgcggtgcgaattgtcgatcgcatagcgcgagcagagatcgtcgagccggttggacacgccgggatgcttgcgccgcgccaacagcagcgtgtccaccagccgctcgcgcgggattgcggcacgcttgatgcggtcaagctcggcattgatgaaggcgatgtcgaacgaggcgttgtggatcaccagcggcgcgtcgccgatgaactccagaaactcgtcggcaatctcgtggaatagcggcttcgtcgccaggaattcggacgataatccgtgcaccgcgaaggcttccgccggcatgtcccgttcagggttgatgtagacgtggaagctctgtcccgtcggcatgcggttgaagatctcgacgcagccgatttcgaccaggcgatcgccgcggagcggatcgaggccggtggtttcggtatcgaggacgatttcgcgcatgtctttaggaagccgtgtgccgcggcgcgaatcaggctcgccgctgcggcatcttaacgacctccgccaggatgtgcgcgatctgcgcccgcaccggttcaagtccgtgtgagctatccaccacgaaatcggcgcgctttcgcttctcggcgtccggcatctgcttggcgatgatggcgtccagctttgcctcgtccatcgtcccgcgcgcgagcacccgctgacgctggagttcgggcgaggtggagaccacgacgacggcgtcgacccgcttctctccgccggtctcgaacagcagcgggatgtccagcaccacgaccggcgcgttggcggtctcggcatcggcgaagaatttctgcctggaagcacccagcatcggatgaacgatctgctcgagctgcttgatcgcggcgggatcatggacgacgcgcgccgacagtttttgtcggtcgaccttgccgttcgcggtggtgccggggaaagcggcctcgatcgcgggcgccgcctcgccctcatagagctgatggacagcggcatcggcatcgtagacggggacgccggcctctgcgaataatttcgcggtggtcgatttccccatcccgatcgagccggtcagtccgagaatccgcatcagcttccagccatctcaatcattcacaccgcaactagccgttcgcggcgcaggaacgcaagcagcgacagcagcggcaggccgagaatggtgaaatgatcgccctcgatccgttcgaacaggtggatgccgagactttcgagctgatacgccccaacactggtcgtgacggcatcgccggcagcgtcgagataagccgaaagctcggcatcggtcatctctcgcatgctcatgcgggcgaccgagacatcctcgaaaacgatcgtgccgtcacgcgcgacggccacagcggcattcagctcgtgggtctttccggcaagatcgcgcaattgcgccagcgcttgtgcgcggcccgaaggcttgttgaagagacgcgttccaagagccagcgtctgatcggcgccgatcacgtagctcccgggatgacccgccgaaaccgccttggctttctcgcccgccagcagcaggccaatctcgcgcgggttcgacagcctggacgcagcttgaatgccgcgctcgtcgatatcagccgtgatcgccttgaattcgaggccagcattgcccagcagcatcttgcgagcgctgctctgcgaggccaggatcaacggagatgtgccgcgccacagacccatcgccgacccttactcggagggccggttgcgctggcgatcactgtagagcttcatgatcgccgccgcagtctcctcgatcgagcggcgcgtgacatccagcaacggccagtcgtgcttggcactcagcttgcgcgcgaacgcgacctcctcggtaaccgactgcttgtcggtataagtgtcgctgccggaatcggcgcccatggaaagcaggcgattctgcctgatctggatcaggcgttccggcgtcgcatgcaggctgaccaccagcggtcgcgtcaatgtttccagttgcgagggtaccggaatgcctggaaccaggggcacgttggcagtgcgaatgccgcgattggcaagatagatcgatgtcggcgtcttcgaggtgcgggacacaccgaccaacaccacgtcggcctcgtcgagaccttcgacatgctgaccatcgtcatggatcatcgtgtaattcaaagcgtcgatccgcttgaaatattccgcattgaggacgtgctgggcgcccacacgaccggtggtcgcggccccgagataggcttcgaacagctgcatgaccgggccgatgatcgacaggctgggaacattgatctccttgcacttgtcctcgagcctggagaccagatccttctcgagcagcgtgaacaggacgatccccggcgcctcctcgatctcatcgagcacgcggtcgagctgcttctggctgcgcaccagcggataaacatgctcgaccggcgtcacgttggcgtactgggccgcaaccgcccgcgccacggtgatgagcgtctctcccgtggagtccgagaccagatgcagatggaaataattgttcgaggtcggcacaaaaaccctttgaatttcgttggggtggtttgtggatttctgtggagcttaacccctcgtaaaggggtgtgcgacaccaggggcgggacaacggccaattttcttcacaccgctgcccatcggaacaagttcggcgccctgccgagatggaagcgggattgcgcggacaactctcttgataagctgccgacaggcgggagcaaggtcttgagtccgaccggcttatcggaaatcgccggcgcgatccgggatatgtggatggatgtgaaaaagcacgcgtgaactcgcggatggaattgcatgagtccaatccacggtcacatagactcaaaccttaagaatctaagattctagatttgaggaaggcccttgggatggatatgtgtgcggggtgagaccttaacgagttcttactatccccagcgttctccgagctggcatcaatccgggcacagaaaatgttcgaagacgtctatctctggatcaaggcgctgcacgtgatcgcggtcatcgcctggatggccggcatgctctatctgccgcggctgttcgtctaccattgcgaggccgagatcggctcgaagcagtcggagacgttcaagatcatggagcgtcggctgctgaaggcgatcatcaaccccgcgatgatcgtcacctggcttgccgggctctatctcgcctggtccggccattggttctcgttcggctggctgcacgtaaaactggcactggtcctcgcgctgtccgcggttcacggctttttttcgcgctggctgaaggatttcgccgccgaccgtcgcccgcgaagccagaaattctatcgaataatcaatgaggtgccgactgttctgatgattttcatcgtcatcatggtgatcgtgaagccgttctaggcgacacgcgcgacgattagctcagcgcttcggcttgcggagcggggagcgattttctatattgtcgacatcccacccaacgcaggcggatgtggttgtgtccgagctttccagaggccggacaccgcatcaggtttgaagcctcaccggcgctcaccttgccagacctgcggaccttacctgcacctgctcgcgtccgcatttcagagcctcctcgcacccccctcttttcaggttaccacacaggaccaccccaatgcgggaaattaaacttcaggacctcaagtcgaagaccccggctgagcttgtctcgttcgcggaagagaatggggtcgagaacgccagcaccatgcgcaagcaggagctgctgttcgccatcctcaagcagctttcgctggccgagaccgatatcgtcggcgagggcgtcgtcgaggttctctccgacggtttcggcttcctccgctcgcccgacgcgaattatctgcccggcccggacgacatctacgtttcgccctcgcagatccgccgcttcggcctgcgcaccggcgacaccatcgaaggccatatccgcagcccgaaagagggcgagcgctatttcgcgctgctgaaggtcaacacgctcaacttcgaggacccggaaaaggccaagcacaaggtcaatttcgacaacctcacgccgctgtttccgaatcagcgttttcgcatggagatcgatgatcccacgaggaaagacctgtctgcccgcgtgatcgacatcgtcgcaccgatcggcaagggccagcgcgctctgatcgtggcgccgccgcgcaccggcaagaccgtgctgatgcagaacatcgcgcattcgatcacgcataaccatcccgagtgctatctgatcgtgctgctgatcgacgagcgtccggaagaagtcacggacatgcagcgctcggtgaagggcgaggtcgtgtcctcgaccttcgatgagccggcggtgcgtcacgtccaggtcgccgagatggtgatcgaaaaagcaaaacgcctggtcgagcatggccgcgacgtcgtgatcctgctcgattcgatcacgcgcctcggccgtgcctacaacaccgtggtgccgtcgtcgggcaaggtgctgaccggcggtgtcgatgccaacgcgctgcagcgcccgaagcgcttcttcggtgccgcccgtaacatcgaggagggcggctcgctgaccatcatcgcgaccgcgctggttgataccggcagccgcatggacgaagtcatcttcgaagagttcaagggcaccggcaactcggaactgatcctggaccgcaaggtctcggacaagcgcaccttcccggcgatcgatatctcgcgctccggcacccgcaaggaggaactcatcaccgatccgcaggtgctcaagaagatgtacgttctccgccgcatcctcaatccgatgggcacgatggacgcgatcgacttcctgctcgacaagctgcgctcgaccaagagcaattcggagttcttcgattccatgaacacctgagtgcagtgcagcatatccgagggcgcctccgaacgccctttttgctgcgcgctctgctgcagcaatcatgcagcacgaaggacggggtaagtaggtctggttatgttgcactgcaataaatgcatgctgcggcaactgctctggatgatctcaggtcggagatttgccttttcatcgagaggcggacaaataggccatgcatccgcgtgaccagacgatctttgcgctctcatccgggcgggcgcccagcgcgatcgcggtggtacgcgtctcgggcgcacaagctggctcggtgttgacgacgcttgctggcaacccgccgccgccgcgacaggcgagccggaggttgcttcggggcggttcgggccagccgatcgacgatgccgtcgtgctctggtttccgggaccggcaagtgcgaccggcgaggatgtcgccgaatttcatgttcatggcggacgcgcggtgctcgcggcgctcctcggcgagatttgcaaaattccgaatacgagggcggctgagcctggagagttcacgcggcgcgccttcgagaacggaaagctcgatctgaccgaggccgagggcctcgatgacctcatccatgccgacaccgatcgccagcgccgccaggcgctgcgccagctgcagggcctcctcggcaatcgcgcgcgtgactggcgcgagcgcatcatcgaggcctcggcgctgatcgaggcgggcatcgatttttccgatgagggcgatgtgcccgccgagttgagggccccggcggtcaaggcgatcaaggcgctgcatgacgaaatcgcagaagtgcttgcggcgcagggacattctgaacgcttgcgcgaaggccttgtggttgccatcgccggcgagccgaatgtcggcaagtcgacgctgatcaaccagctcgcgcgtcgtgaggttgcgatcgtctcgccgtatgccggcacgacgcgcgacgtcatcgaggtgcagctcgacctcgacggctatcccgtcacggtgatcgataccgccggcatccgcgagaccgatgatcccgtcgagcaggaaggtgtgcgccgggcgcgggcgcgggccgcggacgccgatctcgtgctgtggctggtggagggggggcgagcgggcgatccggacgcgatgcgcccgcttcggagatccggcgccgatgatccgtcgtccggcggcgcggtctggatcgtccgcaacaagatcgatctcggcaggaaccaaggcgccatcgcaccgggtgagttcgctatctccgccagtcgaggcgacggcatcgccgagctggtcgaagccctcgtgaaattcgccgccagattcttcggaatgagcgagggcgcattggtcacccgggcgcgtcagcgcgatcttctgcagcaggcgctagacagcttgcaccgcagtctggaccttgtagaacacggcgaggagctcgcggccgaagagctgcgggccgccgcctttgccttgggccggctcttgggccgggtggatgtcgaagacgtccttggcgccatcttccagaagttctgtatcggaaagtagcgctaggtcttcactctagattagcccttgttccatttcttgtgtttcacgtgaaacgtgggggtttcgtttcacgtgctaggtggaacgccgtcatcttgccaaccggggcggctctgtttcacgtgaaacacgaggatgtggtctgcaatcgacttgaggagatcgactggcctaggtggcatcggcagcgctccattcactcctcgatgctcgtcattgcgcgcagcctttgcgagaaagcagtccagcttctcggtgcggaggatcggaggatccggattgcttcgctgcgctcgcaatgacgccctctttcgtttcacgtgaaacaccgggtttcccgaggctccctctactgtgcatggggttgttttcgcgaaaacatccgccacccgcgtggctcgtgtttcacgtgaaacagccgcttccagtttccgcttcccgcttttccgcccctgagctagaagtcccctatgcgaacagagcgagcaagtttcgacgtcatcgtgattggcggcggccacgccggctgtgaagctgcggccgcttcggcccggatgggcgccttgaccgctctggtaacgcatcgtttctccaccgttggcgcaatgtcctgcaatccggccatcggcggcttgggcaaggggcatctggtccgcgaagttgatgcgctcgatggtctgatgggccgtgtcggtgacgccggcggcatccagttcagggtgctcaaccgccggaagggtccggccgtccgcggtccccgggcccaggcggacagaaagctttatgcggctgccatgcaagccgccatcttggagaccgagggtctttccgtcattgagggggaagccgacgagctgattacggccgacggccgggtgaccggactgcgcctggctgatggccgcgagctccgggcaggggccgtcgtagtcaccacagggaccttcctccgcggtctgatccatctgggagaaaagaactggcccgcaggtcgggttggcgaggcgccggcgatgggtctttccggctcctttgagcgcgccggctttacactcggacgcctcaagaccgggacgccgccgcgcctcgacggcaccacgatcgactggtctgcagtcgagatgcagcccggagacgatccgccagagccgttctcggtgatgaccgaacggatcacgactccgcaaatccagtgtggcatcacccggaccacagccgtcacccacgaggtgatccgggccaatgtgcatcgatccccgatgtattccgggcagatcaagagctccggtccgcgctattgtccttcgatcgaggacaagatcgtccgctttggcgatcgggatggccatcagatcttcctggagccggaagggctcgacgacagcacggtctatcccaacggcatctcgacatcgcttcccgaggaagttcagctcgcgatcctcgccagcattcccggtctggagcgggtgaagatggtccgcccgggctatgccatcgagtacgaccacatcgatccccgcgagctcgatccgaccctgcagaccaagcggctgcgcggcctgttcctggccgggcagatcaatggcaccaccgggtacgaggaggccgccgggcagggcatcgtggccggcctgaatgcggccttgtccgccagtggggccgcactgacggtgttcgaccgggctgacggctatcttggcgtgatgatcgatgacctcgtcacccgcgggatcagtgagccctatcggatgttcacctccagggccgagtatcgtttgacgctacgggccgacaatgcggaccagcgtctgacagagaagggcatcgccttgggatgtgtcggcagggctcgaacccggcaccaccgcaccaagatggacgccctgaatgcggcccgagcactgtcgaagtctctgaccatcaccccgaacgaggcgatcaagcacggcctttcactcaatcgggacggccaacgccgctccgccttcgagctgatggcgtatcccgagatcggctggagccaagtccgcgcgatctggccggagctggccgcggttgatccggttatcgccacgcatctcgagatcgacgccaagtacgacgtctatctggagcgccagagtgccgacgttgaggccttccggcgcgacgaggggttggttctgtcggaggtcgattaccagatggtccccggtctctccaacgaggtccgtgggaagctggagaaggcgcgcccgttcacggtcggccaagctggccggatcgatggtatgacgccggcggcgctcggtatccttgcggcgtatctccgccgtgaagctcggaagaattccaaggcaatcgcataggcgtttcacgtgaaacagcgcggaccgggtggggaacgaccgctctcgcggcggccaacggcaggcgagggcgccggtgggcacgctgagccaggaccgcccagaccgaagatcgagaaggccagcgccaacgatcgatcgctcgacgcgatcatcgcggccgacaaggtcgccgcgctcaagctcgcgcctgtttcacatgaaacagaggtccgcctcgatcgctacatcgcgctgctccgcgagtggcaatccaagaccaatctgatcgcgccttcgacactgccaaacctctggacacggcacatcgccgactcccttcagctcgtcgatctcgcgccgaccgcaagacgctgggccgacctcggcagcggcggcggttttccaggcgtggtcctagcctgtgtgatggcgggcaagccgggcgcgagcgtccacctcgtcgagcgaatcgcgaagaaggctgcctttttgcgcgaagcgatccgcgtcaccacatctccgggagtcgtacatctcgctgagatcggggataatgtggatagaatcaccggccccgtcgattgcgtcaccgcgcgtgcactggctccgctacatcaactcatcggctttgcggagcccctcatgcgcaaaggcgcaaaggcattgtttccgaaaggtcaagatgtagaggctgaattgaccgaagccactaaatattggagtatccagcccaagctgcatccaagccgaactggggacgggtggatcgtggagctgacgtccgccgaacggcaaggctgaggcgttcaggggtgagtggggaattgcgatgagcgtgattgacgaaccaggccaagaacagtcggcccaggacaaggcagcggaggtcccgcacggccacccgcgcatccttgcgctggcgaatcaaaagggcggcgtgggaaagacaaccacagcgatcaatcttggcacggcgctcgctgcaatcggcgagcgcgtcctgatcgtcgacctcgatccccagggcaacgcctcgaccgggctcggcatcgaccgccgcaaccgctccctctcgacctatgacgtgctggtcggcgaagccgccttgcgcgaagcggtggtctcgaccgcggtgccgcggctgcacatcgcgccttcgaccatggacctctccggcctcgagctcgagcttggcaccacacccggccgcgccttcaagctgcgcgatgcgatcggcgcgctgaacaacaacgtctcgccggacgccgactacacctatgttctgatcgactgcccgccttcgctcaacctgctcaccgtcaacgcgatggctgcgtcggatgcgatcctggtgccgctgcaatgcgagttcttcgcgctcgaaggtctgtcgcaactcttgcagaccgttgagcaggtgcgctcgacgctcaacccgaacctgtcgatccacggcatcgtgctgaccatgttcgactcgcgcaacaacctctcgaaccaggtcgtcgccgatgtgcgccagttcatgggcgagaaggtctacaagaccatgatcccgcgcaacgtgcgcatctcggaggcgccgtcctacggcaagccggtgctggtctacgatctcaaatgcgtcggcagcgaagcttacctgcggcttgcgaccgaggtgatccagcgcgagcgcgagctgcgaacgacgcattgaatccagacgtgtcattccggacaatttgcggcacgcgaactgagccggagtcccgagatttggaattgagcaacgccgggagtccgggttcgcacttcgcgcactccggaacgacgggaccagagtagcaggagcgttcgagttgaatccaagggagctggcgatggccgacgaagcgcgttcgcgactgggccgaggtcttgcgagtctgatcggtgatgtcggcggcgaggctcagcatgtcgatcgtccgcgcgcgcagcgcaaggtgccgatcgaattcatcaagcccaacccgcgcaatccgcgccgtaccttttcggacaccgagctgaaggagctcagcgattcgatcaagcagcacggcgtgatccagccgatcgtggtgcgcccggtgaagggcgtgcatgaccgctacgagatcatcgccggcgagcggcgctggcgcgcctcgcagatggccggtctccatgaggtgccgatcgtccccgtcgatatcagcgacagcgatgcgctggagttcgcaatcatcgagaacgtgcagcgcgaggatctcaacccaatggaggaggcgcagggctatcacgcactcgccaacgagttcaaacgcagccaggaggacatcgccaaggtcgtcggcaagagccgcagccacgtcgccaacatgatgcggctgacgaagctgccggccgaggtgcaggccttcatcgcaaccggcgagctgaccgcgggtcacgcccgtgcgctgatcggcgtgccggatccgctcgcggccgccaagcgcatcgtcgaagagggcctcaacgttcgccaggccgaggcgctggcgcatgaagagggtgtgcccgagcgcaagccgcagaaggcgcgcgccagcggtggcaaggaaaaggatcctgacacgatcgatctggagaagcgcgtcagcgacgcgctcgggctcaaggtcaccgtcaaccaccgcgatcccggcggctccgtgcagatcaactaccgcaacctcgatcagctcgacgaggtgatgaagcggctggccaagggcgcgctgtagcctgggtcgtcgttccgggccggcgatgcgagtcccggaatatcgcacggcgtagtcacgtctttccctcgtcctgggggagccgcggagcggcgtctcgaggcgagggaaagagacgggcctgcatccttcgagacgcgcgcaagagcgcgctgctcgggaagaggggccacggcagtcaccgtgacgcggcattctctcaacacgtcattgcgaggagcgtcagcgacgaagcaatccagaatccttccgcggagggagtctggattgcttcgcggagcctgtcatcgggccgcgcttcgcgcggacccgttggctcgcaatgacgtggagagagttgcgtccgcaatgacgtggcgcgagagcggcgcctagccccggcgctttgcattcgcggcgatcgccatcagcgcgcgttgggcgatggcggcggcgagcgtggattgcctgcgggtatcgagcgcagcggttgcgagctgctcgatgatggcggcaagccgggctggggtgaaattgcgcagcgcggtttcgaccgcgggctttcgcgaaaaatgcaggcgcgggaagccgccgtcgagcacggcggacgcaggcgtaccgtcggcgatcgcgagcgcagacttgtgcagccacgcggcctggcgttgtgcggccgagatgatcacgccgggataggtgccggcgatcatggcctttgcgaactcgctttcgacgatgtcgggccttccggcaaaggcgccgtcgacgatcgggtcgagcttcagctcggaggcgtcggcgaccacggccatcacgtcctccagcgtcacctcgcccttgccgtgggcgtagagcgtcagcttgcgcaactcgttgcgcgaggcctggcggtcgccgccgaggaacgacatcagcgccgcgcgggcatcctgcgcgatgcgcaaattggcgatgcggagttcgtcctccatcagcctcgcaagatcgcgctcggtgtcgggatagcagccgatcgccacggcggtcttggccttctcgcaggtcttgcgcagtggcgattcgggacggagctcgccggcctcgatcacgatgcggcaatccctcacgctcatctcggccagcgtctcgattccgctggcaaagctgcgcgaaccggcgcgaacgcggatggcgcggcggccgccgaacagcggcaccgtcatggcctcgtcgacgaggcgagagggttcggccgagagctcgtcgccatcgagcttgaccagcgaaaacggatcgttgggatcgtccacggccgaggcgatcagcgcatcggcgcgctcgcgcacgaggccggcatcgggtccgtacagcaggatgatggggcggcccgcatcgggacgggcgaggaaagcgtcgatctcttttccgcgcaatgcgaccatggtccagatcgtcattccggggcgcgcgcagcgcgagcccnnnnnnnnnnatgacctacgtgcccgcggtgaagaacgaggcgaggcgggtcgtgatgttctcggcaatctcgttggcggcgcgatcttcggcatcgcgcacggcgcgggtgcgcgagaagcgctgataagatcccggcatgtcgtaggacacgcgcgagaaggtcgagccggacatgacggacttgccggtcacgacttcgaccaggttgtactgggcgtcgatgccgagattctcgctggtcggcagtcccgtcgtggcgctgacgatcagcgaggagcgggtggtggtgaagcggatgtccagccggtgggtcggcggcatgccggtcgccgtgccgtaaagcttgaaggccagcgcgttgcggatctcgacgccgacgcgggcttcgcgggacgcgttgggcttgttgatggggggcagctcgacccccatcagcttctcgcgcaggccgggggtcccgtcgttccgctcggcgtacatcggctggaagcagccggccgtcagcgccgccagggcggcgaccgccagcaagcgggctgcgatgcggatcctagccgacaacattcacgatcctcttggggacgatgatcaccttgcggacgggcttgccgtccagggccagctttaccgcatcgagggccaaaacggcagcctcgatttccggattctgggccagtgttgcaactgtgacctcaccccgcttcttgccgttgacctggaccaccagggtcacgctgtcttcaaccagcagatcgcgttcgattttgggccaattggcctccgaaaccagccccttctggccgagaacctgccagcactcctcggccagatgcggcatcatcggggagaacagctggaccaggatctggctggcttcaccgatcgcccaggcgaggtccggggcgggctggccggggcgctgcagcacctcggagaatgcattggtgaattcgcggatatgggcgaggcagacgttgaagtgcagccgctcgatcccggtggtgaccttgtcgagcgcaccatgggcggccttgcgcaaggcggtggcgtccggaccgaagctggccggccgggccgccggcgcggccttggcgagcgcgacgcaatcgttcaccaggcgccacagccgctgcacgaagcgcgaggcgccctggacgcgctcgtcgctccagatcacgtcgcggtcgggcggtgagtccgacagcatgaaccagcgggcgacgtcggcgccgtaggtctcgatgatgtcgtcggggtcgacggtattcttcttcgacttcgacatcttctcgatcggaccgatctggatgtcttcgccggtggccagcagcgtcgcgcggcgcccgttgccgccaacctcgaccttgacctcggccggctgcacataggagccgtcggccttctggtaggtctcgtgcaccaccatgccttgcgtgaacatgccggcgaacggctcgtcgagcgcgatgtgcccggtcgccttcatcgcgcgggtgaagaagcggctgtagagcagatgcaggatcgcgtgctcgacgccgccgatatactggtcgaccggcagcatccggttggccaccgcgggcgtcgtcggcgcattctcgttccagggatcggtgaagcgggcgaagtaccaggacgaatccacgaaggtgtccatggtgtcggtctcgcgctgcgccttgccgccgcatttgaggcaggtgacgtgcttccaggtcggatggtggtcgagcgcgttgccgggcttgtcgaaggtcgcatcgtcgggcagcttcaccggcaggtcggcatcaggcaccggcaccacgtcgcatttcggacagtggatgacgggaatcgggcagccccaatagcgctggcgcgaaatgccccagtcgcgcaggcggaaattgacctgccgctcgcccaccggcgcattgccgcgcagctccgtctcgagacgcctcgccacctcttccttggcctgctcgatggtcatgccgtcgaggaagcgcgaattgatcatgcggccgtcaccgtcataggcggtgtcggtgatgacgaaggacttgggatcctggccttcagggcacacgacaggcgtgttgccgaggtcgtacttgttgacgaagtcgaggtcgcgctggtcgtgcgccgggcagccgaagatggcgccggtgccgtattccatcagcacgaaattggcgacatagaccggcagcttccagctgggatcgaacgggtgcaccgcgcggatgccggtgtcgaaaccctgcttctccgcggtatcgatgatctcctgcgcggtgccgatcttcttgatctccgcgatgaactcggcaagctcggggttcttcgcggctgcggcctgcgccagcggatgatcggccgagatcgccatgaacttcgcaccgaacagcgtgtcggggcgcgtggtgaagatcttcagctcgctctcgcctgccggcgtcgtcgctgcatcgagcgcgaaacggatcagcaggccctcggagcggccgatccagttgcgctgcatcagccgcaccttgtcgggccagcggtccagcccgtccagcgcgctcaagagctcctgcgagtacttcgtgatcttgaagacccactggttcatctcgcgctgctcgaccacggcgcccgaacgccagccccggccgtcgatcacctgctcgttggcgagcacggtcatgtcgacggggtcccagttcaccttgcgcttctcgcgctcggcaagccccgcgcgcaggaagtccagaaacatcttctgctggtgcttgtagtaggagggatcgcaggtcgcgatctccctggaccagtccagcgacagcccgatggagcggagctgcttcttcatcgcggcgatgttgtcgtaggtccatgccttgggcgccaccttgcgctcgatcgcggcattctccgccggcaggccgaaggcatcccaacccatcggatgcagcacgttgaagcccttggcgcgcatgaagcgggcgagcacgtcgcccagcgtgtaattccggacgtgaccgatatggatgcgcccggagggataggggaacatctcaagcacgtaatatttcggccgcggatcatcgttcttggagacgaagatcttctgctcgtcccagaggcgttgccagcgcggttcggcgtcgcgggcgttatagcgttcggaggtcatggaatcgttgggcttttcgtgggttcggccggcttaagacggcggactaggccatagaaggccttaaggggtcaatgggttgccgcattctggaactttggccgggtctccgcataactacgagggcccgcgttggcgtgtgattaaggggtcgatgccaatttgcggctcgacaagaccgcgataccgcaaatgtattccagcttcgacgatcccgattacgactatgccgcgtccatcgctggacgtgcgatgcggagcatggctgaacagcggattgcgccgacgccggccaattttgccgtctggttccagtatttcgcaggcggtcatgacgatttgcgcaacgccattgatctcctgatcgatcacaatcggcccttcgacgcccgaaccaacaaggatctgttcgagacctacgtcgcgaaccaggtgagcgccgcggtggtcgacacctcggagcggctccaggcgctcatgggggccgcgaaggagtttctggcgactgcgattgccgacaatcattcgcagatgcaggccatcagtgaggtggcggatcagggcagggccggcgtcgatccaaaactgctggtggcccagctcatgaacgagctggcgcgggccgccacacgcgcgacccggctcgaggcgggctttgcggagaagacgcgcgagctcgacgtgatccgcgactcactgtcgaggtccgagcagcgcgcccggactgacatgctgaccgggctggcgaaccggagggcactcgacgaattcctgcgcaaggcgcaggcgaccgctgaatggggcgagccgctctgcgtcctgatgctggacatcgaccacttcaagtccttcaacgacaatttcggccacggcgtcggcgaccaggtgctgcgcctgatggccaaggtgctgcgcgagaaggttcgcgagcaggatctgccggcccgctatggcggcgaggagctgatcgcggtgctgccggacgccgatctcgcggcttgtgccgagatcgccgaacgcatcaggcgcgcgatcgccgaagccacgatcacgcgtcgctcgaccggcgagatcctgcccagcatcagcgtgtccatcggcgcggcgcaataccgcgtcggcgaggcgatcagcgatctgatcgagcgttgcgatcgcgcgctctatctcgccaagagcagcgggcgcaaccgtgtggtgacggagatcgaggtcgagcgcgcgggagctgccggctaggcgctggccgcaaatatcacctcggtcgtgccagtctcgatcgcctgcacaccgtgctccacgacgttgttgcgaccgcggtgcttggcggcatagagcgcggcgtcggcggcttcgatcagatcgcctggccgcaagctctcattgggcttcgtcgcggcgacgccgatcgagaccgtgacgatcatgtggttcgaggtgatgtgcgggaggcagagtttcagcacggccgcgcgcacctgttcgccgatttcgacggcacgcatgacgtccgtgttcggcagcagcaggcagaattcctcgccgccatagcgtgccgcgaagcccatcgtgtcagcggcaatgccggacagtgattcgccgagcctggtcaggcaggaatcgccttcgagatggccataggtgtcgttgaacagcttgaagtgatcgacgtcgatcatcagcaacgcaagctcgctgccatattgctgcgcacgcatccattcgaagtcgagccggctctggaagccgcggcgattggcgaggccggagagcatgtcgatcgaggccatcacggtcaggcgatcgttgcttgcgatcagctcgcgttcgcgctggctcagctgcgcggccatcgcgttgaacgcgcgcgccagcggcacgaattcggccggcagtctgttgcgggccgcgcgcgccgacaggtcgccctcgccgagacgtttggccatgtcgacgagcatctcgatcggcttgatgacgagtttctccgccgcgatcagcgcgccgagcaggacgaacaccacgacgaaagcgaactgcagataggcggtacggatgtcgcggctgacggcagcggacaccttgtcctcgtcgatgctggtgatcaggcgagcattggtccccgcaatgcggatgtagctgactgcccggcgagagccatcggcagcgaggaaagacagcgagccctcgtcttgatcggaccgaagcgccttgtcggcgatcgcggacatcagcggcatgttgtcgaggggccggccgaccgcgctgcgctgatcggccggggcggccagcacggtgcccgcgctgtcgaccagcacggcggtgatgccggggcggccgcccagattgctcatgaccttcgacatccagtcgaggttgacggtggcgagcacgacggcatcggggacgccgctgaaggcggagactggataaaccgccatcaccgtcggcgacagcaccggtcgcgacatgatgaagtcgctcagtatgaagcggccggtttgctgtgcctgctggaagtacggccggtcactcagatcgaggccgacatacatgttgttggtggcgcattggatgcgaccgtcctggccggcgatcagaagcgtgcgtatccacgggaggctcgacggcaggctcgcgcgcagcacgtcgcagctcttgctgatgccgccgacggaggcgcggatgaaagcctccgatttcaggatggtctcgacggacgagatcacctcgcgttgcgcatcggcgctatgcctcgccaccgtggtgaactcagccgcggcctgcgcgatctggcgcgtacgcgtgtcctcgagcgaacggatgcggtcgaacatcaaaggcgccacgagaatcaccgcgagcaacgcaagccgcgcccggattccgagaacctgcttgagtttcgctcgcttgcggttgagactgacgctggccatcttcgctacccaccccgtggcccaaggtaaagcgaagggttcaaaaactgtttcttgaactcggtaaaattggacttaactcggttgggagcacagccaagagacgtcatgacggaagccaacaccgcgccggtaaccggccattcaccaaacgcgcttgccgcggtcgaagccgaaatcgcgcgcgcctgcaaggacgcggggcgcgaccgcgcatccgtgacgctgattgcggtttccaagacgttcgtcgcggatgcgattaccccggtcatcgccgccggacagcgcgtattcggcgagaatcgggtgcaagaggccaaaggcaagtggccggcgctgacgtctgtttaccccgatatcgtgctgcatctgatcgggccgctgcaatccaacaaggcgaaagaggcggtcgcgctgttcgacgcgatccattcggtcgatcgtccgagcatttgccaagcgttagccaaggaaatcgaatcccagaacaagcacccgcaactcttcgtccagatcaataccggcgaggagctgcagaaggccggcgtcgcacccgacgaagccgatgcattcctcgcgagttgccgggacacctacgggctgacaatctccggcctgatgtgcatccccccggtggatgagccgccggccgggcactttgctctcaccgccaagattgccgcacgcaatggattgaagaatctctcgatgggcatgagcgcggacttcgccaccgccatcatgttgggtgccacccatgtgcgggtgggaagcgcgatcttcgggcaccggtgagagccgttagcgaggaacgcgctggcaaccgccatcgatgacgcggagtgagccgcctacacgaaccccaccgacacctttcccagcacgccgaaatccgcggcgaaatgatcgccgccctggatcggcagcggcgggtggcatgtgcccgtcgtcaccacctcccctgcccgcaaggtgatgccgagcccgcgcagctcgttggcaagccaggcaagcgcaatgcggggatcgccgagcacgttcctgccgtggccgatatggcgctcgccgcgcagtgcgatctgcggccgttccgcaacgagatccatcgcccgccagttcgcaatggtcggcgcgcccagcacgaacagatgcgcgcaggcgttgtcggcgatgagctgcgcctcgcccgcgctgacgaaatcggcaaagcgcgaatcgggaatctcgatcgcgggatgcagggtctcgacggcggcgagcacctcgtcggcgctgtagggcgtcgcgcgcggcggcagatcgcgccccatgcggaaggcgaattcaggttcaccgacgcgcatctcgttgcccttcatcgatgcggtcccgccgtcggcgatcacggtgtcgctcatgatgcgcccagccagcggccccgtgacgttgatgtgcttctggccggcctcgctcgtggctgcgatcttccagccgaacaatgtcccgctcgatcgtcgttcgagcgcggcctggatggcgtagccttcagcgcgactctgcggccgcaaccgcgtctccagcgcgtcgagcttggtgccgtcgcgccaatgcctgaccaggagctctgaagcggcgtcgatctgatccttgtcgagcatgcaccctcacccgatgatgattctcgttcgcgggcccaagcgccgcagcaattgcaacatcgcagatttcgtcatggagacgcagcccgcggtcgggccgaaattatcgcgcgccaggtgcaggaacaccgcgctgccccggccggcgacgcgcggccgggtgttgtggtcgatctcgacgataaagtcgtagagatggtcggcccgcttgagccggtcaccgccctgtccctcgccgagccggatgctctggttgtagtgacggtcgcctggatcctcgcaccaggcatccgccgctgtgatcatccgggtcggcaggaatgtctgggggcggctgtgccggtcgccccgccaccacagccgcctgggacggaagctgcctctcggggtgccgccatcgccctcgcgcttgttggcgagaataccgccccgccccagcgcaaccgggatggtcaacgctccggccgtcagccagccccggcgcggattacctgcagcaggcctaacacggatcgcagagagcggcccagcgctgcgagtctcgttgtaaccgactgaaactgctttatttttcatgtgaacgtgcaatgtcgaattcattacaggacattcatcaaaacggcctgctattctgagttagagtagttctggcttgtgaatcggtaacagcccactacttcaacacgaacaacaaaaataacggcgacccctaaacttcccctcgcggctgggcgcggcatggatgcgcgccgagccggactccaaaaggatgacttcccatgcccaacgcccgcaagatcctgatcgtggatgacgataccgatctgcgcgacacgctggtggagcaattatcgctgcacgaagaattcgaagcctccgccgtggataccggcgcgaagggcgcgagcgccgcgaaggcgaattctcccgatctcgtcctgatggacgtcggcctgcccgacaccgatggccgcgaagtggtccgctccctgcgcaagggcggcttcaaggccccgatcatcatgctgaccgggcacgacaccgattccgatacgatcttggggctggaatccggcgccaacgactatgtggccaagcccttccgcttcgcggttctgttggcccgcatccgcgcgcagctccgccagcacgaagccagcgaggacgcggtgttctcggtcggcccctactccttccgtcccggctccaagatgctgaccgcggccaatgcgcgcaaggtccggctcaccgagaaggagaccgcgattctccgcttcctctaccgcgccggccagatgccggtgtcgcgtgagaccctgctccaggaggtctggggctataattccggcgtcaccacccacacgctggaaacccacatctaccgtctgcgccagaagatcgagaaggacgcggccaacccggaaatcctggtcaccgaagccggtggatacaagctggtgccgtgatacgttccggaaacgcgcgattcgtcgtaaattggcgcgttcctcgagccacggaccggaatgtcaatcgacgacgacgtagcgcttctcgagcgtgtcccgacactgcgcctgttgggggacgcctcgttgcgcatgctggcgatcggctccgagcagcgcgacttcgtccgcggtgacgtcctcttcaatctcggcgatgacgccgatgccggcttcgtggtccagcgcggcgccttcagggtcgaagacggtgccggtgccgaaatgatcgccgggcccggcgcactgatcggcgagctcgcgctggtggtgccgatgaagcggccatcgagcgcaatcgcgctggagcacgcctccgtcatccgcatcgcacgcagcctgttccagcgcgtgctcgaaagcgaccctgccgctgcggttcgccttcgcgacgagttcgcggtgcgttcgagtcaaatcgcgagtgatatcctcatggccggtgcgaagctgacgtcctgagtgtctctgttgtcattccgggctcgcgctgcgcgcgccccggaatgacaggtgacggtcatagatcgagcgtcaccgtgaccgggacatggtccgacggccgatcccagctccgcgcatcacgcagaattctaaaatcctgcaccgagtccttcagcgcccgcgagacccagatgtggtcgagccggcggccgcggtcgccgacggtccagtcgggggagcggtagctcccccacttatagaccttctccgacatcgggatgcgctcccgcgcgacgtcgacccattcgcccgcctcgagtgccgccttcagcttctcggtttcgacaggcgtgtgcgagacgaccttcagaagctgcttgtgcgaccagacgtcgttctcgtgcggggcaacgttgaggtcgccgaccaggatgtgacggtcctcgccgcgcggatgcagcggctcgcacgccttcatctcgtcgaggaaacgaagcttgtgatcgaacttctcgttcagcgcgggatcgggaatgtcgccgccggcgggcacgtagaaattatgcagcaccagcggctttgcgatgccggccttctcgccgaacgacaccgagatgtgacgcgaatcaaccttgtcgcagaaggtgcggatgtccttcgtctcgaacgggatcttcgagacgatggcaacgccgtgatagcccttctgcccgttcagcgccacgtgctcatagccgagccgcttgaatcgcttcagcggaaaggcgtcatcgatgcacttggtctcctgcaggcacagcacctccggccgcgcgctcttcaagaacttcgcgaccaggtcgatgcgcagccgcaccgaattgatgttccaggtggtcagggaaagtcgcatggcgacggtctaacaaactccatcagtcatggccgggcttcacccggccatccacgcctttttataaggcccaagacgtggatgcccgggcaagcccgggcatgacgaccgtcgcagacgccataagccatcaacccggcgatggtccgtaattggtgaaatcgatcttgaacatgccggggtcgagcttcttgctcgagtccagattgtagaccgcgatcgtggtgtcgtagccctgcgggtcggtgacggtccactgcttgagctggccgtccttggcgccgaacatcaggagcagccggctggtgccgaccagcgcctgcttctcctcgatggtgacgctgacatagacgtcgtcggccgagacgttgacgacgttggtgtccttcatcaggtcgatacggtcggacagcaggaagcgcagcggcgtctgcgacagcggatagacgtcctgggtcgcgagcttgcggtcgcgcaccacgagcgaggatccgtccgcgacgatgtcgatcgggctcggcgcgtcatattcgaagcgcaccttgccgggcttctggatgtagaattctccctgcgtcttgctgccgtcggggccgacctggacgaaattcccgaccagcgtctgaagcgacgacagataggcgctgaccttggcggcctgcgccttctgattggcgtcgaaggtctggaagatgctgctcggcacgttgcgacgcggatcggggatgaccgggttcggcggcgtttgcatcgcgccggtgacggttggcccaccgccggctggagcaccttcgcggcctttcggtgcgggcttcggcaccggcacggtttgcgcgaacgatgcaccggtcaccatcgcggcggtgacgagaagcacgccggccacgcgcgcgcttcgcgcagcgatgaaggcagcgtatcgaatgtccggatgtctgatcaacgcctcgtcctgtattgctgggcgcccttttagcgtgatttcgggcaaaagcagatatcgattctgcgtgaaatgatgttcagaggcgcctcgcctcacatatggctgtcttcttcctcgaccaggatctcgcgcttgccggcgtggttggcgggaccgacgatgccctccagttccatgcgctccatcagcgatgcggcgcggttgtagccgatctgcaggcggcgctggatgtagctggtcgaagccttgcgatcgcgcttgacgatggcaaccgcctgctggaacagatcgccgccgccatcgccgcccatgccggtggcgtcgaacacggcgccatcctcgtcctcggtgggctcttcggccgtaaccgcctcgagatattccggctgtccctgcgtcttgagatgacgcaccaccttctcgacttcctcgtcagaggcaaacggtccgtgcacgcggctgatgcggccaccgcccgccatgtagagcatgtcgccctgaccgagcagctgctcggcgcccatctcgccgaggatggtgcggctgtcgatcttggaggtgacctggaaggcgatgcgggtcgggaagttcgccttgatggtgccggtgatgacgtcgaccgacgggcgctgcgtggcgaggatgacgtgcaggccggcggcgcgcgccatctgcgccagacgctgcaccgcgccttcgatgtccttgccggcgaccatcatcaggtcggccatctcgtcgacgatgatgacgatatagggcagcgggtcgagcgagagcttctcttcctcgtagatcgccttgccggtttccttgtcgaagccggtatgcaccgtgcgtgtcggctcctcgcccttggccttcaattcgagcaggcgcgtgttgtagccgtcgatgttgcggacgccgagcttggccatgttcttgtaacgctcttccatctcgcgcacggcccatttcagcgcgacaaccgccttcttcggatcggtcacgacgggcgtgagcagatggggaatgccgtcatagacggagagctcgagcatcttcggatcgaccatgatcagccggcactggtccggacgcagccggtagaccaggctgaggatcatggtgttgatggcaaccgacttgcccgagccggtggtgccggcgatcagcatgtgcggcgtgcgcgcgaggtcgatgatgacggggtcgccgccgatggtcttgccgaggcacagcggcagctttgccaccgtgtcggtcgcctcctttgcgacgagcaattcgcgcagatagaccttctcgcgatgcgcgttcggcagctcgatgccgatcgcgttgcggccgggcacgacggcgacgcgcgcggacagcgcgctcatcgagcgggcgatgtcgtcggcaagcccgatcacgcgcgaggacttgatgccgggcgccggctccagttcgtacagcgtgaccacggggcccggattggccttcacgatctcgccgcgcacgccgaaatcctgcagcacgccttcgagcgaacgggaattggcctcaagctcggccttgctgagcggctggcgatcgccggccttcggagcggccagcatggagacggacggaaggtcgaacttgtcggaggacttcttggccgcagtcttcggcgccgccttcttgcgcggggcgcgcgcggcgggctgctcctcttcctcctcctcgccttcctcctcttcgtgctcgtcctcggtgtcctcgtcttcggactgcggcgagatggaaggcgcggcgcggccaccgcccagattgggctcctggcggctgaactgcgtggccttggtcttcggtccactcgataccagtgagcggtaagcggcgccaagcagccagcccagccgagccttggtgctcatcagggcatggaacagccagcccagcgacaccgagccacgatcgctctcctcgtcttcgtcgagcggcttgtcctcgtcctcgatcgccgagagctcttcgtcacgctcgcgcgcgccgagaccgcaggcgatcaggaaggtcgccgtcatcgcgacgaacaggatcgtgcccagcacgatgcggtagatggtgccggccggcccgaagatcaccgccggtgcgcgcaccagcgcgtcgccgaccacgccgccgagtccggtcggcagcggccaggcgccgccatgccgccagcagctggcgaagcccgctgcgatcaccgtgcagagaatccaggaaccgagccgcaacgcctcgcggtcgaacgggcgatgcgtcatcatccgccagccccagaccgcgacggtcaggaccagcatgatcgcgccgagcccgaggatctgcatggcaagatcggcgccgatcgcgccggcatagccgaggatgttccggattggccgcgaggtggcatggctgaggctgggatcctgcaccgaccatgtcatcagcgcggccgaggcgacgcctgccagcgcgatcaggccgagcccggtgagctcgcgcatgcgacgcgccagcccctctcggatcgagggcggcagatgcccgaccagtggaatgacacgttcgattgccgacatgctcatgggcccgcctaacccagagtctcgaccaggcggtgcagcgcctgcgccgtggtctcgccgtcctgcaccagcgcgagccggatgtagcccgcacctggattgaagccgtcgggctgaacgcgggccagatagctgccgggcaccacgcgcacgcctgcttccttgaagagtctcagcgtcaccgacacgtcgtcgccgactgcggatgtgttgagccagacgcagaagccggcgtcgggccggcggtagccgtaacgattgccgatgatctggtcggcgagatcgaacttgatccgatagagcctgcggttctcctccacatgcgcctcgtcgccataggcgacggtcgccacgtgctggagcggcaccggcacctggggcgctgcgatgttacgcagctcgaggaacatgccgatgaacctcttgtcgccggcggcgaagccgacgcgcaggcccggcaggttggagcgcttcgacagcgactggaacgcgaccacgcgggtgtagtcggggccggcgcattccagcgcgctgcccggggcctcgcgcgtgtagatctcggaatagcactcgtcgctgagaatcacgaagccgtagcggtcggcgagctgcttcaagcgcctgaaatagtcaggcttggcgaccgagccttgcggatttgcgggcgaggccaggtagatcgcgaccgtgcgcgccagcgtcgtctcgtcgatggcgtcgaggtcgggcaggaagccgttctcgaccgtggtcggcagatgaaccggctcgcaagccgctgcgagggcgcctgcgccatagaccggatagaacgggttcggcatcaggatggcgggcttgccgggacgcgggccgacatatcgcgcagccgcgatcgcagcgaggaacaggccttcgcggctgccattgaggacgagaatctcgtcctctgggtcgagcggtcgcggcagcttgaagcgcgacgacagccaggcgcctgcagccttgcggaacgggtcggtgcccttgttcgcggggtaacggccgaaatctgcgatgtgcttggccaggaccgggccgacgaagtcgggcacgggatgctggggttcgccgaccgcgagcgaaatcaaaggcttgccgggctgatgcggcgccagcagctcgttcagccggacgaagggcgagcgttcgctgtcggagcttccactggcctgcggcgcacgggatgaagcggtcatgaccattctgggcgccagcactcttggaacagccggtcgcgcgaaggcaccggcgggaagcggttcagttcaccatagatagggcgaggttaagacgcgattaaccatcggccggcgcctgcgtccagagcaggaataatgaagccggataacagcgggtgcacggccgttcaacctctcccccgcaagggaaccgaccaaaagaaaggggctccagcttgcgctggagcccctcaacggtcagggcattgccgggtatgtgcccgaaccgtagttgtggacgcggtttccggggagaccgcgcccgggaggagggcttacatgttgtaggcgcgctcggtgtgctcggtgatgtcgaggccttcgcgctcactctcgatgttggtgcgcagaccgacgatcacatcgaccaccttgtagaggatcgccgaaccgatgcccgaccacaccagcgtggtgacgacggccttgatctgggcgagcatctgcgtggcgaagtcgtaatcggcgaccttcggcgggatggccgagtagtcgatgatgccggcgccgccgagcgcggggttgacgagaatgccggtgccgatggcgccgacgatgccgccgacgcagtgcacgccgaacacgtcgagcgagtcatcgtagccgagcgcgttcttcacgacggtgcagaagaacaggcagaccacgccggccacgaggccgagcacgattgctcccatgatcccggagaagcccgctgcaggggtgacggcaacgaggcccgcgaccgcgccggaaatgacgccgagcacggaaggatgacccttgacgatccactccgcgaacatccacgacagcgcggcggctgcggtggcgacgaaggagttggtcatggcgagtgcagcgccgccgctggcttcgaggttggagccggcgttgaagccgaaccagccgacccagagcagcgaggcgccgatcatcgacatggtcagcgagtgcggggccatcagctccttgccgtaaccgacgcgcttgccgatcaggagagcgccgacgaggcccgcgatgccggcgttgatgtgcaccacggtgccgcccgcgaagtcgatcgcgcccatcttgaagatccagccggcgtcggcattgagctcgtcgagcttggcctgcgccgcggtctttgccgccgcgtcagtggcggcagcgagcgccttggccgcatcctggatcaggtccggaccctgccagtaccagaccatgtgcgcgatcgggaaatacaccagcgtgacccagagggggacgaacagcgcgatcgcggcgaacttcatgcgctcggcgaaggcgccgacgatgagggcgggcgtgatcgccgcgaaggtcatctggaagcacacatagatgagctccgtgatgttggtgtcgaccgagaaggtcgcagccttcgtctcgggggtgacgcccatcatgaacgccttggagaagccgccaatgaagtcggagccgccggtgaaggtcaggctgtagccgtacacggcccagatcacggtgacgacgcagacggtgtagaacacctgcatcaggacggagagcatgttcttggaacggacgagaccgccgtagaacagcgcgaggccggggatcgtcatcaacagcaccagcactgtcgatgtcatcatccaggcgttgtctcccttgttgaccgttggctcggcataggccgcggtcgcagcgaacaggccgactgcgagagccgccaatcccgcgccatggggacgcttgaacgtcatatcattcactcctgattggataaggttgagcgcgaaatcaaagggccgcggcatcggcctcgccggtgcggatgcgcaccgcatggtcgaggttgatgacgaagatcttgccgtcgccgatctgtccggttttcgccgcggacgtgatggcgtcgatggtcttgtcgacctggtcggatgcgacagcgacctcgatcttgatcttgggcagaaagctcacggcgtattcggcgccgcgatagatttccgtatggcccttctggcggccatatcccttgacttccgtcaccgtgagaccgtgaacgccgatggcggtcagggcgtcacggacttcttccagcttgaatggcttgatgatcgccataacaattttcatgggtcctatccccgcttgggcccggtccggacgtggccgggcgttctcgactggttcgccacgagggagagttcactacgcgggcacagccaggacccttagaatcaaatgccgtgccagatcggcatattgcctaatggactatgaaaccgcgggttttcacgtcgggcgggtactgcggtgcggtgcgctattccgtcgcgcccaaatcgtgaccatgtctgcccaaaatacgggcatgacaggctgccgacacaatgttgctcacgtgtcgggcaggatagtggtaattcagtagtgtgtgcgcctattgcagcgcttctccgtgctgcgaaatatccagcccctcgagctcctgctcacgggatacgcgcagcggcacgaacaggccgacgagcttgagcaggatgaaactgacgcccgccgaccagacgagggtgaccgcaacaccgtagagctggatcaggagctgttgaggattgccctccagcaggccggcggtgccgccgatggcgctggtcgcgaacacgccgccaagcagggtgccggtcaggccgccgatgccgtggacgccgaacacgtcgagcgaatcgtcatagttgaagcggtgcttcagccaggtgcaggcccaatagcagaccgccccggcgacgatgccgatgacgatgccatgccagggcgcgacgaagcccgaggctggcgtgatggtgccgaggcccgcgaccgcgccggagatcatgccgagcaccgagggcttgcgccgcgtcgaccattcgatcacggcccaggtcagcgcgccggcgcaggccgcaagatgggtcgcggtgatcgccatcactgcgcgtgagttcgccgccagcgccgagccgccgttgaagccgaaccagccgacccacaacaggccggtgcccatcaccgcgagcgagaggtcgaacggcgagagattctcggtgccgtagccgtgacggcgtcccagcaccttggccgcaaccaggccgccggtgccggccgacagatgcaccacgaggccgccggcgaaatccaggacgcccatgctggcgaggaagccgccgccccacacccaatgcgccagcggaatgtagacgaagatgaaccaggcgaccgagaacaggagataggcggagaaccgcatccgatcggccaccgagcccgcgaccagcgccaccgtgatgatggcaaaggtcatctggtacagcatgaacagcgattccgggatggtcttcgcagccggattgacgctgtccatggtcatgccggcgagaaaccagcgatcgagcgtgccgatccatgggccatcgccgacgaagcatagcgaatagccgaacgccacccagagaatggagatcagcgccaccgcggcgaggctctgcgccatggtcgcaagcacgttcttcttgcgcaccatgccggagtagaacagcgcaagtcccgggatcgtcatcatcaggaccagcgccgtggcaacgatcatccaggcggtgtccgcggtgttgatctcggagcctgcggcgtacgccgacgatgttgcagccgacgcaaatccgattcccgcagccatggcagctgcgcggcgcaaatatcccgccatctcgtttcccccagcgtagaaattacgtcgcacgctgtggcgtattgcccggtgcgatcgacgaagacgttatcggagcgctttcgagcggagtggataccggctcgcggcaagaaagcgcgtcaaaccaagcctagagcgcgtcgctgtcggtttcgccggtgcggatgcgcagcgcatgatcgatcggcgtgacgaagatcttgccgtcgccgatctgcccggtgcgcgcggtcgcggtgatcacgctgacggccttgtcggcgaggtcggaggcgaccgcgatctcgatgcggagcttcggcaggaaattcacgacatattcggcgccgcgatagatctcggtgtggcccttctggcggccgtagcccttcacctcggtcacggtcatgccgtggatgccgattgcggtcagggcctggcggacctcatcgagcttgaagggtttgatgatcgcgacgacgagtttcatggtcagccctattccccgggatgcgctgcggcgtatgtccccggcgcagcgtcaatctggcatctttccgggcagatggcataaaaaagttgcagattgaagcggaaaaacacctgaccacgtcaacgggcgcctctgtacagggcaaccgttcatccttcacaatgcatttttggcatggatgcggtgaacccaggcgttccggctggtacaaaagtatgtttgagggggactctacatggcgagttggttctacgcatccgagggcaagcagcaggggccctttccggaagggcaattccgcgacctgatcgcccaaggggtcgtgcgcccggacaccctggtctggaccgaaggcatggccggctggcaaaaggccgccgaaatccccggcctgatcggaggcggcggcgccccgccgatgatgcctggcggcccgccgatgatgggctcgggcggttatgccggcgcgggcggctatggcggcccgggtggagcatcgctcgcggtcgatttcggcatcctcgagttcacctggcgtacgctcgcgctggtgatcggttcgttcttcatcatcccggtgccgtggctgttcgtctggtacacgcaatggatcgtgtcctgcgtgaaggtcccgggccggccgaatctcagcttcaccggcaatgcaatgacgctggtgccctggtttttcggcttcatcgttctggcgatcgcgatcggctatatcggcagcgaaatcctgagcaatctgctgttcatcgtgcagatcgttctctactggctcctgatcaaatggatgattgcgaacctcgcctccaacgggcagccgctgggcctgagcttcaccggctcgatctgggcctatatcggctggaatctgctgtttgcgatctccatcatcaccatcatcggctgggcctgggtggccgcggcgcagatgcgctggttctgccgcagcatcgaagggacccggcgcgagatcgtgttcaagggcagcggtctcgacattctctggcggggtatcgtggccgtgatcctgtgcagcctgatcatcccgatcccgtgggtgtatcgctggatcatgaactggttcgcctcgcaaaccgagctcgttgcgcgaggctccgttacagcgtgacctgaaggctcctgttgcgcgatgagatcaggatgatggtcatcgcgccttcggccgttgtttgcccggtggcctggagcgatcaggacttccgctcgcgcacagaaccctcctgcgcgacggaggcgaccagcgtgccgtcgggcttgaagatcgagccgcgcgtcaggccgcggccgccgcgcgcgctcggcgagtcctgcgcgtagagcagccattcgtcggcgcggaacgggcggtgaaaccacatcgcgtggtcgaggctcgccggcatcatgcgcttgtcgaacagcgtgcggccgtagcgcgccatgatcgcatcgagcagcgaaaagtccgaggcgtaggcgagcgcgcacatgtgcagggccggatcgtccggcagcgtcgctgccgtcttgatccagacgtgaatgcggccatcgtcgatcttctggccgaagtagcgtcccagctcgaccggacgcaattcgatcggacgatcggattcataataccggcggatgaactccggcatttccttgaacatcggctgcttcgccacctcctccgccgtcagcttctccggcggcggcacgtcgggcatcgtatcctgatgatcaaacgcgctctcttcctcggtgtggaaggacaccatgatcgagaagatcgcgttgccgtgctggatcgcggtgacgcgccgtgtcgaatagctcttgccgtcgcgcaggcgctcgacctggtagatgatcgggatctgcggatcgcccggcaggatgaaatagcaatgcagcgaatgcggcagccgtccctcgacggtgcggcaggccgcaaccatcgcctgcccgatcacctgaccgccaaacacgcgctgccagctcgtcttcgggctgttgccgcggaacaggttcacctcgagctgctcgagctcgaggatcgcaatgaggtcgatcaggcttttggacatgatggtgctttcgagatctcgtcattccggggcatcgcgatagcgatgaacccggaatcccgagctgacaacctctggattccgggttcgcgcgtcgcgaccccggaatgacggaacgaggggctagccgcccttgtttcaccgcactgtttcgcccagctcaagtctgctagcaagaccgagaattggccgggaaacttggtatgtcggtacagggtagcattgtcatcggcggcggcgcatttgcgggcctggccttggccctggcattgcgccaggggctcgggcccgagatccccgtcatcgtcgccgaccccgcgcttggcgcacggccgagccgcgatcctcgcgccaccgcgatcgtggctgcctgccgccgcctgttcgaggtgatcggcgcctgggacgccgtcaggggcgaagcacagccgatcctcgacatggtcgtgactgattccaggctggaggacgccacccgtccggtgttcctgaacttcgccggcgacgtcgcgccgggcgagccctttgcacacatggtcgagaaccgccgcctgatcgatgcactggtggcacgcgcggaagccgagggcatcgatctccgcgccaccaccgttgcgtcctacgacgcgcgttccgaaggcatcgacgtgacgctcggcgacggcagcgtgatcgccgcgagcctcttggtcgccgccgacggcgcgcgctcgaagctgcgcgagcgcgcgggcatcgctacccatggctgggagtacgaccagtccggcatcgtcgtcaccgtcggccatgagcgcgatcacgagggccgcgccgaggagcacttcctgccggccggcccgttcgcgatcctgccgctttcgggcaggcgttcctcgctggtgtggaccgagcgccgggccgaagccgcgcgcatcgtcgcgctcagtgacgaggagtttcacgccgagctcgagcggcgtttcggcctgcatctcggcgaggtcaaggcgctcgacaagccgcgcgcgtttccgctgtcctatttcgttgcgcgctcctttatcgcagagcgcctcgcgctggtcggcgatgccgcccacgtcatccatccgatcgcgggccagggcctgaacatggggctgaaggacgtcgcagcgctggccgaagtggtggtcgatgctgcacggcttggcatggacatcggcggggcggacgtgctcgaacgctatcagcgctggcgtcgcttcgacacgatggcgatgggggttgccaccaactcgctgaacttcctgttctccaacgaatcgacgctgctgcgcacggtgcgcgacatcggtctcggcctcgtcgaccgtgccccgccgctgaagaatctcttcatccgccaggcagcggggctcacgggcgaggtgccgcggctgttgaagggcgaggctctgtgagggacgaatggtgagtagcgaacagcgagtgattttccattcgccattcgccgctccctactcgccatcctcaatcgatcttgcgcgcttcttccggcagcatgatcgggatgccgtcgcggatgggataggccagcttggcgctgcgcgagatcagctcctgcttggcggaatcgaactccagcggacccttggtcagcgggcagaccagaatctccagcaatttgggatcgacgctggcttcgggacgttcggtggcggcgttcattgaagtctccggcaatgccttgcctgtagcacagaaattcccggctgccatcgcggggcggatgcgggggaagagtgacgcagggtcctcgcggaagcctgctccctcactgcagcggcggatcgccgctggtgcgcttcttggcgagatccatctcggtgacggcgataaggatctcggcccgggtcttcaggtcaggcgcctccagcatggcctgcttctccgccgggccatagggtgacatcatcgccagcgcgttgacgagtgcctcgttgggcgcgctttcgacgccttcccagtcgaccttgagattgttggctttgaggaagtcagccagcaccgccagcagcgcctcgcggtcgacgtcgtcctcgcccatccgcgcggtgaagtcgtcgacgaaggcgaagaaatccaccttgcactgccgatagggggtgagcacctcgagctcctcgaccaccttgaagcgcgacacgccggtgagctcgaggatgtagcggccgtcgccggactcggcgagctgggtgatgcggccgacgcagccgacccgaaacagcgccggcttgtcggaattcttcggcgtgtgcgccacgtcgggctggatcatgccgatcaggcgatgtccgtcgcggaaggaatcgtcgaccatcgcgagatagcgcggctcgaagatgttgagcggcatctggccgcggggcagcagcagcgcgcccggcaacggaaagaccggaatgatctccgggaggtcggcgggcccgcgatattcgatgttgattggcatctgcccggtccccttggcgtcgccagcaagtcccttatgaaaataggatcgtcgacaaacgcttgcgtccctcgacggttgcatcatccgtgccgccccaggcctcgaagaattgcaccagctgcttgcgggcgccatcatcgttccatttgcggtcgcgcttgatgatctcgagcagctgctcggtcgccgccgcgcgattgccttgcgcgttgagcgcggtggcgaggtcgaatcgggcctgatgatcgagcgggtttgcggcgactttctgttccagctcggcgaccggtccgagcgattttgcctgctcggcgagatcgatcgcggtctgcaccgccttcacggcagggtcattgcgcttggattccggcaccatggccagcgtctgcttggcctgctccatcgccccggagacggcgtagcacttcgcgaggcccgcaagtgccgcgatattggtcgactcgtgctgcagcgcctcggcatagatctgcgccgctgccgccgcgtcgccctcggcgagcaccgcttcggcctcctgcacgatctcggcgacgttgacctcgcccggcgcggtgacgcccttggtcagccgctcgatgaaggcattgacctggctctccggcaccgcacccatgaagccgtcggccggctggccgttgacgaaggcgatcacggcggggatcgactggaggcccatctggcccgggatcgccggatggtggtcgatgttcatcttgaccagcttgaccttgcccttggccgccttcaccgccttttccagcacgggggtgagctgcttgcaggggccgcaccactccgcccagaaatcgatcagcaccggctggcgcttcgattcctcgatcacgtccttcacgaaggcttgggtggtggtgtccttgatcaggtcggccgcaaccgggcccgccgctccgttaccctggtcgatgatcgtcacgggatcccctcgtcatgtctggaatggcggctcttagcacgccgccatatcatatgcttgctgttggctcctaaattgggccgaatgggccgaatttcaatccaggcgacccgattcgccggttccggggcactttcgcgcggtttggccgcatccggggtccatatagggcctccgattgcgcattgatgccgccggtagctgttgcattccctgtccgcttttggcatacgacagccgttgccggcgcgtcacgcgaccgacacaggatgcgggtgtagctcagtggtagagcacgaccttgccaaggtcggggtcgagggttcgagccccttcgcccgctccaatttttccgagcatcagcaatgaattagcagtccccacccggggcgagccgacgcgccgattggaagcggggtaaagccagggtaaagtgcaggggtcgcggcatgcttccggcccggctttccgcttgagaggccgtgcgagaccccaggttgaggctgaatctcctccgcaacacatattaaggaatttcccagctttctcctcttaagccttagttgcgcttcccattcccgcaatttgcgatatgcattgcttaaaagcgagggggaactgggtgaaggcttcggcacaggttaagtataaaggccatcctcttccggcaagctgccctccacaaggtgcttcaattacctcgaacagcacctatctcaggttggtcccagcgtctaaggtgacggccgacgactttaagtcgggcgacgcgcttggtcgaaagaagccatcccacgtcgatgagtgcacttggaaagcctgttcggtgttcgtggatacgacgccgcgccacaagctggctgatctgaccaagttgcccaacttgaaccacatgaagtttgttgcgcacctaagtgtcgacaaatccgcgggcatggtcaaacctcacgcgcgcgacccggaacacattagcttttggatgtacgccagctacgagcccgagaaagcagtaatcaaaatcgaaccgctgtcatgacggctcaagcaaaaacagcaaaggtggtggaggacctcgttgactacgaggggcctcagttgttgctgctaaaaaccaaccgaaaatttcacatgctggcggttgcgattcagcgagaaggatttgagtccgctttttttggctgcgaagtgaccgagaaagtgttcgaaacttattttgatgagattgctgatttgaattttgtcttccagcgcgcctatggaaagaattattactttttcgacttgtctagcgctgacaatggggaggtggcgctccaaaaagcatccgtcgatgactcgcaaaagccagagtactggccacaggtgggtttctttgcccgctcgcataccagccctttacatcgctccaagcgagcgggttcaacaaagacattcaagatcgacggacgttggggtgcggacgatttctcgcatttccacggcaagatggacgatctgtacagcctcttcggtgtgattgagcggcttgatccatcatacaccaacagcgctgaagaaaatcactttatcaggcaggcgatcaaagaccgcttctggcaaggtggaggaagctacggcgggttttttggtagccttactgagcgcagcaagcatactaactttgctcccttggaagtcgcgagggttgcttatgcgtctccgggagagatttctcttcgcgggaacaagaaggcgctcacggacattgccaacacaattcagaccttcgacgagcattgggaaatgcttcgaggtgcctatctgaatatctacggcgtccttcgaaaggaaaaacttctatccgctcgaccgaccaagtctttttctagtgttgctgttcgcaacatcatcagaaagaattcaagcgacttggcaatcaagatgggtatagacaaggtcgatgagttgtatgcggtttgcgactccaacacgcttgtattcagcaaagtagttctttcgatctttcggcgcgcgaacgagctctacctctattacgccgagggccgagttcaggctgcggactaaagggacgccggtccttcgaacgcgttgtgcgtttatgtagttgatcggacccgttttagtttgatcattcggacatcggccaacagctcaggcttcgacttttcgactcgatcaagaatatcggaaacgccgtaaggccaatgtctagcgttctcaccgagaatggcatcgagcaaggacagcacactttcggggtacttttccaccagtcgctcgttatcgtgccgttctatgggaaggttgatgtagtcctgatccgtaggaaccagcaacggaagaatgcagtcaacgaagagtggaaatcggctgccttgcgcaaaagctagttccgccagcttcgcagaaatccttggggtcttaagtgagatctgtttcggccacacgcgcttgagcaaattaaaagcgtcttctcgccacttctcatctgctcgttttgtccaattttgcaaatgccaaagcaactgctcacggaattcgtcatcggcctcctgcaaggtgtgtgttagctcggcatcgctaacagctcgcgcatctccatcatctactctggcgccccaacctgccaatatcattccggctagaatttccgcatgtttgcgccgggtctcggactgcctgtgcgcaaggcggagcagagctggcttgatcagcttaaataagggcggctgcggaatcctggctccccaaaagaaacctgcccagaaagcatcgctgtcagcatcctggcgctgaatacatggaagcaaggagctgattacccaggcttcgtcccgcgcaaacagccaaacgagattgtgacagagaatcgcgagggcatgacgacgatgatcttttggcaacgaaagaagctcgtcagcacgaatcttccaccaatctggcattcggtcgtttcgatccagtttgcctatgacggaatctgtcaaaagtagctgtgcgagatatcccacaggggaattcagggcctccgtggcccaatcaacactttgggcgcgagcgccccctcgatcgcgctcggcatctggtcgtgctaagaggggcactagccggccccagagatcattcaaaatttcgcggtggtcgggcagcaagttcttgtgaacgcgcagcatccaatcggatgcggcgttcagtatcttgctcagcgattcatctggcaggcgagctagacggcaggctatcaatactgaaaagcgtactttttcctgtcggctacttgtgtgattgagaaactctctccagaactcgtccctgaatttcccatctctcaatgcagcattcagtgctccgaaagcacgaacgggctttgtgtcacagagtccagcgaatgggtcgcgctcgacgaaaaatcgatcttgcgctcgtcctgatagagacgcggcaacgtccagaatctcagatagcggcttgtcttgcagctcgtcgcttcgggtgtctgtctttacccaacctgtgcgcatacccatagagaatgcggcccccttcgcccactcgggcttccactgaggcgcatcggcttggagcgttcgcgaaacggcatctatgtcaaaggtgaagacacattgtttagagtggagatagtgtatccgattgagaattgcatgggctctgctctctttgaagtcattacctgattctcgcggccaccttttccttccctgcaaaattcgtcgttcgatactctgctttgtgcgggtgggcatctcgctccagcgcgccgacaacgccaataataggtctcgctggtgggcgctgttccaaaactcttcacgcgaaacgattctaagtacatccgcgatttcgtttctaggaacgagccgtttgtcgttcaaagaccagattatcaggtgcgctgcaatcgggccagttgaccctctccatgagccgatctcggattttgcggcgagagcgtcgacttttagcagggcctgcaaaagatcgaaatatcggaaaagaggactattgatgccgtgcttatactcgcgttccgaagtttcctcgccttcctctttctcgatcgagagcaagctgtgcaatccatatccgcccagctcctcctctagagccgcacctaattcgagattgtcgcgaaacgtcttgatcacagctggaagaaaggaatcaggtatcgtgagcccctcgtcgtgcacaggatatgtcacgtccaggtgcatcaggtcccctagccgctctacagcgttcgggggccgcggcgaactattgaaaggcctatcgactttcacaacgggacgaaggattactccgagagcacggaccgcttccggagtccatccctcagcttttacttgggctacccattggtaatactcatcagaggcgtcccgattgcgggtcctccaagaatttatcaaatagcgccaagcctttctgactaagggtgccgaagtcggttccgcccgctcactgctatacacaatttggcgctgtatgtcgggatggagaccgtgttggaacgcagcccaccagattgcagccggttgatctgcgaccctttgaaaccaacgtccaagatgggcaatcctaggtgccaagcgaggagcgttgattgcccaatgacctcgcagcgcagaaacttgatcttcttgcaagttctggcgatcctcacgcgtgagtgagaaagcgctccacgcattcgcgggtatttcgaaacgatcaaacgcactactctcgggatcagcgaggggcggcaccggatcgctgtcaagcccgtacgcgt

SEQ ID NO: 166 - DNA, 1091 bp, Bradyrhizobium colbertium
ctaccagaacgacgatttcggcaaagactatctaaaggggttgaaggagggcctcggcgccaaggcttcgatgatcgtgcgggaagaagcctacgacacttccgagcccgcaatcgacgagcgggtcgtgaagctgaaggcggccggcgccgacatcttcatcagtttcaccagccagaaattcgccgcgcagggaatcaagaaggcggcggagatcaactggcatccgatgcacatcatctccaacgtctcggcatcggtcggaggcgtgctggagccggccggcgtcgagatttcgcaaggcatcctgtcggcgacgtacatgaaggacggctccgacccgcagtggaatgccgatgagggcatgaagaagttctacagtttcctcgcgcagtacgaacccaaggccaacaagctggatgccggcgtggtgtacggctatgccgccgcgcagaccatgatgaaggtcctgcagatgtgcggcgacgatctcacccgcgagaacgtcatgaggcaggccgcaagcctgaaggacttcgagcccgatacgctgctgcccggcatcaagatcaataccgcgccggacgacttcgccccgatcgagcagctgcagatgatgcggttcaagggccggaaatgggagctgttcggcgatgtcatctcgagcgagatcggccattgaagccgcgcaaggacgcaattcgaaatagctaacaacccgcagaacaacttttgcgccattgaaggaggtgcgcctcttctcgcgcgccggaatattcgacggcctcacgacaaagaaacagctcgctgcgacggcgccggcggggtgttttgcttgctgggcgcctgagaagggtattcaatgcgtgtcggagcggcgcgcaacgatcgctcccaatcaagaacacgacacattcaaaccgacctagggagatcaagatgcctgcaatacgtgtgcgattgggggccttctcggctgccctcgtgctggctgtcgccgtttccacgacagcgtccgcccagaagaaatacgacaccggcgcatccgacaccgaaatcaagatcggcaacatcatgccctacagcggacc

SEQ ID NO: 167 - DNA, 19985 bp, Bradyrhizobium colbertium
acacccgggcgacttcgtcggaatccgcactgtgttcgacatagtgttttcccgaaacaacgtgttgccgccaatatgagcgtgtttcgccgttgcgcaacttcgccggggagaccctggagccctccccctatgcgtattggaatgctgcaatgggcgtatgggaatgacgtgtgattatgcgtatccttttttggagggcgggccggtcttccggggggaagtgtttaaagtcgccccgcctagattttggggtctcccgggggagacgcaagggtctcggggacaccttgacttttaggacaaaacgtcctatttagggatcaaatggattgggaatgctcgatcggcgctgggcctcggtgaacaccggggcccttcgctttttgggctaggggaaaatcttcaagccgtagccctcgatcttgccgttagggctcgcccgaaatttggacttcagggcatcataggcccggttgggctgatctggcttgatgacgtggcgcccaatggggtgtgcgacaaggtcagccaactgtaggccggtcgagttgtgcttcttgtccatgaagcggatttcgaggttctgcatcttgccgacggcgttttgaccgtcgcagatcctgcgaaactccagctccagcttcgcatcctcggtcttgccacggcattcgacctgcaaatgggtctggacgttcgcctggcccttgtcgatcaggaaacgctgcaggcgctccatgcagaagcccagggcaatgctgtaggggtccgccgggtcgctgtatttcttgacgtgcttagccttgtcgatgaccgcggcaatgagtgtgaattcagcgtcgccgatcagctgggttacccggtcgatgaacgatgcccgcgtgttaggatttagcaggatgttgaaatcgccggtcgccttgcggatttcatgaccgtgcagcactatgctgtcatggccccagaagtcgaatttgaaccgctggaaagccggcacgatcttttcgatgtatttggccttttcgaccacgcaaaaggcgagcgcgaaaaccgggtgatccgggttgatgttggtgaggccgtgatcgccgctttcgtcgatgtagacaatgtattcgctgtaattcatggcgagacgttaccccaagtcgacgctggggccagcttggctggctcataatcgaccgctattcgagcacggagccgttcgcagcttgacccaatcgagaaaccagcggccgttacagggacaggatgtctcgaaaggctagaggttagacgtacgcccgcttgggtcctcatttgcatactctcgcaagtttttagagaggcccgatcgagcatccgctccgggcctcttttcccaatttagcccgttgaaaatgcgagctattccgcgatgcaccgtccatcgtgggccggcccttcatggcgagctttttgggaccgcagtcaaaatttcgcaacaaaatggggagccgattgacagttccatcaaaattgtctacataaatgccagcctgattgtggtgacgccattttgtaatcaattctggaggcctttgtgttcaatcatcgccattacgtgccaattttgaaatggaaaatgggagagtaccaggcgctcagccgcctggcggggccggtcaaggaccgcatcacccccctcctcgaaatccccccggtcgggttcgacttcgagacgcagcggaacaaggagagcgcagacgaccacctgggcgacttcggcaagcgcctgaaatccaagtggcaggcccggccctgctttgttgacttgaagcacctgcccgcggcgacccgatgcgctgggggacgccactgcgtcgaggttctgttcgagactgcccgcgccgaaggctgcgcggccatcccggtcgtcagtttcgcaaacgacgccgcattcctggcggccgtggccaccgtttcccggcaggaccggcgcggcgtctgcctgcgcctgtcccttcccgacttcgaccggcacaatctccaggccgacatcgagaacctgctgcgccccatggcggacggctatggcgaatgcgacctggtgatcgatctcggcacgccgacctatgtgccgatcgcgatcatggtgacgatcatgcagacgctgatggcccgggtccccatgctcaaccaatggcgcaccgtcaccatcgccggcacgtcctacccgaactcggtggcgaacatcgccgcgccgtaccagttgctgccgcgccatgaatggcaggcttatcgcgcgttcatcgcaaccatcggtcacgagacgcggataccgaccttcggggactacgccgtcgcccaccctgacctggtcgagctcgacatgcggatgattaagccgttcgcgaagctgcgctacaccatcaccgaccactggcatgtcgcccgcgggacgccggtacggacccacggcttcggccagtaccagcagatgtgcgcgacgctggttgccctgccttatttcagtggccgcgcgttctcggccggcgacgcctatatcgcggactgcgcggcaggcaccgtcacgacgggaaatctgtcgacgtgggtgtgggtgtcgacgaaccggcatctgacgaaggtggtcgatgacctcgccagcgcgcacgcgctttcagtcgctgccgaataagcggccgaagctcctgcaggtcgacggtttcggccaggtatttgtagagaacgccgcgcggttttctgagcaaagccggcggtgcgccgcgctcctggaggatttcaacgacttccggtcgccagagcaattcggccagggcgagcggatcgatggtggggttctgcgcaaaggcctgcgcagtctcgaagctgatgccgccacgcggtcccgccgtcacgaccttgataccccaccattgcgggatcagcggcttcgccttctccaaatggcgctcgccgacaacgagcgtcgcccggtccaggacgagcccataagtggcgatctgggcgggaagccgttccagcgtgtctgaatcgcttttgatctcgtaaccgtgcaggtagccatttacgacggcgatatcgacccggcaggtgccatgacgcaggcccaactcgtcgagcaccaaagtgtcggcgtcgccgtgatgctctttcagcacctttcggtgcagagcctgtctgacatcccgatctcgcacgactaaatcctcaggaggggcgcggccctaatatgccgcgatacagcccaacaaaccgttgaatcttcgctagcgatcgacctcatcgaatcacaatagcgccgaagaagccgcgatgaccacccgctttgcggccagagcgggcaaaaagctgtgacccgagtcctcccggcaacagatggcggcaagtcccgtccgcgtacggcgtattacatacttaagctttcatttaggaattgcccgtatgttttggacatgaccaagcgcgtgatttcagttcgactttcggacgaacgcctcaagcaactggatgaggtgtgcagccggctgggcatgaaccgctcgcaggtaatcgacgccgcgttgcggctggttccagaggtgatgtccggaaaggcagagctacactatgaccccgaacggtttaaacgatccgggcaaactgaataaagaccgactggcggccctggtagccctgctggtgatggtgatggtggctgcccacagcggctatcggctacacattggcctaactgggatcacgttcgagcaaaatgctcaggtcaccgcccggtagcctgggcgattgttccggagtgtaggggatggaaaatgccggctctccaattcacttcggactgtttcaccgatagcctcgcttctgctttgcgcctattttgaaatcatagctatgtcggcccttgggacgaatacgtttcgatccgaacagtgccggcacgcccaatgcgcctccaccttctcacaagcgagcactcgccaaagagctatgcctgaatctgggtgacggagccacacccgggcgacttcgtcggaatccgcactgtgttcgacatagtgttttcccgaaacaacgtgttgccgccaatatgagcgtgtttcgccgttgcgcaacttcgccggggagaccctggagccctccccctatgcgtattggaatgctgcaatgggcgtatgggaatgacgtgtgattatgcgtatccttttttggagggcgggccggtcttccggggggaagtgtttaaagtcgccccgcctagattttggggtctcccgggggagacgcaagggtctcggggacaccttgacttttaggacaaaacgtcctatttagggatcaaatggattgggaatgctcgatcggcgctgggcctcggtgaacaccggggcccttcgctttttgggctaggggaaaatcttcaagccgtagccctcgatcttgccgttagggctcgcccgaaatttggacttcagggcatcataggcccggttgggctgatctggcttgatgacgtggcgcccaatggggtgtgcgacaaggtcagccaactgtaggccggtcgagttgtgcttcttgtccatgaagcggatttcgaggttctgcatcttgccgacggcgttttgaccgtcgcagatcctgcgaaactccagctccagcttcgcatcctcggtcttgccacggcattcgacctgcaaatgggtctggacgttcgcctggcccttgtcgatcaggaaacgctgcaggcgctccatgcagaagcccagggcaatgctgtaggggtccgccgggtcgctgtatttcttgacgtgcttagccttgtcgatgaccgcggcaatgagtgtgaattcagcgtcgccgatcagctgggttacccggtcgatgaacgatgcccgcgtgttaggatttagcaggatgttgaaatcgccggtcgccttgcggatttcatgaccgtgcagcactatgctgtcatggccccagaagtcgaatttgaaccgctggaaagccggcacgatcttttcgatgtatttggccttttcgaccacgcaaaaggcgagcgcgaaaaccgggtgatccgggttgatgttggtgaggccgtgatcgccgctttcgtcgatgtagacaatgtattcgctgtaattcatggcgagacgttaccccaagtcgacgctggggccagcttggctggctcataatcgaccgctattcgagcacggagccgttcgcagcttgacccaatcgagaaaccagcggccgttacagggacaggatgtctcgaaaggctagaggttagacgtacgcccgcttgggtcctcatttgcatactctcgcaagtttttagagaggcccgatcgagcatccgctccgggcctcttttcccaatttagcccgttgaaaatgcgagctattccgcgatgcaccgtccatcgtgggccggcccttcatggcgagctttttgggaccgcagtcaaaatttcgcaacaaaatggggagccgattgacagttccatcaaaattgtctacataaatgccagcctgattgtggtgacgccattttgtaatcaattctggaggcctttgtgttcaatcatcgccattacgtgccaattttgaaatggaaaatgggagagtaccaggcgctcagccgcctggcggggccggtcaaggaccgcatcacccccctcctcgaaatccccccggtcgggttcgacttcgagacgcagcggaacaaggagagcgcagacgaccacctgggcgacttcggcaagcgcctgaaatccaagtggcaggcccggccctgctttgttgacttgaagcacctgcccgcggcgacccgatgcgctgggggacgccactgcgtcgaggttctgttcgagactgcccgcgccgaaggctgcgcggccatcccggtcgtcagtttcgcaaacgacgccgcattcctggcggccgtggccaccgtttcccggcaggaccggcgcggcgtctgcctgcgcctgtcccttcccgacttcgaccggcacaatctccaggccgacatcgagaacctgctgcgccccatggcggacggctatggcgaatgcgacctggtgatcgatctcggcacgccgacctatgtgccgatcgcgatcatggtgacgatcatgcagacgctgatggcccgggtccccatgctcaaccaatggcgcaccgtcaccatcgccggcacgtcctacccgaactcggtggcgaacatcgccgcgccgtaccagttgctgccgcgccatgaatggcaggcttatcgcgcgttcatcgcaaccatcggtcacgagacgcggataccgaccttcggggactacgccgtcgcccaccctgacctggtcgagctcgacatgcggatgattaagccgttcgcgaagctgcgctacaccatcaccgaccactggcatgtcgcccgcgggacgccggtacggacccacggcttcggccagtaccagcagatgtgcgcgacgctggttgccctgccttatttcagtggccgcgcgttctcggccggcgacgcctatatcgcggactgcgcggcaggcaccgtcacgacgggaaatctgtcgacgtgggtgtgggtgtcgacgaaccggcatctgacgaaggtggtcgatgacctcgccagcgcgcacgcgctttcagtcgctgccgaataagcggccgaagctcctgcaggtcgacggtttcggccaggtatttgtagagaacgccgcgcggttttctgagcaaagccggcggtgcgccgcgctcctggaggatttcaacgacttccggtcgccagagcaattcggccagggcgagcggatcgatggtggggttctgcgcaaaggcctgcgcagtctcgaagctgatgccgccacgcggtcccgccgtcacgaccttgataccccaccattgcgggatcagcggcttcgccttctccaaatggcgctcgccgacaacgagcgtcgcccggtccaggacgagcccataagtggcgatctgggcgggaagccgttccagcgtgtctgaatcgcttttgatctcgtaaccgtgcaggtagccatttacgacggcgatatcgacccggcaggtgccatgacgcaggcccaactcgtcgagcaccaaagtgtcggcgtcgccgtgatgctctttcagcacctttcggtgcagagcctgtctgacatcccgatctcgcacgactaaatcctcaggaggggcgcggccctaatatgccgcgatacagcccaacaaaccgttgaatcttcgctagcgatcgacctcatcgaatcacaatagcgccgaagaagccgcgatgaccacccgctttgcggccagagcgggcaaaaagctgtgacccgagtcctcccggcaacagatggcggcaagtcccgtccgcgtacggcgtattacatacttaagctttcatttaggaattgcccgtatgttttggacatgaccaagcgcgtgatttcagttcgactttcggacgaacgcctcaagcaactggatgaggtgtgcagccggctgggcatgaaccgctcgcaggtaatcgacgccgcgttgcggctggttccagaggtgatgtccggaaaggcagagctacactatgaccccgaacggtttaaacgatccgggcaaactgaataaagaccgactggcggccctggtagccctgctggtgatggtgatggtggctgcccacagcggctatcggctacacattggcctaactgggatcacgttcgagcaaaatgctcaggtcaccgcccggtagcctgggcgattgttccggagtgtaggggatggaaaatgccggctctccaattcacttcggactgtttcaccgatagcctcgcttctgctttgcgcctattttgaaatcatagctatgtcggcccttgggacgaatacgtttcgatccgaacagtgccggcacgcccaatgcgcctccaccttctcacaagcgagcactcgccaaagagctatgcctgaatctgggtgacggagccacacccgggcgacttcgtcggaatccgcactgtgttcgacatagtgttttcccgaaacaacgtgttgccgccaatatgagcgtgtttcgccgttgcgcaacttcgccggggagaccctggagccctccccctatgcgtattggaatgctgcaatgggcgtatgggaatgacgtgtgattatgcgtatccttttttggagggcgggccggtcttccggggggaagtgtttaaagtcgccccgcctagattttggggtctcccgggggagacgcaagggtctcggggacaccttgacttttaggacaaaacgtcctatttagggatcaaatggattgggaatgctcgatcggcgctgggcctcggtgaacaccggggcccttcgctttttgggctaggggaaaatcttcaagccgtagccctcgatcttgccgttagggctcgcccgaaatttggacttcagggcatcataggcccggttgggctgatctggcttgatgacgtggcgcccaatggggtgtgcgacaaggtcagccaactgtaggccggtcgagttgtgcttcttgtccatgaagcggatttcgaggttctgcatcttgccgacggcgttttgaccgtcgcagatcctgcgaaactccagctccagcttcgcatcctcggtcttgccacggcattcgacctgcaaatgggtctggacgttcgcctggcccttgtcgatcaggaaacgctgcaggcgctccatgcagaagcccagggcaatgctgtaggggtccgccgggtcgctgtatttcttgacgtgcttagccttgtcgatgaccgcggcaatgagtgtgaattcagcgtcgccgatcagctgggttacccggtcgatgaacgatgcccgcgtgttaggatttagcaggatgttgaaatcgccggtcgccttgcggatttcatgaccgtgcagcactatgctgtcatggccccagaagtcgaatttgaaccgctggaaagccggcacgatcttttcgatgtatttggccttttcgaccacgcaaaaggcgagcgcgaaaaccgggtgatccgggttgatgttggtgaggccgtgatcgccgctttcgtcgatgtagacaatgtattcgctgtaattcatggcgagacgttaccccaagtcgacgctggggccagcttggctggctcataatcgaccgctattcgagcacggagccgttcgcagcttgacccaatcgagaaaccagcggccgttacagggacaggatgtctcgaaaggctagaggttagacgtacgcccgcttgggtcctcatttgcatactctcgcaagtttttagagaggcccgatcgagcatccgctccgggcctcttttcccaatttagcccgttgaaaatgcgagctattccgcgatgcaccgtccatcgtgggccggcccttcatggcgagctttttgggaccgcagtcaaaatttcgcaacaaaatggggagccgattgacagttccatcaaaattgtctacataaatgccagcctgattgtggtgacgccattttgtaatcaattctggaggcctttgtgttcaatcatcgccattacgtgccaattttgaaatggaaaatgggagagtaccaggcgctcagccgcctggcggggccggtcaaggaccgcatcacccccctcctcgaaatccccccggtcgggttcgacttcgagacgcagcggaacaaggagagcgcagacgaccacctgggcgacttcggcaagcgcctgaaatccaagtggcaggcccggccctgctttgttgacttgaagcacctgcccgcggcgacccgatgcgctgggggacgccactgcgtcgaggttctgttcgagactgcccgcgccgaaggctgcgcggccatcccggtcgtcagtttcgcaaacgacgccgcattcctggcggccgtggccaccgtttcccggcaggaccggcgcggcgtctgcctgcgcctgtcccttcccgacttcgaccggcacaatctccaggccgacatcgagaacctgctgcgccccatggcggacggctatggcgaatgcgacctggtgatcgatctcggcacgccgacctatgtgccgatcgcgatcatggtgacgatcatgcagacgctgatggcccgggtccccatgctcaaccaatggcgcaccgtcaccatcgccggcacgtcctacccgaactcggtggcgaacatcgccgcgccgtaccagttgctgccgcgccatgaatggcaggcttatcgcgcgttcatcgcaaccatcggtcacgagacgcggataccgaccttcggggactacgccgtcgcccaccctgacctggtcgagctcgacatgcggatgattaagccgttcgcgaagctgcgctacaccatcaccgaccactggcatgtcgcccgcgggacgccggtacggacccacggcttcggccagtaccagcagatgtgcgcgacgctggttgccctgccttatttcagtggccgcgcgttctcggccggcgacgcctatatcgcggactgcgcggcaggcaccgtcacgacgggaaatctgtcgacgtgggtgtgggtgtcgacgaaccggcatctgacgaaggtggtcgatgacctcgccagcgcgcacgcgctttcagtcgctgccgaataagcggccgaagctcctgcaggtcgacggtttcggccaggtatttgtagagaacgccgcgcggttttctgagcaaagccggcggtgcgccgcgctcctggaggatttcaacgacttccggtcgccagagcaattcggccagggcgagcggatcgatggtggggttctgcgcaaaggcctgcgcagtctcgaagctgatgccgccacgcggtcccgccgtcacgaccttgataccccaccattgcgggatcagcggcttcgccttctccaaatggcgctcgccgacaacgagcgtcgcccggtccaggacgagcccataagtggcgatctgggcgggaagccgttccagcgtgtctgaatcgcttttgatctcgtaaccgtgcaggtagccatttacgacggcgatatcgacccggcaggtgccatgacgcaggcccaactcgtcgagcaccaaagtgtcggcgtcgccgtgatgctctttcagcacctttcggtgcagagcctgtctgacatcccgatctcgcacgactaaatcctcaggaggggcgcggccctaatatgccgcgatacagcccaacaaaccgttgaatcttcgctagcgatcgacctcatcgaatcacaatagcgccgaagaagccgcgatgaccacccgctttgcggccagagcgggcaaaaagctgtgacccgagtcctcccggcaacagatggcggcaagtcccgtccgcgtacggcgtattacatacttaagctttcatttaggaattgcccgtatgttttggacatgaccaagcgcgtgatttcagttcgactttcggacgaacgcctcaagcaactggatgaggtgtgcagccggctgggcatgaaccgctcgcaggtaatcgacgccgcgttgcggctggttccagaggtgatgtccggaaaggcagagctacactatgaccccgaacggtttaaacgatccgggcaaactgaataaagaccgactggcggccctggtagccctgctggtgatggtgatggtggctgcccacagcggctatcggctacacattggcctaactgggatcacgttcgagcaaaatgctcaggtcaccgcccggtagcctgggcgattgttccggagtgtaggggatggaaaatgccggctctccaattcacttcggactgtttcaccgatagcctcgcttctgctttgcgcctattttgaaatcatagctatgtcggcccttgggacgaatacgtttcgatccgaacagtgccggcacgcccaatgcgcctccaccttctcacaagcgagcactcgccaaagagctatgcctgaatctgggtgacggagccacacccgggcgacttcgtcggaatccgcactgtgttcgacatagtgttttcccgaaacaacgtgttgccgccaatatgagcgtgtttcgccgttgcgcaacttcgccggggagaccctggagccctccccctatgcgtattggaatgctgcaatgggcgtatgggaatgacgtgtgattatgcgtatccttttttggagggcgggccggtcttccggggggaagtgtttaaagtcgccccgcctagattttggggtctcccgggggagacgcaagggtctcggggacaccttgacttttaggacaaaacgtcctatttagggatcaaatggattgggaatgctcgatcggcgctgggcctcggtgaacaccggggcccttcgctttttgggctaggggaaaatcttcaagccgtagccctcgatcttgccgttagggctcgcccgaaatttggacttcagggcatcataggcccggttgggctgatctggcttgatgacgtggcgcccaatggggtgtgcgacaaggtcagccaactgtaggccggtcgagttgtgcttcttgtccatgaagcggatttcgaggttctgcatcttgccgacggcgttttgaccgtcgcagatcctgcgaaactccagctccagcttcgcatcctcggtcttgccacggcattcgacctgcaaatgggtctggacgttcgcctggcccttgtcgatcaggaaacgctgcaggcgctccatgcagaagcccagggcaatgctgtaggggtccgccgggtcgctgtatttcttgacgtgcttagccttgtcgatgaccgcggcaatgagtgtgaattcagcgtcgccgatcagctgggttacccggtcgatgaacgatgcccgcgtgttaggatttagcaggatgttgaaatcgccggtcgccttgcggatttcatgaccgtgcagcactatgctgtcatggccccagaagtcgaatttgaaccgctggaaagccggcacgatcttttcgatgtatttggccttttcgaccacgcaaaaggcgagcgcgaaaaccgggtgatccgggttgatgttggtgaggccgtgatcgccgctttcgtcgatgtagacaatgtattcgctgtaattcatggcgagacgttaccccaagtcgacgctggggccagcttggctggctcataatcgaccgctattcgagcacggagccgttcgcagcttgacccaatcgagaaaccagcggccgttacagggacaggatgtctcgaaaggctagaggttagacgtacgcccgcttgggtcctcatttgcatactctcgcaagtttttagagaggcccgatcgagcatccgctccgggcctcttttcccaatttagcccgttgaaaatgcgagctattccgcgatgcaccgtccatcgtgggccggcccttcatggcgagctttttgggaccgcagtcaaaatttcgcaacaaaatggggagccgattgacagttccatcaaaattgtctacataaatgccagcctgattgtggtgacgccattttgtaatcaattctggaggcctttgtgttcaatcatcgccattacgtgccaattttgaaatggaaaatgggagagtaccaggcgctcagccgcctggcggggccggtcaaggaccgcatcacccccctcctcgaaatccccccggtcgggttcgacttcgagacgcagcggaacaaggagagcgcagacgaccacctgggcgacttcggcaagcgcctgaaatccaagtggcaggcccggccctgctttgttgacttgaagcacctgcccgcggcgacccgatgcgctgggggacgccactgcgtcgaggttctgttcgagactgcccgcgccgaaggctgcgcggccatcccggtcgtcagtttcgcaaacgacgccgcattcctggcggccgtggccaccgtttcccggcaggaccggcgcggcgtctgcctgcgcctgtcccttcccgacttcgaccggcacaatctccaggccgacatcgagaacctgctgcgccccatggcggacggctatggcgaatgcgacctggtgatcgatctcggcacgccgacctatgtgccgatcgcgatcatggtgacgatcatgcagacgctgatggcccgggtccccatgctcaaccaatggcgcaccgtcaccatcgccggcacgtcctacccgaactcggtggcgaacatcgccgcgccgtaccagttgctgccgcgccatgaatggcaggcttatcgcgcgttcatcgcaaccatcggtcacgagacgcggataccgaccttcggggactacgccgtcgcccaccctgacctggtcgagctcgacatgcggatgattaagccgttcgcgaagctgcgctacaccatcaccgaccactggcatgtcgcccgcgggacgccggtacggacccacggcttcggccagtaccagcagatgtgcgcgacgctggttgccctgccttatttcagtggccgcgcgttctcggccggcgacgcctatatcgcggactgcgcggcaggcaccgtcacgacgggaaatctgtcgacgtgggtgtgggtgtcgacgaaccggcatctgacgaaggtggtcgatgacctcgccagcgcgcacgcgctttcagtcgctgccgaataagcggccgaagctcctgcaggtcgacggtttcggccaggtatttgtagagaacgccgcgcggttttctgagcaaagccggcggtgcgccgcgctcctggaggatttcaacgacttccggtcgccagagcaattcggccagggcgagcggatcgatggtggggttctgcgcaaaggcctgcgcagtctcgaagctgatgccgccacgcggtcccgccgtcacgaccttgataccccaccattgcgggatcagcggcttcgccttctccaaatggcgctcgccgacaacgagcgtcgcccggtccaggacgagcccataagtggcgatctgggcgggaagccgttccagcgtgtctgaatcgcttttgatctcgtaaccgtgcaggtagccatttacgacggcgatatcgacccggcaggtgccatgacgcaggcccaactcgtcgagcaccaaagtgtcggcgtcgccgtgatgctctttcagcacctttcggtgcagagcctgtctgacatcccgatctcgcacgactaaatcctcaggaggggcgcggccctaatatgccgcgatacagcccaacaaaccgttgaatcttcgctagcgatcgacctcatcgaatcacaatagcgccgaagaagccgcgatgaccacccgctttgcggccagagcgggcaaaaagctgtgacccgagtcctcccggcaacagatggcggcaagtcccgtccgcgtacggcgtattacatacttaagctttcatttaggaattgcccgtatgttttggacatgaccaagcgcgtgatttcagttcgactttcggacgaacgcctcaagcaactggatgaggtgtgcagccggctgggcatgaaccgctcgcaggtaatcgacgccgcgttgcggctggttccagaggtgatgtccggaaaggcagagctacactatgaccccgaacggtttaaacgatccgggcaaactgaataaagaccgactggcggccctggtagccctgctggtgatggtgatggtggctgcccacagcggctatcggctacacattggcctaactgggatcacgttcgagcaaaatgctcaggtcaccgcccggtagcctgggcgattgttccggagtgtaggggatggaaaatgccggctctccaattcacttcggactgtttcaccgatagcctcgcttctgctttgcgcctattttgaaatcatagctatgtcggcccttgggacgaatacgtttcgatccgaacagtgccggcacgcccaatgcgcctccaccttctcacaagcgagcactcgccaaagagctatgcctgaatctgggtgacggagccacacccgggcgacttcgtcggaatccgcactgtgttcgacatagtgttttcccgaaacaacgtgttgccgccaatatgagcgtgtttcgccgttgcgcaacttcgccggggagaccctggagccctccccctatgcgtattggaatgctgcaatgggcgtatgggaatgacgtgtgattatgcgtatccttttttggagggcgggccggtcttccggggggaagtgtttaaagtcgccccgcctagattttggggtctcccgggggagacgcaagggtctcggggacaccttgacttttaggacaaaacgtcctatttagggatcaaatggattgggaatgctcgatcggcgctgggcctcggtgaacaccggggcccttcgctttttgggctaggggaaaatcttcaagccgtagccctcgatcttgccgttagggctcgcccgaaatttggacttcagggcatcataggcccggttgggctgatctggcttgatgacgtggcgcccaatggggtgtgcgacaaggtcagccaactgtaggccggtcgagttgtgcttcttgtccatgaagcggatttcgaggttctgcatcttgccgacggcgttttgaccgtcgcagatcctgcgaaactccagctccagcttcgcatcctcggtcttgccacggcattcgacctgcaaatgggtctggacgttcgcctggcccttgtcgatcaggaaacgctgcaggcgctccatgcagaagcccagggcaatgctgtaggggtccgccgggtcgctgtatttcttgacgtgcttagccttgtcgatgaccgcggcaatgagtgtgaattcagcgtcgccgatcagctgggttacccggtcgatgaacgatgcccgcgtgttaggatttagcaggatgttgaaatcgccggtcgccttgcggatttcatgaccgtgcagcactatgctgtcatggccccagaagtcgaatttgaaccgctggaaagccggcacgatcttttcgatgtatttggccttttcgaccacgcaaaaggcgagcgcgaaaaccgggtgatccgggttgatgttggtgaggccgtgatcgccgctttcgtcgatgtagacaatgtattcgctgtaattcatggcgagacgttaccccaagtcgacgctggggccagcttggctggctcataatcgaccgctattcgagcacggagccgttcgcagcttgacccaatcgagaaaccagcggccgttacagggacaggatgtctcgaaaggctagaggttagacgtacgcccgcttgggtcctcatttgcatactctcgcaagtttttagagaggcccgatcgagcatccgctccgggcctcttttcccaatttagcccgttgaaaatgcgagctattccgcgatgcaccgtccatcgtgggccggcccttcatggcgagctttttgggaccgcagtcaaaatttcgcaacaaaatggggagccgattgacagttccatcaaaattgtctacataaatgccagcctgattgtggtgacgccattttgtaatcaattctggaggcctttgtgttcaatcatcgccattacgtgccaattttgaaatggaaaatgggagagtaccaggcgctcagccgcctggcggggccggtcaaggaccgcatcacccccctcctcgaaatccccccggtcgggttcgacttcgagacgcagcggaacaaggagagcgcagacgaccacctgggcgacttcggcaagcgcctgaaatccaagtggcaggcccggccctgctttgttgacttgaagcacctgcccgcggcgacccgatgcgctgggggacgccactgcgtcgaggttctgttcgagactgcccgcgccgaaggctgcgcggccatcccggtcgtcagtttcgcaaacgacgccgcattcctggcggccgtggccaccgtttcccggcaggaccggcgcggcgtctgcctgcgcctgtcccttcccgacttcgaccggcacaatctccaggccgacatcgagaacctgctgcgccccatggcggacggctatggcgaatgcgacctggtgatcgatctcggcacgccgacctatgtgccgatcgcgatcatggtgacgatcatgcagacgctgatggcccgggtccccatgctcaaccaatggcgcaccgtcaccatcgccggcacgtcctacccgaactcggtggcgaacatcgccgcgccgtaccagttgctgccgcgccatgaatggcaggcttatcgcgcgttcatcgcaaccatcggtcacgagacgcggataccgaccttcggggactacgccgtcgcccaccctgacctggtcgagctcgacatgcggatgattaagccgttcgcgaagctgcgctacaccatcaccgaccactggcatgtcgcccgcgggacgccggtacggacccacggcttcggccagtaccagcagatgtgcgcgacgctggttgccctgccttatttcagtggccgcgcgttctcggccggcgacgcctatatcgcggactgcgcggcaggcaccgtcacgacgggaaatctgtcgacgtgggtgtgggtgtcgacgaaccggcatctgacgaaggtggtcgatgacctcgccagcgcgcacgcgctttcagtcgctgccgaataagcggccgaagctcctgcaggtcgacggtttcggccaggtatttgtagagaacgccgcgcggttttctgagcaaagccggcggtgcgccgcgctcctggaggatttcaacgacttccggtcgccagagcaattcggccagggcgagcggatcgatggtggggttctgcgcaaaggcctgcgcagtctcgaagctgatgccgccacgcggtcccgccgtcacgaccttgataccccaccattgcgggatcagcggcttcgccttctccaaatggcgctcgccgacaacgagcgtcgcccggtccaggacgagcccataagtggcgatctgggcgggaagccgttccagcgtgtctgaatcgcttttgatctcgtaaccgtgcaggtagccatttacgacggcgatatcgacccggcaggtgccatgacgcaggcccaactcgtcgagcaccaaagtgtcggcgtcgccgtgatgctctttcagcacctttcggtgcagagcctgtctgacatcccgatctcgcacgactaaatcctcaggaggggcgcggccctaatatgccgcgatacagcccaacaaaccgttgaatcttcgctagcgatcgacctcatcgaatcacaatagcgccgaagaagccgcgatgaccacccgctttgcggccagagcgggcaaaaagctgtgacccgagtcctcccggcaacagatggcggcaagtcccgtccgcgtacggcgtattacatacttaagctttcatttaggaattgcccgtatgttttggacatgaccaagcgcgtgatttcagttcgactttcggacgaacgcctcaagcaactggatgaggtgtgcagccggctgggcatgaaccgctcgcaggtaatcgacgccgcgttgcggctggttccagaggtgatgtccggaaaggcagagctacactatgaccccgaacggtttaaacgatccgggcaaactgaataaagaccgactggcggccctggtagccctgctggtgatggtgatggtggctgcccacagcggctatcggctacacattggcctaactgggatcacgttcgagcaaaatgctcaggtcaccgcccggtagcctgggcgattgttccggagtgtaggggatggaaaatgccggctctccaattcacttcggactgtttcaccgatagcctcgcttctgctttgcgcctattttgaaatcatagctatgtcggcccttgggacgaatacgtttcgatccgaacagtgccggcacgcccaatgcgcctccaccttctcacaagcgagcactcgccaaagagctatgcctgaatctgggtgacggagcc

SEQ ID NO: 168 - DNA, 63003 bp, Bradyrhizobium colbertium
  misc_feature (13157)..(13167): n is a, c, g, or t
  misc_feature (32060)..(32069): n is a, c, g, or t
  misc_feature (60148)..(60157): n is a, c, g, or t
gaagcagccggtccatcccattagcggacaggccagagccaaatcaaggccgaatggtcgcggcgccgggcgacaagatggcacattgagttggcgggttgtggggctcgttaatgcacgcttagcttaattcgagttaggtcggtagtgtgcaccctgcgggccagtcgctcaaagccaggtgcgcaaattctgtaagagttaaagatgaagatcaagcttgctctcgcagcgttcccagtcttcggcatcgctgttctcggctatgcttacgcccgtggctatccgccgttcgcctcgcaatttgtacagacctgcgaaacggcaatccaggagcggttggcagttccctctacctatcaacggattgggctggacgactccagaagaacgatcaggtgggacgaatttttcgcagacccggagcgcgctgtatccgcgtcaaccagaagatccatgatgcaagctgcgcgccacccgccggttcagtacgtggcgctcattgactaccaagctcaggactccatcggcgccatcattcgacaaagggcatcatgtactttcaactcgctcgatggaagcgatgcgcctacccgtacgttctgggtgaagatcgatggcgaacgtaatctggagtgggccgccagacagcccaatgccacaacgctacatcggcgcttgttgaaaaatctgtgatgcgccggcgggtcgggtcggctattggcccaaagcggatgcccctggttgcccgcccatgtccgctgtttggggcagagctgatacagtcgcccggtggcgcgatctgtgcgcacgtgctccaggccgggacgagagcgaggatgttgcgacgttcttcagctcaaccagaatttcggcgttgccggctccagccttccgcccatgcgcaccggtgcaatcttgagcgcgagccccgtcgcgtcgtccgtttccacggcgacgccgctgagcgttgccgcgcccgcggccggctcgaagcgggctgacggaatgccagacgtgaaccttcgcagcggttcttccttctgcatgccgatgatggaatcgtaatcgccggtcatgccggcatcggtcatgtaggcagtgccgcctgcgaggatctggtgatcggcggtcggcacatgggtgtgcgtgccgacgacgaggctggcgcggccgtcgcagaagaagccgatgccctgtttctcgctgctcgcctcgcaatggaaatcgaccacgatggcgtcggcggcgacaccgagcgggcaggcgccgagctcgcgttcgagcgcggcgaagggatcgtcgaacggggtcatgaagacgcggcccagcgcgttgacgacgagggcgtgcttgccgttcttggtctcgaccagggcggcgccgcggcccggcgtgccgcgcggataattcgccggacgcacgagacggtcggcgcgctcgatgaagacgagtgcctcgcgctggtcccaggagtgattgccgagcgtcaccgcatcggcgccggcctcgaggaattcctggtagatcgcctccgtgatgccgaagccgccggcggaattctcgccattgacgacgacgagatcgagcgaccagtccttgaccatgccgggcagatattcggcgacggcctcgcggccgctgcggccgacgacatcacccacgaagagaatgcgcaacgtcagaactccggaaatcgaacacgtctgattccgttagcacataatccagcgccacgtcgtgcgatagtgccggaaccgcttcgatctcctgcgccgcgaaagccaggccgatgccgatgatgtgcttggctttgcgcatatgcgcgaaggtgaaatcgtaatgtcccgcaccgtaaccgatgcgatggcccaggcggtcgaaggccgcgaggggcgtcagcatgatgtcgggaatgacttccgcagccgcgggggacggctcgggaatgccgagcgggccaagcattaggcgatcgctcggatggaagatgcggaagatcagcgactgaccgcgcgcggtgacgcaaggcagcgccagcttcgcgccttgctccgcgagcttcttcaagagcggcatcggatcgatctcgctgcggatcggcgaatagccggagacgatgctgccgggcaagagctcgaacggcagcccgcgcctggcgagcttcgcagcggcggcggcgcgcttcttctcgctcaacgcgtcgcgtctggcgagggctttggcacggagttcggctttggaagcggacatgcgctttggtcctcacgtcatcacccgccttgtacgcaattgcgcactggagcgggtgatccagtatcccagaggcggtggtgaatcacacgaaggccgcggcgtactggatgccccggtcccacgtgcgcaattgcgcactcggggggcatgacacccactgaacttgccgcagtcttttcgaacagacacgaaccagaagcagacagtgcgaagccgcgtacgccgttgaagcactcgatcccggagttccctacgaaagtaggtgggcaccatatgtccgggcccacgggcccggccagggacagttccctaaaggatcgataaggccccggggatatatggctcctgacgcacgtcgcagcctcgcctgcgcaatgtaacaacgatagtgaggaagtgccagtggcggcgggggctggtgcccacctctccccagcggggagaggtgggccaccgtccccagcggcaacggatcgttccgatgactctcacccgatcgcgatgccgcctccgacggtgcggttcaggacctgggtcgacttctcgatgcgctcggcggctgcgttcagcgcgttgaccacggcggtctgggtcatcctggcgcgttcgacggcggcgttgcggaagtccctgagctcggtcagctcctgctcgagggtgcggacgcggttgctggtgtcgatcaattcgtcgcacacggtgagcgccgccatcacggtgaggcgcgcatcgccgatctcgccgaattttccgcgcagcgactggatgcgcgtctccagggtttcggcgagcttgagcagccgcacctcctgaccctcctcgcaggccatgcggtactgccggccgttgatggtgacgttgatgtggctcatccgtcctctccggtatcgagcaccgagcgtatcgtgacgattgcggaatccagccggtcggaaatctcgcgattggtgcgctcgagcttgcgcgctttcaccagcgcgccgtcgagctcgtcggcaagccgcgagcgatccgcgccgagcgcctggatccgcgcagcaagctcgttctcgtcgcgatcggcatcgcgccgccgctccactgcgctttcgagtgcatcaagcgcagccgtgagcctgcgcgtcgcgatctcgatctcgacggcagaggactccgtcatggcagagctgttggacacgcgatcgttcatgcggtcagcggcggaacctgtggtctatccccggtggcttgccgtccggcaaaagactcggttcggcaagcggttagaagcagaaatttacgtggcaagctagcccagcgcaacgccgccgcaaaactatgcaccgatcaatcgggatgggatcgcgttccgatccctccattcccggcaggcacgcgctgccggaaaaccggtctccacacaggcaacttttacggcgaaaccggcgtttgattgccttggactcccggaaccgaggtgctatcccagccccgaccttcagtggccgccaggctcctcccgcgcgggcgtacagcgccaagcgcctcatttcagacggatttcagacatgacgcaggtcgatcacacccgtatggccaacgcgatccgcggcctttcgatggatgctgtcgagaaggcaaaatcgggccatcccggcctgccgatgggtgccgccgacatcgccacggtgctgttcacgcagttcctgaagttcgacatcaatgctaccgactggccggaccgcgaccgcttcgtgctgtcggccggccatggctcgatgctgctctattcgctgctccatctcctcggcagccccgagatgacgatcgaccagctcaaggatttccgccagctgggatcgctgaccccgggccatcccgaacacggccacaccaagggcatcgagaccaccaccggtccgctcggccagggcatctcgaccgcggtcggcatggcgctcgcggagaagatgctcgccgccgagttcggcaagaagatcgtcgatcaccacacctacgtgctcgcctccgacggcgacctgatggaaggcgtgtcgcaggaagcgatcgcaatggccggccattggaagctcaacaagctgatcgtgctctacgacgacaacggcatctcgatcgacggcccgacctcgatcgccgattccgtcgaccaggtgaagcgcttcaagtcggcggggtgggccgcggagaagatcgacggccatgaccaggccgcgatcgccgacgccatcacacgcgcgaagaaatcgagcaagccgacgctgatcgcctgccgcaccaccatcggcttcggcgccccgaccaaggccggcacgtcgaaagtgcacggcgaggcgctcggcgccgacgagctcaagggcgccaaggagaagctcggcatctcgctggagccgttctcggtgcctgatgacgtgctgaaggcgtggcgcgcagcgggcagccgcggcgcggctgcacgccaggaatgggaagcgcggctcgccgagctcggcagccgcaagcgcgccgagttcgagcgccgcctgcgccatgagcggccagcttcgctcgccaaggccctgcgcgcctacaagaaggagctgctggaaaagccgatgacggcggcgacccgcaagtcctccgaagccgtgatcgaagtgattgccggcgccatgccgatggaattcctcgcgggctcggccgacctcaccggctccaacaacaacaaggcgaagtcggcgacggctttctccgcgaagacgccgaagggccgcttcatccattacggcatccgcgagcacggcatggccgcggcgatgaacggcatcttcctgcatggcggcttcgcgccgaacggcgcaaccttcctggtgttcaccgactatgcgcggcctgcgatgcgcctcgccgcgctgatgggcgccggcgtcgtctatgtgatgacgcacgattccatcggccttggcgaagacggcccgacccaccagccggtcgagcatctctccgcgcttcgcgccattccgaacatgcgcgtgttccgtccgtgcgatgcgatggaggtcgccgagtgctgggagctcgcgctcaaccgcgtggatggcccgaccgtgctggcgctgacgcggcagaacctgccgcagctgcgtacctccgcgcccaacgacaatccttgccagcacggcgcctacgagctggtcgcagcccagggcgaagccaaggcgacgctgttcgcgtccggttccgaagtggagatggcggtcgccgcccagaagcagcttgccgagcgcggcattccgacacgcgtggtttcagtgccctcgctcgagctcttgttagcgcaaccaaaggaacgccgtgatgcgatcatcggcaacgcgccgatcaaggtcgcgatcgaggccgccgtgcgctggggctgggacgccgtgatcggccaggatggcgaatttgtcggcatgcactccttcggagccagcgcgcctctcaacaagatcttccagcacttcggcattaccgccgaggctgcagttaacgctgtgctgaagcgcatttcctgagagttgagcttgccgcaaaaaaggactacgtaatccctcatatgatcaagcaccgcccggccgaaccgggcgaacgcccctaaaaaaccctcgcaggcgcgtatagcgcgttgtgcgggatgacaacggtcgttgaaggagacgaaacatggcagtccgggtcggaattaacggttttggtcgcatcggccgcaacgtccttcgggccatcgccgagtcggggcgcaaggacatcgaggtcgtcggcatcaacgatctcggcccggtcgagaccaacgcgcatctgctccgtttcgacagcgtccatggccgcttccccggcaccgtcaccgtcgatggcgactcgatcaatctcggcagcggcaagatcaaagtgacctccgagcgcgatccctcgaagctgccgtggaaggatctcggcgtcgacatcgcgctggaatgcaccggcatcttcacctcgaaggacaaggcctccgcgcacctgaccgccggcgccaagcgcgtgctggtctccgcgcccgccgacggcgccgacgccaccatcgtctacggcgtcaaccacgagacgctgaccaaggatcacctggtcgtctccaacggctcctgcaccaccaactgtctcgctccggtcgccaaggtgctgaacgatctcgtcggcatcgagaccggcttcatgacgacgatccatgcctataccggcgatcagccgacgctggacacgctgcacaaggacctttaccgcggccgcgccgctgcgatgtcgatgatcccgacctcgaccggcgccgcgaaagcgatcggtctcgtgctgcccgagctgaagggcaagctcgacggcgtcgcgatccgcgtgccgaccccgaacgtctcggtggtcgacctcaagatcgtcgccaagcgcgccaccgacgccaaggaaatcaacgccgcgatgaagcgcgccagcgagcagcagctcaagggcatcctcggctacaccagcgcgccgaacgtctcgatcgacttcaaccacgatccgcactcctcgaccttccacgaggaccagaccaaggttcagaacggcacgctggtgcgggtgatgtcctggtacgacaacgagtggggcttctcgaaccgcatggcggacaccgccgtcgcgatggcgaaggtgatctgaccttcgcagcgacttcgtcattccgggatggcgcgaaggaccagacccggaagctcgagattctccggggcgcaattgcgcaccatggttcggtgccagcgcgccgccccggaatgacctcctagaggcccgggacaaggaagcgtccgatgaccaacacattccgcaccctcgacgacgtcgacgtgacgggcaagcgcgtattgctgcgcgtcgacctcaacgtgcccatggagaacgggcgcgtcactgacgccacccggctcgaacgcgtcgcgccgaccatcacggagatcgccggcaagggcggcagggtcattctgctcgcgcatttcggccggccgaagggacgcgatgccaaggactcgctcaagccggtcgccgaagcgctggccagggtcgtgaagaagccggtcgccttcgccgaggattgcatcggcgagccggcggccaaggccgtcgccagcctgaaggacggcgacatcctgtgcctggaaaacacccgcttccacaaggaagaggaaaagaacgattccgccttcgtcgcggagctcgccaagctcggcgacatctgggtcaacgacgcgttctcggccgcacaccgcgcccacgcctcgaccgagggcctcggccacaagctgccggcctatgccggccgcacaatgcaggccgagctggacgcactggagaaagcgctgggatcgccgaccaagcccgtgatcgcgatcatcggcggcgcgaaagtctcgaccaagatcgacctcctggaaaatctcgtcaccaaggtcgacgcgctcgtgatcggcggcggcatggccaataccttcctgcacgcccagggcgtcgcggtcggcaagtcgctggccgagaaggacctggccgccaccgcgctgcgcatcatggagaaggcggacgccgccaattgcgccatcattctccccgtggatgctgtcgtcgcctatcacttcgcggccaacgcgccgtcgcatgcctatgggctcgatgcgatccccgccgacggcatgatcctcgatgtcggtccgcaatcgatcgcgcgcgtccacgcagcgatcgatgatgcggcaaccttggtgtggaacggaccgctcggggccttcgagatgcagccgttcgaccgcggcacggtcgcggccgccaagcacgccgccgagcgcaccaaggccaagaagctgatctcgatcgcgggcggcggtgacaccgtcgcggcgctcaaccaggcccatgtggccggtgacttcacctatgtgtcgaccgccggcggcgcgttcctcgaatggatggaaggcaagcccctgcccggcgtcgaagttctgcgcatcaagtaagcaagcggcctcgcaggccccaacgggagaaaaagacagatggctcggatcacgttacgtcaactgctcgaccacgcggcggagaacgattacggcgtaccggccttcaacatcaacaacatggagcaggcgctggccatcatggacgcggccaaccaggtcgatgcgcccgtcatcatccaggcctcgcgcggcgcgcgttcctacgccaacgacgtcatgctcaagcacatgatggacgcggtgaccgaaatctatccgcacattccggtctgcgtgcatctcgatcacggcaacgagccggcgacctgcatgaccgcgatccaggccggcttcacctccgtgatgatggacggctcgctgaaggccgacggcaagacccccggagactgggaatacaatgtcggcgtcaccaagacggtgaccgatatggcccatctcggcggcatctccgtggagggcgagctcggcgtgctcggctcgctcgagacgggcatgggcgacaaggaagacggccacggcgccgaaggcaagctcagccacgaccagctcctgaccaatcctgacgaagccgtgaagttcgtcagggagaccaaggtcgacgcgctcgcgatcgcgatggggacctcgcacggtgcctacaagttcacccgcaagcccgacggcgacatcctcgccatgaacgtgatcgaggagatccaccgcaagctgccgaacacgcatctggtcatgcacggctcctcctcggtgccgcaggagctccaggacatcatcaacgcctatggcggcaagatgaagccgacctggggcgtgcctgttgccgagatccagcgcggcatcaagaacggcgtgcgcaagatcaatatcgacaccgacaaccgcatggcgatgaccggccagatccggaaagtgctcaaggacagcccggaggagttcgatccgcgcaagtacctgaagcccgcgatggaagcgatgaccaagctgtgcaagcagcgcctgcaggaattcaacaccgcggggcaggcttcgaaaatcaagaaggttctgacgacggccgaaatggccaagcgctatgccaagggtgaactcgatccccgcgtcgcgtagcgatcgcggaggcggcgtaaggaccgcagcaccgtcttccgtcattccggggcgcgcgtagcgcgagcccggaaattcatggtgccaccatcgacgcggatcaatggattcctggctcgcgccaaggggcgcgccccggaaggacccggtctccccccttaacctgcgaccaacgttaactcggcaattgcccgagaacggtctattttcccgggcaagggcagagtcgttttgggagacctctcgatgaatctgactgagctcaacaagatcgcgaccgcgatggtcgcgcccggcaagggcatccttgccgccgacgaatcctccggcaccatcaagaagcgctttgatgcgatcggcgtggaatccaccgaagagaaccgccgcgactatcgcgagatgctgtttcgcgccaaggatgcgatgagccagtacatctccggcgtcatcctctatgacgaaaccatctggcagaacgccaaggacggcacgccgctggtgaagctgatcgagcagagcggtgccattcccggcatcaaggtcgacgagggcacgcaagccctgccgatgtgcccgggtgaaacagtcaccgtcgggctcgacaggctcgccgagcggctgaagaaatatcacgagcgcggcgcccgcttcgccaaatggcgcgcggtgatcgacatcggcagcggcactgacggccggggcatcccctcgatgaccgcgatcagcgtcaacgcccacgcgctggcgcgctatgcggcgctgtgccaggcggcgcagatcgtgccgatcgtcgagcccgaggtgctgatggatggcgaccacgacatcgagcgctgctatgaagtgacgcagcgcgtgctcaacaagaccttccaggagctgcgcgtgcagcgcgtcgcgctggaaggcatggtgctgaagccgaacatggcgatcgcaggaaagaaatgtccgaagcaggcctccgtcgaagaggtcgcggagaagacgatacggctgctcaaatcctgcgtgccggcggcggtgcccggaatcgccttcctgtccggcggccagtccgacgaggaggcgaccgcgcatctcaacgccatgcacaggctcggcccgctgccctgggggctgaccttctcctacggccgcgcgctgcaggcggcgccgcagaaggcctggtccggcaaggccgagaacgtcgccgcggggcagcgcgccttcagccatcgcgcacggatgaacggccttgcttccacgggcgaatggcaaagcagcctggaacagaaggcagcctagaccttgtcgaacaaaccgcccccgccgcgcccggcgccgcgtctctacctcgcgacgcctgtggtcgatgatcccgctgcgctcgtcgccgagctgccgggcctgctcgcctcggccgacgtcgccgccgtgctgctgcggctgcaggagaccgaccagcgcaccatgatctcgcgggtcaaggcgctggcgccgccggtgcagaaggcgggcgcggcactcctcgtcgacggtcatccggacatcgtcgcgcgcggcggcgctgacggcgcgcatctcaccggccttgccgcgctggaagaggcggcgccctcgctcaagcccgatcgcatcgccggcgtcggcggcctcgccacgcgtcacgattccatgagcgcgggcgagatgggcgccgactacgtgctgttcggcgagcccgacgagaacggccagcggccgtcgtcccaggccatcgccgaacggctggactggtgggccgagctgttcgagccgccctgcgtcggctttgccgtttcgctggaggaggcctacgacttcgccgcgagcggcgccgatttcgtgctggtcgacttcatctggaccgatccgcgcgggcccaaggctgcgctgatcgaagtcgacgccgcgatcaagaaggcccacgcgacggcgaccgcgagccagaatcctgcaggccaggagcacggctagcgcccgacatgaagctcccctgcatcaccctgctggccacgctgctgctgacagcgcccgcggtcgcgcagcttcagatcgcgccgccggccacgacgccgagcgcaccggcggagaagcacaaggcaaaaccgcccgcgcccgccaagaagaaagaggcagcaccggcgccgaaaccttcggcctctccctcgcccaagccggccgcgaccgtgatccccgcgccgccgccagacgatcccaatgtcgacctcgtctacggcgcctatcagcgcggccagtacaagaccgccttcgagctcgccaccgcccgtgcgcaagccggcgatcccaaggccatgaccatgctcggcgagctctattccaacgccatgggcatccgccgcgactacgccaaggcggccgaatggtacaagcgcgccgccgatgccggcgaccgcgaggcgatgttcgcgctcgccatgctgcgcatctccggccgtggcggcacggtcgacaagaacgaggcggtcaggctgatggcctccgccgccaagctcggcgagcccaaggcggcctataatctcgcgttgctctacctcgacggccagaccttgccgcaggacgtccggcgctcggcggaactgctgcgtcaggccgccgatgccggcctgcccgaggcgcaatacgcgctggcgaccttctacaaggaaggcaccggcgttccaaaggatcctgaacgcgcggtgcggctgctccaggccgcatcactggccgacaacgtcgatgccgaggtcgaatatgccatcgccatgttcaacggcaccggcacgccgaagaaccagcccgcggccgtagccctgctccgcaaggcatcgcgccagggcagcgcgatcgcacagaaccgcctggcatgggtgctgatcaacggcgcgggcacacccgtggacaaggtcgagggcttcaaatggcacctggtggccaagaccgccggcaagggcgacccggagctcgacaagcaattgtccgatctgccggccgaggaacgggccaaggcggaggccgccgccaagaaatggctcgggaccaaatgacttgacgttgggtccctcgcagggcacccactgcctcaacccggcggttttcgcgccatttcccccgttcaagtccagagcccatgctgtactccgccactatcaacgtcatggtcaaggccgcgcgccgcgccggccgcagcctcaagcgcgatctcggcgagatcgagcatctgcaggtctcgctgaaggggccggcgaatttcgtctctctcgccgacaagcgcgccgaggagatcctctaccaggacctcgccaaggcgcggcccggctacggcttcatcggcgaggaaggcggcacccgcgagggcacggacaagagccacacctggatcgtcgatcccctcgacggcaccaccaacttcctgcacggcatcccgcaattcgcgatttcgatcggcctcgcccgcgaaggcacggtgatcgccggcgtgatctacaatcccgccaatgacgagctctacatcgccgagcgcggcaagggtgccttcctcaacgaccagcgcctgcgcgtggccggccggcgccagctgaacgaatgcgtggtggcctgcggcctgccccatatcggtcgcggcgaccacgaggaattccgccgcgagatgaccgcgatccaggaccgcgtcgcgggcctgcgccgcttcggcgccgcctcgctggacctcgccttcgtcgccgccggccgcctcgatggctattgggaacggannnnnnnnnnnggcggcacagtgagcgacatcgacacgccgggtgatgcgctgaccacaggccacgtcgtgtgcggcaacgaattcgtgcacggggaactggtgaagatcttgcggaaagcggcgtaagacgcggcttctcgatcgtcgttccggggcgcgcctcctggcgcgaacccgggaatccattcacccgcatccattgtagctcgatgcattccggggctcgcgttgcgcgcgcccggaatgacgcacgagtgcctcaatggctcgtgtgcgcccgcgccggcggtcctccataggccttcttgccttcattggccgtcgccggctcccggtccccgcccagcacgcgctgcaccgagacgaagaacaccggcaccatcaacagcgccaggatcaccacggcgatcatgccgcccatcacgacgcttccgagcgcctgctggctggcgccgccggcgccgtgggcaatcgccatcggcagcacgccgcagatgaaggcgaggccggtcatcaggatcgggcggaagcgcaggcggcaggcttcgatggtggcttccaccagcggcttgccttctttccgcagatccttcgcgaactcgatgatcaggatcgcgtccttcgcggcgaggccgatgatggtgatgaggccgacggtgaagtagacgtcgttgggcaagccccgcagcatcgccgcggtcaccgcgccgacgatgcccagcgggacggtgagcagcaccgcgagcgggatggtccagctttcatagagtgctgcgaggcacaggaacaccacgaacacggacagtgccaacaggaacggcgcctgcgagcccgacagtttttcctgcagcgattgtccggtccattcatagccgaaaccgcgcggaagcctgtcggccagttgctccatctcggcgatcgcgtcgcccgaggtgaagccgggcctggcttcgccggagattcgcaccgccggataatagttgaagccggcgatctgcgtcggaccgcgcgcccattccaccgtggcaaaggacgagaacggcaccagctggccacggctgttcttgacgttgtagttgaggatgtcctcggtccgcatgcggtcgcgggcgtcggcctgcaccacgacgcgctgcatgcggccgcggttcgggaagtcgttgatgtagttggagcccagattggtcgagatcgtgttgttgatgtcctcgaaggtgacaccgaaggcgccggccttctcgcggtcgaccatgagattgaccacgccagcctctggcaggccctcgatatagaccttctgaagcaccgggctcgcattggcctccgcgatcagctggtcggcggcgcgcatcaaggccggatagcccttctggccgcggtcctgcaggcggaacgagaagccggaggagttgccgagattgtcgatcggcggcggctgcagcgccgcgatcttggcgtcgcggatcgacgagcccaggtcgcggttgacgtcgttgacgatcgccgcggcggaatcctgcggtccgcgctccgaccaatccttcaaggtgatgaaggcctgcgcggtgttcatgccctgaccggagaagctgaagcccgtgaggaaggtgacgtctttgacgcccggccgcgcggcaaggtatttttcgaccttctcgatcacggcctcggtgcgggcgtaggacgaatctgaaggcgtttgcacgtcggtggtgatgaagccctggtcgtcgaccggcaggaagccgccgggcaggctgacgaaggcccaggaaaggccgaccagcagcgcggcatagaccagcatcagccggccggtgcgcttcagcgagaagccgaccgtcccctcgtagcgaaatcgcgtggcttccagcacgcggttgaaccagccgaatacgaagttgctcgaatgagcgtgtcccttggcgacgggcttgagcagggtcgcacagagcgccggggtcagcgacagcgcgaggaaggccgagaagccgatcgcggcgaccatggtgactgagaactggcggtagatgatgccgaccgagcccgggaagaacgccatgggcacgaacaccgccatcagcaccaaggtgatgccgatgatggcgccggtgatctgcgacatcgccttgcgtgtcgcttccttcggcggcaggccttcctcggccatgatgcgctcgacgttctcgaccacgacgatggcgtcgtcgacgagaattccgaccgcgagcaccatgccgaacatcgagagcatgttgatggagtagccggcgagcagcagcgtggtacaggcgccgagcagcgccaccgggaccacgatggtcgggataatggtgtagcggatgttctggaggaacaggaacatcaccacgaacaccagcaccacggcttccaccagcgtcgtcagcaccttcttgatcgaggcctcgaccacgggcgtgatgttgtaggggatctcttaggtgatgttggccgggaagaagcgcgacagctccttcatcttggcttcgaccgcgctcgcggtcgccagcgcattgccggtcggcgacatcagcaccgacagacccgcggtcggcttgccgttgaggcgtgtgttgaactggtagctgaggccgccgacctcgacgcgcgcgacatcgcgcaggcgcacggtcgagccgtcggcattggctcgcaggatgatggcgccgaactcgtcgggcgaggagagttggcccttgaccagcacaagcgccgaagtgcgttggttggacgtcgaaggctccgcaccaatgctgcccgaggccacctgcgcgttctgcgcggcgatggccttgtttacgtcatcggcggtcagcccatagccgacgagcttggccggatcgacccagacgcgaagggagcgctccgtcgagtacagcgtggcgcggccgacgccgggaatgcggcggatctcacccagcacgttacgaatcatgaagtcgccgaggccgacctcgtccaggctgccgtcggtcgagcttagcgtgatgatctgaagcaccgcgctggaggcttcctcgatcaggatgccctgctgcatcaccgcgcgcggaaggcgcgcctcgacgcgcttgatgcggttctgcacctcgaccgaggcgtcgttggtatcggtgcccggctggaaattggcgatgatctcgacctgtccgagcgagtcgctggtcgattcgaagttgaggatgccggatgcgccgttgagctcctcttcgatcagccgcgtgacgctgttgtagaggttttccggcgaggcgccgggatagctggtcgagatggagatcgatggcggcgcgatgatcgggtattgcgcgatcggcagcagcggcaccgcaatcgcgccgatcaagcagatgaacagcgcgacgacccaggcgaaaataggcctgtcgatgaagaaactcggcatttgccgctctaccctcgttgtttcactgcgttctcacagcgagggcgcggaacgcgcgtttcaccatgagggcccggctgtcctcggtcgccatccttcgagacacccgctgtggcaggctccccaagatgccgaagcacccgcggagctgtccgttaccgcgtgacctgctgctgggcgtgccggttatccgcggtcgcgcccacctcggaccagggctgaggctgcaccttgtcgccggctgcgaacttctggaacccttcgaccacgaccttgtcgccggccttcaggccttcggtaacgaaccagagtccgtcctgcaccgaacctgtgcgcaccgcctgtaccgcgatatggttatcgtccttgacgacgaatacctcgctgccaccgccgccgttgcgctggaccgcctgctgcggcaccgcaatcgcatcggaatcgagaccctgttcgatgcggacacggacatacatgcccggcagcaattcgcgtttggggttcggaaactcgccgcgcaacgtcacctgcccggtgtgggcgtcgaccttggcgtcggaaaacagcagcttgccctcaagggaatagatggtgttgtcgtcgagcaccaggcgcaccttggcggtatccgaggcgatgcgctcgaggtcgccggtctcgaaggaacggcggagctgattcagttcgttcaccgattgggtgaagtcggcgtagatcggatcgagctgctggatcgtggcgagattggtctcgttctgcacggcgagtgcaccctcgctgaccagcgccgcaccgaccacgccgtcgatcggcgcacgcacggtcgcataatcgagattgagctttgcccgggcgagttcagccttgcggccctcgacttcggcatgggcctggcgctcggctgcgatcgccttttcattctcggcttccggagcagcgcgatccttggtgagggtcgcgatgcgatgtgcctgctgcctggcctgcatcaatgccgcctcagccttggcaagcgcggcctcattggccatcacctcgacctcgaaggggcgcggatcgatgcgatagagcggatcgcccgcctttacctcgctaccctgccggaacagacgcgcaaccacgatgccggacacgcgcggccgcacgtccgacacccgcgtcggtgcgatgcggcccggcagttcgcggaccacggaccgcggctgcggcttgacgacgaccacgctgacatcgggggccaccggctgggctgcggaaatggcggagctggattcgtcgcaagcaccgagtagcggcgtaagggccgcgagcatcaatgcaacgcatgccgatcgcgcgcgaagtcctgacatgaagtgtagtgccccgatattgttgatactgatcgcgctccgcgtgggcccattctgggcctctctgcggcggccggtaccttcaaaatagaatggacttgctgcgacgcaacgcgtatcgcgggcggctcattgtcacacgacgcaagtcattgaaatcacgaaggtttggccaagtcactcgattgtgagtccagttccatcgccgcgtgctgcgacggaacatcgcaatcagtcggcggctttcatccgatagtggctgattccccattcagttcccccagcatagccgaacaagcctgatgtcgcgagaaggaaccaccgccagcgacgcatcaaccgggcggtctcctcgccatagaccctgcgcaggcacacctcgatcgcgccgcgacgcgcatcgaaattggcgagccagtcgttggcggtgcgctgatagtgcgtaccgctccagcaccattccttctcgatcgcaaagatgtcgtcgaattgcctgacgagatgatggctcggcatcagcccgcccgtgaagacatgctgcgcgatcccgccgtcgcgatcggaccggtcgaacagatcggacccggtgcgatgggttgcgatgtgcatcaagaagcgcccgtcgggcgcgagccatgagcgcaagcgcgtcagcagcttacgccagttcatcatccgctcgaacgtctccaccgagacgatgcggtcgaattggccgttgggcgcgaacacgttcatgtccgccgcaaccacacgcaggttcagcaaaccgcgctgctctgcctgctcctcgacatacgcgcgctgcgcctgcgaggtcgctaccgccgtcaccttggcgtgcggaaactgccgggccatccaaagcgacaaggagccccagccgcagccgagctccaggatggtctgcccgtcggcgagaccggcatgctcgacggtctggcgcagcgcctcctcctcggcttcctgcagggtggtcgcagtggtcttgtagaagccgcaggagtacttccggttcgggccgagcacctccgcggagagggccacgggcacatcgttacgcccggcctccggttgctcggcgatcggccgcagcatcatccggccggcaaaggcggcatcggcggcggcgtcatggccggcaaggcgcatggcggtgcgggagcacagccgctggatcgcggcgcgcatcaccacatccggtagcggcacgcgttcggcagtcccgatgatcgcggaaacgacgctcatgcggccccagaatgtcgagcttgcagtcacctgcttatcaaagcgccgcttccggcccgggttccgaggggctgtccccgaaatcggcgcatccggcgctttttttgggctggcgctgtgccatagtgcgcactgcaagcaagcttacgtaacggatgataccggccatgccgtctggcacttcccgctccaccatggatatcgagtacaccaagctgtcctcgcccagcgtcttcctggtgcggatgctggtcttcctggtgctctgcgcgctggtaagcgtggtgctctacaaacagattatccaggccttcttcgccaatcccgggctcaacgccctgatcggggccgtgctgttcatcggcatcgtgctggccttccgccaggtcatccggctctatcccgaggtctcctgggtcaacaatttccgcatcgccgatccgggccttgcgccggcccggcacccaaaactgctggcgccgatggcggccatcctcggcggcgagcgctctgggcggatgacgatcacccagaccacgatgcggcatctgctcgattccatcgcgacgcgcctggacgaggcccgcgacatctcgcggtacatgaccggcctcctggtcttcctcggcctgctcggcaccttctggggtctgatcgagacggtcggctcggtcggcaaggtcatcgacgggctcaaggtcgggggcgattccggggcgctgttcgacacgctgaaggagggcctcgccgccccgctcggcggcatgggcatctcgttctccagctccctgttcggacttgccggctcgctggtcctcggtttcctcgacctgcagtcgagccaggcgcagaaccgcttctacaccgacctcgaagactggcttgccaccaccgtgcgcgaatatggcggcagcgaggtgcctgccgcctccggcgggggcgtcgccagcggcgagctccaggccgcggtggagcggctgcgctcggtgctggaagaaggcagcggcagccgcggcaccacggcggcgatggcgagccttgccgaagcgatccaggcgctggtctcgcacatgcgcaccgagcagcagatgatccgcgaatgggccgacggtcagggcgagcagaaccgcgagatccggcgcctgctggagcggatcgcgcgccagcctgagaagagttagcagctagacaaaagaagcgaccatggctcttgcccgcgcccgccgcagcgaaggcggcctcaattactggcccggcttcgtcgatgcgctgtcgacgctggttctatcgatcgtattcctgctgtccgtgttcctggtcgtgcagttcttcctgtcgcaggaggtcaccggcaaggacaaggcgctggagcagcttaatgccaagatcgcccagctcaacgagctgctctcgctcgagaagctgggcaagcttacgctcgacgaccaggtctcgcagctgaaagccggcctcgcctcggccgagagcgagcgcgaccgcatcaagggtctctacgatggcctcgccgccgccgggaacgacgcgcaaggcaagacggcggagctcggcaaggcgctggactcggagaaggcggtctcggcacgggcacttgcccagatcgaggtgctgaaccagcagatcagtgcgctcaggcggcaattggcggcgctggaagaagcgctcgatgcctccgagaagcgggacaaggaatcgcagaaccggatcgccgatctgggatcgcgcctcaacgtcgccctggcgcagcgcgtgcaggaattatcgcgctaccgctccgaattcttcggccgcctgcgtgccatcctcggcaaccgccccgacatccgtatcgttggcgaccgtttcgtgttccagtccgaagtcttcttcgacaccggacaggcgatgctgctgcccgagggccgcgccgagctcgacacgctggcggccgcgctgatcgagctcgacaagaagatcccgagcgagattccctgggtgctgcgagtcgacggccacaccgacgtgcggccggtgagcggcgcgaacttcaagtcgaactgggatctgtcggcggcccgctccatctcggtggtgcagtacctgatctcgctcggcgtgcccgcccagcgcctcgtcgcggccggcttcggcgaattccagccgctcgatcccggcaacagcgaggaagcctacaagcgcaaccgccgcatcgagctgaagctgacggagcggtagtggcgtcagatacatcccgcttcgtcattgccgggcttgacccggcaatccatcaggagggattcttttcaaaatgaatggatggccgggtcaagcccggccatgacgagtcaatcccgatgatccaactccgcccctatcgctctgaggacgaggccgccgcaatcgacctttggcatcgcacctggcagcaggcctacccgcagatcgactttgcggcgcggctcgaatggtggcgcgggcgctggcgcaaagacctggtgccgaaggccgcgatcgtggtggcagagcttgacggcgcgttgatcggtttcgtcaccatcgatggcgaaggctatctcgaccagctcgtggttgatcccgtccattggggaacagacgcggcaaggctgctggtggacgaggccaagcggctgtcagcttcaggggtcacgcttctcgtcaacaaggacaatgcccgcgccatccgcttctacgagcgcaacggctttgcccatgcaggcgacgatgtgaacccgacctcgggccggccggtgctgaagatggaatggaagccgtaggctccctctccaacgctgcccgcctcacgccccctcgaactgcagcctcgccagcctcgcataaagcccgttcgcagcgacgagctcggcatgcgtgccctgctcgacgatcttgccctggtccatcaccaggatgcggtcgcaggacagcacggttgcaaggcgatgcgcgatgacgagcgtggtacggtggcgcatcagctcttccagagcggtctgcaccagcgtctcgctttcggcgtccagggcggaggtggcttcatcaagcagcaggagcggcgcatcgcgcaggatggcgcgggcgatggcgatgcgctgacgctggccgccggacagcgtcacgccgcgctcgccgagcgccgtctcgaaaccttccggcaggcggcggatgaactcggcggcgtgcgcgagctcggcggcgcgctcgacctccgcatcggtcgcatcgggccggccgaagcgaatgttctcgcgggcacttgccgcgaacaccacggattcctgcggcaccagcgcgatgcgggcgcggaaatcgcgcggatcggcggatttgaccggtacgccgtcgagcgagatcgttccgctgcgcggatcgtagaagcgcagcaagagatgaaagatcgtgcttttgccggcgcccgagggaccaacgatcgcgaccttctcgccggggcgcacggtgaacgacacggcatcgagcaccttgacgtcgcgccgcgccggataggcgaagctgacctgctcgaaaccgacctcgccgcgcgccggcaccggcagcgcaagcggcgccgcgggcgcggtgatctcgggcttcacgtgcaggatctcgaacaggcgctcggccgcgcccgatgccgccgagacctcgccccagacctcgctgagctggccgaggccggccgcggcgaacaccgcgtaaagcacgaactgaccgagccggcccggcgtgatcgcgccggagagcacgtcatgcgagccgatccagaggatcgcgaccacgctcgcgaacacgatgaagatgatgatggccgtgagcacggcgcgggcctgggtcgaggtgcgcgcggcctcataggcctgttccacctcgccaccgaaacgcttctgggcaaattgctcgctggtataggcctgcacggttcggatcgcgccgaccagttcgccggcataggcggaggcgtcggcgagggtgtcctgcgcattgcgcgagaggcggcgtacccagcgcccgaaggcgaccagcggcagcacgatgagaggaatggccagcagcacgaaaccagaaagtttcgggctcgtgatcaccatcatcgcggcggcgcccaaaaacatcatgaggttgcgcagcgcgatcgacacggaggcgccgaccgccgatttgagctgggtggtgtcggcagtgagccgcgagatcagctcgccgctgcgcgccgaatcgaagaaggcgggcgacagcgacagcagatggccgaagacgtcgcgcctgaggtcggcgacgatgcgctcgccgatcgtcatcacgaggtagtagcgcgccgcgctcgcgagcgcgagcacggcgaccaccgccagcatcaccgaaaaatagctgttgatcagctcgatgccctcgggcgtcaggccgaaatcgatcatgcggcgcaccgcgatcggcaccagcagcgtggtcagcgcggcaaccgtgagcgcgacgaaggccagcgccgcccggccgcgatagcggctcacatagggcgcgagcgccagcaacggccggagctttgcgcgtcccttcgccggctgctcgatcagctcatcctcgatcgatggcgtgtccgcgacgttcatttcgggccgatcgacatattggtcatcaagccgttccactgcgctcatgagattcgacccgttgcatgcgttcgctcccaattaggccggtgcgcgggtagtggcaaatccgggatgtcccttaggggcaaaccccgcttcaacaggccggcacagcttgttttgcctgatttcgtgaggtatagagccgcccaaatccgtcattcgctagccacccaagaaggcgccggagcgccgaggaattgccatgaaagccgagattcatccagattatcatacgattaaagtcgtcatgaccgacggaaccgagtacctgacccgctcgacctggggcaaggaaggcgacacgctgaacctcgatatcgacccgaagtcgcacccggcctggaccggcggctccgcgcagatcatggaccgcggcggccgcgtctcgcgcttccagaagaagttttcgggctttctcaaaaaggactgagccggccgcaaggctggagacgaaaaacgcccctgaggaaatcaggggcgtttttgttttggggccagcgtcatcgcgaggagctcgcgacaaactaaattgcggagcaatttgcgctgatgcggcgaagcaatccacacttcctccgcagagggatttccggattgcttcgcgcgctcgcaatggcgacggacagacgctaccgctcgaacgcggccttcagcgcgttgagttgcggcaccagagggttgccgatcgctgcatgctcggtcggcggggtgtggatcgtgctgtcgaggcggcgcacgcgggtctgcaggctcatcgagcgatggatcaggtcctggagctgggagggcagcttctcgatggtgtcggcgggaccgggatcggcggcggtgagcttgaccttggtcttctcgcggttggcctggctcagcgtcatctcgccctccttcacggcgcgatgcagcagcagccacgaggcgagttgcatcagacgcgtggtgaggcgcatgctctctgtcgcgtaggtcaggctgacggcgcgatcgagcgccttggcttcgatgcggccggcgccgtcgagataggcagcggtttcctcgacgaggtccatgccctcacggaacaggttgccgaaggctgcagagttggtgaaccgctcgctgagttgaacgagagcgccgtcggcctgcaaacgttccatggttaacgcctcttacgcaactgtttgactgtccggctttggcgccggcttatgataaacaaatcattgcgcgagcgggacgcggagtccagtgacaagcgcagatatggtttccgcgggtcgctccccgggaattcaaccgcaacgagatgcaaaaacgcaaaaaagagccgccggaagaccggcggctttgaaagttgataacagggaggcgtcaaacagagtggacaggagccactcggtgtccaaacgaggacagttccagtcataaacccgaaagcttaattcgaagtaaacgagcaaattttttgagacttcgttagccatgtcggccagtggccgagccgaggtcttgcgctccaacgcagtgcggcacgaacgctatcactgtcattccggggcgcgacgacgtcgcgagcccggaatccataatcacgagtggatgcagcggcccgccttgtcaggtgcccgtttcgatttcctggggtgatggattccgggctcggcgccgacgcgccgccccggaatgacggcgaagagattacgacttgaaaatactgttcgccgcatcgcgtgaggcgcgcttctttgcggccgcttcttccagtcgtgcgatctcggtcttgagcagcatgacgcgttcggtcagttcctcgactgacaacagcgagagatcttgaccgatttcatggctgatcttcttgcgcgggcggtcgtcgtcttcgatcggcatcctcgttcctcctgcgttcgcgccggaccatgaccgaggcggttgccagcttggatggcgctggctaagcaagggcctcgctttcatcccgcacctttgcccaaggacacatcatggacaagctgcccgcgcaaatgaccgtggtcgccatctccaagcccggcggaccggaggtgctggtgccggaacaacgggcgctgccgcagcccggtcccgacgaaatcctggtcaaggtcgaggctgccggcgtcaaccggcccgacgtggcgcagcgctccggtgcctatccgccgccgcccggcgccagcgacttgccaggcctggagattgcgggcgaagtggtcgcggtcggcagcaatgccaagcggcacaagatcggcgacaaggtgatgtcgctggtcgccggcggcggctatgcgcagtactgcatcgcccaggatgcccaggcgatgagcgtgccgccggcactgtccatcaaggaggccggcgcgctgccggaaaccctgatgacggtctggcacaacgtgttcgagcgcggcggcctcaaggccggcgagacgctgctgatccatggcggctcctccggcatcggcaccatggcgatccagcttgccaaggcattcggcgcgaaggtgttcgtcacggtgggatcgcaggacaagatcgacgcctgcctcaagctgggtgccgaccgcgccatcaattacaagaccgaggatttcgtcgccgtggtcaaggctgagaccaacaacgttggtgtcaacctgatcctcgacatggtcgccggcgactatgtcgatcgcaactatgatgctgcggcggtcgacggccgcatcgtccagatcgcgaccctcaacggcccgaaggtcagcgtcaacatcgccaaggtgatggtcaagcgcctgacccataccggctcgactctgcgcccccgtagtaatgcggacaaggcggcgatggtggctgcgatcgaagagaaagtgatgccgcttttgcgcgaaggccgcatcaagccggtcatggacagcactttcccgctggaaaaggcggcggatgctcaccggcgcatggagacgagcgcacatattggcaaaattgtgttggaggtctaggccatcggcccagcgggcagggtggaaaccctttgatttccctcgctttcgtggcatctatcgcgacgcaccggaccacttccgtcccggtccgatatcgccttttagattcgccttgcactgaagagtttgcgtcgaacgcggagaactggccttgcgtctgatcaggtgcctcgcgcccatcgcgctgggcctcatgattcttgtcgccgcgtatcccgcgcgcgcgctcgacgccgtcagcgtccgtagcgacgcgcccgcgatcgacctcaccggcgtgctcgagcatcagcgcagcgatgccgaccgcatccaggtctccaccgcgcccggcaccgacggcatcgtccgccgcatcgaggtgcgcgcgcgcgaaggcgggcagaactgggtggtgttcgcgctcgccaacaacaccgacgaccagctcgaccgcctgatcgtcgcaccgcactatcgcatcgtctcctccgggctgctgtggcccgacctcggcctgtcgcgcatcgcgaccatcacgccctcgatcggcgatcggccggaacgtcaggaaagcgccaccgcggacgtgttccgcatcacgctcgaccccggcgccgtcgtcaccttcgtcgcggagctgcgcaccgacaagctgccacagctttatctgtgggagccggaagcctacaaggacaaggtcaactcgttcacgctctaccagggcatcgtgatcggcatctctggcttgctcgcgctggtgctgaccatcctgttcgtggtgaagggcagcatcatgttcccggccgccgcagcgctggcctgggcggtgctggtctatatcggcgtcgatttcggcttctggggcaaagtgctcgacatgtcgaacaacgccgagcgcatctggcgcgcggcgggcgaagcgatcctggcggcaacgctgctcgtgttcctgttcgcatatctcaatctcagccgctggcacgtgcgctattcgcacatcacgatcggctggctcgcctttctcggctcgctggtggcgctcgcgctgttcgatccggcggtggcctccggcatcgcgcgtatttcgctggtgctaatcgccttcgccggcttcgcgctgatcgtctatctctccacccacggcttcgaccgtgcggtgctcttgatcccgacctggttcctcctggtggtctgggtggccgccgccggcatgacggtggccggctccgtcaccaacgacatcgtcggcccggccctgctcggcggcctcgtgctgatcgtgatgctgatcggattcaccgtgatgcagcacgctttcgccggcggcggcgccaccaccggcatcgtctccgacatcgagcgccgggcgctggcgctggccggctccggcgatctgatctgggactgggacgtgtctgccgataaggtcttcaccagccccgagaccgaagccctgcttggactgaagcgcggcacgctcgaaggtcctgcagcctcatggctcgaggtgctgcatccgctcgaccaggaccgtttccgcgccgcgctcgacagcgtgctcgaccagcgccgcggccggctggtgcaggatttccgcctgcgcacgccggacggtcatttcatgtggttcgcactgaaggcccggcccgtggtcggctcggacggcgaggtctcgcgcgtcgtcggcacgctcaccgacgtcacggaattgcgcaacgccgaggagcgcctgctgcacgattccgtgcacgacaacctcaccggcctgcccaaccgcaagctgttcatggaccggttgggtgccgtcgccaacttcgccaagaccatgccgacgctgcggccgacgctgatggtgatcgacctcgaccgtttcaagcaggtcaacgattccgtcggcattgcggtcggcgattccattctgctgacgctggcccgccgcctcacccgcatcctgaagccgcaggacacgctggcccggatggccggcgaccagttcggcctgatcctgctctcggagcaggacccggcgcgcatcaccgccttcgccgagaccatccgcaagaccatccgcgcgccgatcgccttcaacgaccgggagatcttcctcaccgcctcgatcggcctcgcgctctccgatccccaggttcagctgacggacgagatcatcaaggacgccgagctggcgatgtatcattccaagcggatcggcggcgaccgcatcgacgtctacaagcccgcgatgcgcgcgcggaagaccgatcgcctgaccctggagagcgagctgcgccgggccatcgagcggcaggagatcaccatcctgtaccagccgatcgtgcggctggaggatcgctcgatcgccggcttcgaggccctggcgcgctgggatcatccgaagctcgggcgcatggcaccgtcggaattcatcaccatcgccgaagagaccggcctgatcgtcgacctcggcatgttcgtgctcgaccagaccgccaagcagctctcgatctggcaacgcgcgatgcgctcgcgcgacccgatcttcgcctcggtcaacgtctcttcgcggcaattgctgcgccacgacctgatccacgacatccgtaccgtgctgtcgcgctcctcggttgcgcgcggcacgctgaagctcgaattgacggaatcgctggtgatggagaatccggagcacgccgcgcagatgctgacgcgaatccgcgagctcggcacggggctgtcgctcgacgatttcggcaccggccattcctcgctggcctatctgcagcgcttcccgttcgacaccatcaagatcgaccagtccttcgtgcgcaccaccagccgcggcacccgcccggtgatcctgaaatcgatcatcgcgctcgcgcacgatcttggaatggacgtggtggcggaaggcgccgagaccgattccgacgccgtcgagctctaccagatgggctgcgaatacgcgcaaggtttcgcttttggcgagccgatggacgccgatgccgcgatgcgcctgctgacggaagtgcggctcgaagcggcgagctagctctgtctgcgccgcagactcatcagcagtccaagccccagcagcagcgagaccaccgcaagaccgccccacaccaaccccgcttgctcgaggtagacgtcctgcgagaccgggtcgtagcaccggccgagttcgttgaagcagtcgcgccaacgccaatagcggaattcgaaggcgagcgctgacagcatgcccaacccgatcagcgctgcgccaaggatcccaccaagccagcgcaggatcatgcggcgcggcctcaccgcttcttcgacttctgcttcctgaacctcacgctctcgccatcgggcatgcgcgtcgccacgaagcccgcggcaaggcacgcttcgcgttgcggcatctggatgtcggggctgcgcaggctgtcccaccaggaggcgcgctgcgccgcgcgcggcagcgccgcgccgatgatctcctcgatctgctcgaagctcagcacaaactcctcctgcttctgccgcagcagatagtcgcgcaacgcgagatagtcgttcacgattgtcctctcacatcagctgctcaaaaccgtgcgtcgcataaaccgattcttaactcattgcggcagcgccgtcctaccttaaacactactcaagctttcgggcgcatccactatgtccgggagcaaacgatgctgtctggatggcgcgacgtcatggcccgccagccgtggcggatttcagcgaaactgctgatcatatcgtccgtggtgacggtgatcggcttttccgccatttgcgtcaacgtcatgctcgacatgcgccggggcgaggaggcgctcgcccgccagacgctggagaacctcgcgaccaccatcgaatccgacgtgaaccggaacgtcgagatctacgacctgtcgctgaaggcggtcgccagcaacatgctgctgcccgagctcgcgactgtttccaagacgatccgccacctgatcctgttcgaccatgcgacgacggccaagcatttcggtgccattcaggtcttcgatgccgagggccggctgaccatcgacgcgtccacgctcgatcccctcgccgagaatcggagcgaggaggactatttcagggtgcatcgcgacaatccgggcgccgggctcttcatcagccgcccgatgctgtttcgcggtgcctactcgatcgtgctgagccgccgcatcagcgataccgacggcggctttctcggcgtcgtcgccggctcgatccgcttcagctacttccacgaattgttcgagcgtctgaacctcgaccctgaagacaccatcacggtgctcaagcgcgatcgcaccatcatgatgcggcggccgttcgatctcgacatcatcggcacgaacctgaacgaccgccgaacctggagagcggacaatctccgggccggcgactcctattcgggacagggcccggtcgatccgacgccgcggctctacgtccgcagcggcggcagcggaccgctgttcgtggtggcgggcaagcctctggccgcagtattcgaactctggcagaaagaagcctaccgcatcggcgcagttgtgctggcgctcgcgctgttcgtgctggcatcgacgctcgtgctcgcgcgcgagatcggcaggcgcgccgaggccgagcgaaagctcgaggagatggcgacgacggacgcactcaccggcctgaagaaccgccgcaagttcgattccgtcatcgacactgaatggcggcgcgcgatgcgccagaaggttccgatcgcgctgctgatgatcgatgccgatcacttcaaggcctacaacgacacgttcggccaccaggccggcgaccaggtgctggtcggcatcgccatctgcatttccgattcggtgagccgcgccggcgactgcgccgcgcgctacggcggcgaggaattcgccgtactgctgccgaacatgtcggccaccaacgccttcaaggtcgccgagaccatccgtctcaaggtgcagggctggtccgacgatcaggcaatgtcgaccgtctcctgcggtatcgcaagcctcgttcccgatgcgggtatggattggccggtcctggttgccgccgccgacaaggcgctctatgccgccaaggcgggcgggcgtaatcagtcggtggtggcgagcctgccgcagctgtcgctggtggcgtgaagaactctctcgccctcgtcattgcgagccaagcgaaacaatccagnnnnnnnnnntggagagataacgctcgctactgccctagatatttcttcatctccgcgatcagcccgtcgcgcaattccgggcgcttcatgccgtaggcgatgttggcgcgcaggaagccgggcttggaaccgcaatcgtggcgctcgccttcgaactcgaccccgtagaacttctgcgacttggcaagcccgatcatcgcgtcggtcaattggatctcgccgccggcgccgcgctcctgggtctccaggatcttgaagatctccggctgcaggatgtagcggccggtgatcgagagattggaaggcgcggtgcccttggccggcttctcgaccatgccgtcgacctcgaacatcttcccgttgcgcttgccgacgccgcagatgccatattgatgggtcaggtgatcgggcaccgcctcgaccgcgaccagattggatttctcgccgagcgaggccgccatctcgatcatctgcttcaggcagccgggcgtgttgagcacgagctcgtccggcagcacgacggcgaacggctcgttgccgacgatgtcgcgcgcgcaccagaccgcgtggccgaggccgagcggcgcctgctggcgggtgaagctgacggcgccggcttcgggctggttctgggccaggatgtcctgctccgcctttttgccgcgcgcggccagcgtcgtgtcgagctcgaacatccggtcgaaatggtcctcgatgacgttcttgttacggcccgtgacgaagacgaaatgctcgatgccggcctccctcgcctcatcatagacgtattggatcagcggcttgtcgacgatggtcagcatttccttcggcattgccttggtggcgggcaggacgcgggtgccgaggccggcgactgggaatacggctttgcgaatcttcatgtgattgatcgaatacctgggagcacatgggaacggagcaatgcaccttgctagcctgtttgcagccgccaacaaaggcggatgtggggcctcgccccgacagacttaagaaaaaggccgtcaccaaaatttcacctttgttaagttattggcaacgctaaccaggcctcctgtggcggatttctcgggccgacgggtgggacatgatgcaatcagtggcagcgcgggcaggctttgtggccggagcaacgatgatcgcggcggccttgctgctgccggccagcgcgcacgcccaggcgcagaacggcctgtccaatctgttcggcggcatcttctcggggcccaaccccgctccgtcacaagcagcgccgagccccggcggctcacagaccggaccgttgccttggagcggcgaggatggcgcctccggccacccgctgatgacggccgccgcgatccgcgaggcagccggcaatttcagcaattgcgtcgcggcgatgtggcccgatgctgcacggcgtggcatcacgcaggacaactttcagcgcttcaccgcggggctctcgcctgacctgcgcatcatggacctcatggactcgcagccggagttcaccaagtcgatctggaactatctcgacattctcgtgaacgacaaccgtctcgccaagggccgcgagatcctcgccacgtacaaggcgcagttcgacgcgaccgaaagggccaccggcgtcgaccgctacatcatcgcctcgatctggggaatcgagtccaattattcgacgcagatgggtgatcgcagcgtgctgcaatcgaccgcgacactcgcctgcgtcggccggcgccaagcctatttcaaggacgagttcctgtccgcgctggagatcctcaatcgcggcgatctcaggccggagcagctgcgcggctcctgggccggcgccttcggcccgacgcagttcatgccgaccgccttcaagcggttcgcggtggatggggatggcgacggcaggcgcgacgtcgtcgacaatcccgccgacctgattgcatcgaccgccaacaatctcaagaaggacggctggcagtcgggccaaacctggggctacgaggtcgtggtgccccggggcttcaactacatgctggccgaccgctccaaggcgatgccgatcgcgcactgggaaaagctcgggctcaagcgggcgacaggccagcccttcccacatccctcgcagaaggcttacctgctggcgccggccggcgcccaagggccgggcttcctgatgctgcagaactaccgcgtcatcatgaagtacaacccggccgaggcctatgcgctggcgatcggccatttcgccgaccgcttgcgcggcgggcaacccttcgtgcagccttggccccgccaggagcgggagctgtcgcgcaccgagcggctggaactgcagcagctcctggcgcagcgcggcttctacaagggcaccccggacgggcagttcggcggccagacccgtgaggcgttgcgccacttccaggcctcgatcggggcgcccgcggacggattcgcttcatccgacatgctggaccggctccgcgggcggtaaaatcgcgcggaaagtaaccctgaaccggattttcggcaggccggcttgacgccgccagccgttctccggtgcatggcagaagaatccgcaagagaatctgcccgcttggcgcctgattccgttattatatcgagctaaattcgatcccccattgcgcgtgcccgagatcgcatgtcgaagaagtccctgttcaaggcgctgaccgagaccggcccgttgatcgcgctggggacggcgcttgcgatcctggtctcgatcgcagcgccagcctctgcgcaattcttcaacttcccgggcttcggcggaccgccgcagcgcgcggcgccaccgccgccgaggggcggcggaggtggtggcggctggttcggcggagatttcttcgcaccgttccaacagccgccgccgcaagcaccgcgccaggacttttcgcgcgcgccggcgccggccaagcgggacaccattcctgagaagaacgtgctggtgatcggcgacgccatggccgactggctcgcctatggcctggaagacgcctacgtcgagcagcccgacatgggcgtgatccgcaagcacaggacgaattcgggcctgatcaagtaccagccaaggggtgaaccctccgactgggcggccgcggcgaagggtatcctcgagaccgaaaggcctgatgtcattgtcgtcatgctcgggctcaacgaccgcgccgcaatccgcgagcccgcagccgacaaaccggacaaggccacggaaaaggataaagagaaggacaagaagcacgacagagcggcgcgcgccaagcagccggccaaacccggcgagacgaagccgggcgccgagagtgccgccaagccggacgacaagcctgccgatgccgatctgccgcaggacgacgccgacaatgccgatacgccggccgcagcgccggagaagacggcgcgcaaccccaacgggctctacgaattccgcgacgaccgctgggtcgaactctacggcaagaagatcgaggagctcgccaacatcctcaagtcgaaaggcgtgccggtgctctgggtcggcctgcctgcagttcgcggccccaagggcaccgcggacacgctgttcctgaattcgctctatcgcgaaggcgcggccaaggccgggatcacctatgtcgacgtgtgggacggctttgtcgacgaagcggggcgcttccttcagaagggcccggacttcgagggtcagatccgtcagctccgtagctcggacggcgtctatttcaccaaggccggcgcgcgcaagctcgcgcactttgtcgagcgtgagattacgcgcctgctcgcgggccgctccggcccgatcgcgctgccgagcgagccagccactcccgataccagcgccgagccgggcaagcccgcgccccggccgctggccgggccgatcgtgccgctggtcgcagcctcgatctcgaccgatcaattgcttggcggtcccgggacgcgtcccgctgccgtcgatgcgctcgctgcgaagaccatggtgaagggtgagccgcttgcggcgcctgccggccgcgctgacgattacgcctggccgcgccgggaagtcggccgggagcaggccaagggcgatgcgcccatggccgcaacgacgccggagggcggcccagctcagggtccgccgggagcggccgccgcggtcgcgccgccgaagctcgcgccgaaaaagccgccgatgccgccgcagcagccccagcagcagcctgcacaggcctcaccgtcatttcgggatttcttcggcttcggttctccgcaacctcccccgcgtcaattcgcgccgccgccgggactgcgcaatccagcgcaaagccctccgatcccgcgtccgcctggcaacgtcgggcgatcggcggagatgttccggtaatcgatctcgttcccggcgcgtcgcgagactctttgcgatatgccgcagagctgggctccgccgccttccggttcagcaaagaatcggccccgggtgaacagcgcatcactgggtgctgcgctgcttccggggcacgagcaggtgagctttccggtccgccttaatagcgccagcgctgtggcgggcggcgggcgggccgcgacatcaggagcgccagcgcgaagccgatgccgccggcaaccagcagcgcgccgagcggattgtcctgcaccttctgcgcgatagccttcgagccgtcgcggaaggtatcgccgctgttctcgtaagcgtccttggcgtagctcgccgcggtgtccgtggcatcacgcacggcatccttggcctggccgtagagattctgcaccgtgcccgcggcttcccgcgccttgcccgacgcctgtgtcttcgcatcgcctgccatgtctccgaccgcgccttcggcgcgcccggcgaattccttggccgacccaacaatccgatccgtgtccatgatgatcctcctcgatggtcagccggggtaaccgatcagaagcagcccagttccacgtcgttacgaaagtgtaggaggcgtgcccggatagagcgaaagcgcaggcggggaacggtcctgcgcgaggcgagaggccgagatcgatggctctcacgcattccgcgccatcagcccaccgtcgaccggtatcaccgcgccggtgaggaaggacgcggccggcaggcacaggttcagcgtcatatgcgcgacttcctcgggatcgccgtaacggccgagcgcggtgcggcgcttggcgtagatggtcttgtgctcctccgagatgcggtcagtgatcgccgtgcggatcgggcctggacaaatgcagttgaccgtgatgccctcgcggccaagctccacggcgagcgagcgcgtgaggctcgcgacgccgcccttcgctgccgaatacgggctgtgcagcgcggtggccccgagagcctcggtcgaggcaatgttgacgatgcgcgggcttttcgacttgcgcaagtggggcagtgcagcgcggatgatgcgcggatgcgccgtcagcatgacggcaatgctcctggcccaggcgtcctcataggcctcgtcgtcgatcgcgacacgcacggaaatgccggcattgttgacgatgatatcgagtgcgccgaaatgcgcggcgatatcgccgaccaccttcttgatctcgccgccgtcggcgacatcgagcttccacgccctggcagacgcaccgctcgccgcgatttccctggcgagcgcatgcgcgccttgctcgtcgtaatcggtgacggcgacgttcgcgccctcggcggcgaacacgcgcgcggttgcgcgccccatgccgctggctgcgccggtgacgagtacggtcaggcccttcacagaccggctgagttctttgaagtcggacatgggtctcctcgcgaggtgcttgttcttgttatgattgacaaggctggcatcgatccgcagacaggtcaaacaagcaagacaaaaggggaggccacgatggcaaacgagctcgatttctcaggcaagcaggtgctggtcatcggcggttccagcggcatcggcaacggcatcgcgcaggcctttcgcgcgaggggcgcgcaggtcgcggtctgcgggacgcgcgctcgcgcaacggaatattctgcggaggagggctccgatctcacgggccttgcctatgaccagctcgacgtcagcaatgccggcgcgatcgagacgttcaggccgcccttcgataagctcgatgtgctcgtgctcgcgcagggcgcggtgctctatcgccgcggcgagttcgagatggccggctttcgcaaggtggtcgaggtcaacctgatgagcctgatggcctgcgccactcgtttccattccatgttgcgggattccaagggttcgctgatcatcgtgtcctcgaccgcggcctatcattccaccatgggcaatcccgcctacaacgcctccaagaccggtgcggtcggattgacgcggacgttgggcgaagcctgggccgaagacggcatccgcgtcaacggcatcgccccggggctcgtcgacaccaagatgacgaaggtgacgaccgacaatccgaagcggctcgaaggtgcgctcgcgcgcatcccgctgcggcgattgggcacgccggccgacatggcgggcgcggcactgtttctggcttcgccgctgtcatcctacatcatcggccagacgctggtcgtcgatggcgggctcatcttgtaacgtgccggccttgtagcggggattgcgcgtcgcatcagcccggttgcggcgccgcgctcaccgcgccagccattgcgcgacgtccttctgcgaagctgcgcgcgccttggcatccatgccgagatgaccgcgctcgggcgcggcggcatcgctgctgccggcgtgaagcggcatgctggcgcggtcgaaatcgtgatcggcgccgggatagaccacgatgcgcgcgagggcgctgcggccgcgcgcgccatccaccatctgacggcaggccggcggcggcgacacgtcgtctgcggccccgatcagcacaagcgtcggcacccgcgtgctccatcccaaacccgccgagatccggcaatccggatagaacgcaaccgcggcgcggaaatccggactgagatcgcgcgccgcgctctgcggacgcacggcccagagcagcgcgtttgccccgttcgcccatccgatcaggctgacgcggtcgcgcgccacccagctctgcttcatcagccaggcacgtgaggctgcgatgtcggtgacgcggtcgcgccgcgccttgacgtgcatttccttgacgcgacattgcggcccgagctcgcgcgagccgtaactgtcgggcagcagcacggcattgccgaccttgagcagacgctcggcccacgcccggtagcgcggcaacacgggatcggagtggccgccgaggccgccgcaaccatgcagcgcgatcacggtcggaaacggccctgcgccctcgggcttgtaaagctgcgcatggagaatcccggacgcaatcggaatgtccaccggctgcggtgccggcgcggcccacgcggccgacatcagcagcgccaggaacatggcggccggcggcaggcgccgcggaccctgacgaagcaggccccggaaccggccccccttcacccgaggtattatcaagcggaaacgatggcaagacatcatgaaccggcggatttgacgggcggacaatccaccctatctatgctacatcccgtcaacatcgtgcccctccaaggccttacgtggagagaggccttccgcggagactttcgaccgtgctgaacaagttcggcccctcgggccatggcgaagcgcaggtgcagtatctcgacggcgatttccgcgtgatctcgccggggacgttcgtgcgctgcgcgatcaccgggacgcgaatcccgctcgacgagctgaagtactggagcgttgatttgcaggaggcctacgctacgcccgccgcggtgctgcagcggcactttcccggggcgcagaaacagtcgtgatgtcgtagattgggcaaaggcgcaacgcgccatgcccgctctcacgcgaagaccaacacgaacaaggggggcacgcttcgctttgcccgctgtatgagatcgaggccccggcatcgttcaatttcatcgaatccttcggtcgtatggaatccataggatcgctgcgatgaatgtggtctgaatggcgaacgatggatggcgagccaagccgtccgaaatcagggcctcgagaaccttcgttcgcgcgccttgtagagatgatcgctgatcaatctccggagcgcggccggatcatcgaagtcgagccggacggcgaatggcacgatgtcatcgggcactcccgcgccgccgcgcaagcgcgccagatccttctccgtcgtgacaagtgtgagctgctcgcgccgcgcctccgccgcgagcgcagcgagctcgtcgatcgagaacatgtggtggtcggcgaatgcgcgcgtatgggcgacatcgatgccgctggcgcgaagggtgcggaagaagcgatcgggatcgccgatgccggcgaaggcgaagacccgcttgccgatcagctgcgcgagcgaagtcgcatcgggcttcaggcgggcgcgcagctcgggcttgttgcgcttcgcaacctccgcggcgacctcgttggcggcattgccgccgccgatcagcaccagcgcatcggtgcgcgaaagctgggccttcagcggcgcacgcaagggaccggcgggaaacacctcgccgttaccgaggccgcgctcgctatcgatcacgatcagcgagacgtccttgagcaggcgcgggttctgaaaaccgtcgtccatcaggatcacggtggcgcctcgcgatttcgccagcgcgacgccatcgagacgatcgcgcgccacgacaaccgcgacgtcgcgcgccatcatcaggggctcgtcgccgacctcggccgcggtatgtcgtgcaccatcgaccatcaccgggccctccaggcgcccgccatagccgcggctgagcaccacgggcgtctcgccgagctcgcgaagcagcttcgtcagcgcaagcaccgtcggcgtcttgccggcgcctccgacatggtagttgccgacgcagatcacgggaatgccggcgtccacgccttggcgcagcatgcgccatgcggtgatggcaccgtagagcgcgcccaggggacggaggacaagcgatagcggggaacgtggccggtaccaaaaggccggctcacgcattggccgcccccatctcgatccgcaattgcaggagatacggctcaagcgcgatcatggtgcgatcgagcgcaccgccgagctgctcgaccacgttgccacctgcgcgctgcaccttttcgcgcaccgtcggctcgcccagcagcaggccaagctgcttgaccagggcctcctgcgtgtcggcctgccgcgccccgccactgctgtcgagcgcttcatatacgtcgctgaagttgaagacgtgcggaccatgcacgaccgcggcgccaagcttgatcgcctcgatcggattctggccgccatggcggaccagcgatccgcccatgaacacgactcccgagagtcgatagaacaggccgagctcgcccatcgtgtcggcaacatagatgtcggtcgtggccgtcggcagctcctcgcgcgatcgcaggctgggcttcaggcccgaggccgtgatcaggcctgcaatcgaggagccgcggtccggatgccgcggcacgatcacggtgagaagttgcgggaagaaaccggagaggctgcgatgcgcggcgaccagcatctcgtcctcgcccggatgggtcgaggcagcgacgatgatcggccgcccgcgcgtcatcgccgccaagcgttcgagcttggcgggatcggccgggggcgccggcacatcgagcttcagattgcccgtggtgacgacgtcgcggccgccgagcgcggcaaagcgctcggcatcggtcttcgactgcgcaaggcaaatgtcgaaccgcgacagcagtgccgagatggtgccgtgcatgcgccgccagcgtgggaaggatcgcggcgacatccgtccgttgatcagcaccataggcacccggcgcgccgcgcccgcgaggatcaggttcggccacaggtcggattcgatgaacagcgccagggagggtttccagtggtcgaggaaacgcgcgacatagcgcggcgaatcgtacggcacgtattgatggatgacgtcgggcggaaagcgctttgccaccaccgccgccgaggtgaccgtgcccgaggtgagcaggatgcgcagattgagatcgcgcagtcgctcgatcagcgccgccgcggccagaacctcgccgacgctcgcgccgtggatccagaccagcggaccatgcggccgcacgtcccgggaaagcccccgccgttcgccgacgcgcgcgggatcctccttgccctgcttcagccgccgcttgatcagcgcaggcgcgagcgggaccaggccggttgccaggcgccgatacatccgcagcgtcatcggcagcgcaatgggaagcgacttaggcatcttccggtcccgggcggccgagctgcgcgtaggcgcgccgggtcgcctcgttcagcgtgtcctccagctcctgccgcaacgcttccatcgtggcggcatcggcatccggtggaacatggatttccttgatgccgaccaatgcgccccgcccgaacggcaaattgatggtggtgcgatcccagttcttcagccggacgaagcggctggtcgccatcgcgaaaggcatgatcggccgccccgattcccttgccagcataataatgccgagccccgccacgcgcgagcgcttggggacatcggcggtcagcgcgacattacaaccggcctgaagcgtccgcaccatttccttgaaagcgccacaccacccttgcgatggaacgccccgccatggtcgccggagccgcggatggtgccgatgccgagccgttcggcggcgatcgcattgaactcgccgtcgcgatggcgggagatcaggaccttggcccgataggaggccttgtcctggttcttgatgaagggcgtgaggaaatgctggccgtgccagaacgcgaaaatggcggggagctgcggctcgacgcgtccatagacatcagccggatcgatcgtgaacttgttggtccgccagaccagacgcagatactcggccgccaggaccccgacggcacgctgaaaccagctgcttcgcagcgtattgcgaagcagttttttcaacgcgccggttcttgattcgggtcgagcagccgatgcaggtggacgatgaagtagcgcatctgcgcgttgtcgaccgtgctctgcgccttggcgcgccaggccgcatgggcggcggcatagttcggatagaggccgacgatatcgacgtcatccagattcttgaaggtgttgtgctcgagatcgacgagctcgccgccgatgacgagatgaagcaattgttgcggggcgctatctggcatggcttctgttcctaacgggctgcccggcaaagcagtgttcgacaagcacgacggaagcgcttcaggccaagggacggttgcgaaaatgcgcgacaatgcccgcatgacgatcgcgtcccgctgccaccagcaccccgtgcgccacttcccggcggttatagaggatgggttctccggagaggtcgctcattctaccatccgcttcctgcacgatcaaatcggccgccgcaaggtcccaatcatggctgttgccccccgcaaaggccgcatccagcgcgccatgggcgacccgacacagacgtagcgcgagcgagccgattcgccgatgcagcttgatgtcgccgagtgacggcttcagccgctcgaccagcggcttcgggccagcgacgcgggcgaagtcgagttcggatccggccgtcgcgctgaccggctcgtcgttgagcgtcgtgccctggccgcgcactgcaaagaagaattcgtcgctggccggtgcgaacaccgcggcaagcaccggcgaggcgtcctccaccagcgcgacgctgacgcaccattcgtcatggccccccagataattgcgcgtgccgtcgatgggatcgacgatccatgtcagccgccgcgacagccgcgcagcgtcgtcagcgctctcttcggacagccagccatagtcgggagtggccgtgcgaaggcgcgcttcgagcaggtcgttgacggcgatgtcggcctccgacaccggcgaggatgcgcccttggtccacctcctcagctcggtgcggaacatcgagtgcgcgagcgcgcccgcttccctcaccgtgtccttcagcagcgccgcatcgcgcgtcaggatcttcgggtccagtacgtgcgcgtcaacgtccgccaagcgtcaaaccctcgatgcgcaccgtcggcgcattgatgccgtaccggaactcgagattgttcgcgggctgcatcgacttgaagatctcgaacaaatggccggcgatcgtcacctcgctgacgggataggtgatctcgccgtttttgatccagaagccggaggcgccccggctgtagtcgccggtgacgccgttgacgcctgaaccgatcaggtcggtgacgtagaagccctgcttgatgtcggagatcagctcggccggcgtcggcgtgccaggctcgagatgcagattgtacggaccgggcgagggcgaggaggaaacgccgcgatgggcgtgaccggtggtggtgagaccgagttcgcgtgcggtggcgcaatcgagcagccaggtcgtcagcacgccctcgtcgaccagcgccgccctcttcactgcgacgccttcggcatcgaaggtctgcgagcgcaggccccgccggcgcagcggatcatcgacgatgcggatgttcttcgcgaacaactgctggccgagcttgtccttcaagaagctcgtcttgcgcgcgatcgaagcgccgttgatggcgccgaccagatgaccgaccagcgagcctgcgacgcgcggatcgaacaccacgggcaccttgcaggtctcgaccttgcgcggattgtagcgcgccacggtgcgctcgccggcggaacggccgaccacctccggggacagcagatcggcgccgtgcggcgccgaggtgaagtcgtagtcgcgctccatgctggtgccctcgcctgatatggcggtggccgagatgccctggctggagcgcagataggagccgtggaagccggtggaggtgacgagcaccatgcccccgatgccggcggatgcggaagcgccgccagacttggttacgccctttacgccgagcgccgccgcttcggccgcgagcgcgcgacgctcgagctcggcggtcgtgggcagatcgggatcgagcaggtcgaggtcagggaagtcgcgcgcgagcagcgcgggatcggcgaggccgacatacttgtcgtcgggcgcgacacgcgccatcgcgaccgcacgctcggcgagcttggtcacggcatcgccgctgacgtcgttggtggagaccaccgcctggcgctggccgaccagcacgcgcagaccgacatcgtcaccctcggatcgctccgattcctcgacccggccgtcgcgaacctcgacgccctgcgagacgccccgcaccgcgaccgcatcggccgcatccgcaccggcgcgcctggccgcctcgaccagccgctgcgcgagatcggaaagtgcggactgatcgaacaggtcgcgattggcctgcgacgttttttgggtcgaaggcgtcgagcttggtgaagagttcacgaacgaaatcctgttggggcggggttcgggaccgggacccacagatgtgccctgatcgcgtggacttcaagcattttcagcccgccaaaagctcagattcgcgacttcggcgcaacgtctcgtcaatcatgcgcgccaaggtcttgtcaatcatgagtagcagtgacggtaggttaaccagcctttttaagcggtttcggaaagcggcgcgataaggtcctcgcatcgaccgggaacataatcccggcggggagaaccaagccgtgaggcgtcaaacagcaacatgcgggatcgctcccgccgggtcgagccgcttcctgcggctcgaccctctttcccttccggtccgcttcgatgcgcatgatccgcgcgccgacggatacaccaggcaaatcgagcttcatcgcgagcgtgtcgtgctgcgccgtgccgttcgcggcatgcagatggcgatcaacgtgcgcgtcgccgacttcaccggcgtcgcattgcgtggcaatgacgaagcgcggacgctcgtgctcgtgcatcgcgatccctcactgtccatcccgctgctggtcggcgccgatgctgacgagatcgccgaggcctgggcgatctggagcgagctcttcgcgctgccccagctcgacgaaggcgctcgcaagcccgcagcgcgccgccgccgcgccaacgcgatccgcgcccggcgcccgaaattcttgatgcgccggcgtgccggcatcgcccgcgagctgtccgttcatcgcggcgagcgcgagatcatcgcgcggaattgagtttggtcttgcagggtgggtagccaaaggcgtaacccgcctcttctgcttccgtcgatggaaacagtggtggattgcgcttggccaatccgccctgcgcaatgcgctacgcggcctgcatgaccgcatccgccagcaatcccgcgaacagcagcagacctgcatcgcggttcgacttgaacaggcgcaggcacagttcgggatcgtcgatcctcaagcgcatgatctgcgatgccagatgtacggcgaaggcggcaagcccgagccaggccggccagcctgcatctccagaggccagcgcgacaccgatcagcatcaccgcgagaccatagaacaggatcagcgcctgatgcgtatgcgcgccgaaaaggcgcgcggtcgacttgatgccgatcagcgaatcgtcctcggcgtcctgatgtgcgtagatcgtgtcgtagccgattacccaggaaatggcgccggcatagagcacgagcgcggtcaggtcgatgcgtccgaaggtgaccgcgaaccccatcagggcgccccaggaaaaggcgaggccaagcacgatctgcggccaccaggtgatccgcttcatgaaggggtagatcgcgacgatcaaaagcgaggcgatgccggtcagaatcgcaaagcggttgaactgcagcaacaccacgaggccgatcagggcttgggcgaccatgaagaccagcgcctgtctcgtggtcacctgccccgacggcagcggtcgcgagcgcgtgcgctcgaccttgtcgtcgagatcgcggtcggtgatgtcgttccacgtgcagcccgccccgcgcatgacgaaggcgccgatgaagaacagcaagatggtgagaggcaggtcgcgaacgtcgtgcgccatgccggcggcgagcgccgccgaccaccagcatggcatcaagagaagccaggagccgatcggacggtcgaagcgggacaagcgcagatagggccgcgaccagtgcggcgcgatagtatcgacccagttgccggtggaatcggcaacgcgggcggatgagtcgctcatcgggtcaggacgtttccgttgagcgtatcgaaggtgctgccgcccttcctgctggcattggcttccggcgcggagcccgagcccagcacctcgctcagcgagggcccggcaggacgcgcctgttgctgctgcatctgctgcgcaacgttgcagaccttggtcgccatggcctcggtgttcttgtggccgtccttcatctgcgcgccgatctgcggcgggattccgcacttcgcggcgttggcctcgatgtatttgatcatcttcacttcagcctggctgaagttgcggatcagcttgcaggcctcgtcgggcggtgcgcggcggtcgctcgcagccttgatcagcttgccgcgcttctcggcttcctcgcgcagaggagcgaaggccttcatgcagtcatcgccgggaccagcctgcgtcggcggagccgcgctgaaggcgccggggccgccgattggggcggcgccgttcacgggaaaggacgattgcggcgccgcgccgactgaagcggtcggtgccgaaccgttgacggggggaaacggggaattggcggcggcctgattgggcagcggcgccgggaacgcgctttgcgcataagcgccggaggcccccacggagaccagggcagcgatgatcggaaccatcagatgacggatcatgaagacagtctctccggcaggagcttacgggactcggcgtctttccaattgaagcgcaaccagcgtgttcgcgtttttacgattcccgccgggccttaacaacccgttgaatagggcaagagcgcggcgcggggacgcatcaattcggcgatatttacccccagaagccccgatttcggttaagaacggcgccaagtcggacctttgacgatgccctcccacgattttcgcgccccccgcctgttcgtcgacgcccccctcgtgcaggacgcccgggtgccgctcgaccgcgaccagagcaattatctgggcaacgtgctgcggcttgccgccggagccgcggtcctggccttcaacggccgcgacggcgaatggcaggccgccatcgagggccgcaagcggccggatgccctggtgatccttcagcagacccggccccaggaccgactcgccgacctcacctatgtctttgccccactcaagcatgcccgactggactacatggtgcagaaggccatcgagatgggggccgccgccctgcgaccagtcctgacccggtttacccaggcctcccgcgtcaataccgagcgcatgcgcgccaatgtcgtcgaggccgccgagcaatgcgggatcctcagcatcgccgccgttgccgagccggtcccgctggagcgcttcctaagccagcgcccggcgggtcgcttgctgatcttctgcgatgaggcggcggaggtccaagatcccgttcagagcctgcaaggcgcccgcgacgccgccgaaggtatcgacgtgctgatcggccccgaaggcggctttgccgaggaagagcgggccctgctgctgcggcagcccaagatcctgcggctggcgctgggcccgcggatcatgcgggccgacaccgccgcagtggccgccctggcgctggtgcaggcggtgctgggcgattggcgcggtggtagcggctagatcgtttcccgcatcgcgcggtgcagggtctcggacggcagttccccgaaggctgccctgtagctcgccgcaaactcgctcagatgccggaagccatgtgcaatcgcgcaggccttcacactgcgccgcgccggaccgctgcgcagttgcttgcgcaccgaccagagtcgcaggattcggctatagcggtgcgggctcatgccgcagatggcccgtgtcgcgctctggagagtgcgaacggacacgccgacctggttggcgagttcggtcgtcttgtgccagaccgtcagatcttgccggatcagcctttccatctccccgacgatccgccgatagccctccgtcgcggacgacacaggtccgccgcttacgccggtgcaaagcgcagcttccatcgtgccgagcagggactgctcgacggccgtcaacgacatcggctggttcaggaagtccgggtcatgagccgcgatttccagcgtgacagagatcagacggcgcagcgagacgagtacttccgatgccggattcaccagatgatagccatcagtcagttgcgcccagggctcgcgctggggcggagcgaaatacacgacagccatcaggcggccctcaggctcatacaccacgcaatcagaggtacccttcagaatgacgatagaactgcccatcggttggccgttgatgcgggccgaggtcacgttatccatcggcacgacgaaggcggcggcactggtcaattgatagccgcgaatgatccgcggaaaggttcttaccagagacagggtcaggctcggcaagctgagccgggcccgcatgatggccgtcgtcccgaccgacagcggcatgctggacgcgccggcatatctctcggtctcgccgaaatggtcgatgtcatacgccctgagctcgagggacgacgaaggcttgagtccctggaaggacatcaataggtccgtggccagattttgcgctccgtggcgcgcagtatcgagatggccttgatccatgccgtgccgcttactttgccttctttgccgatgtggcgctcttggaggcacgcagatcatccggcccgttgatgccggcacgcttgaggtcgcgaagcagcttcatcagcagcagcatgttggtcttctgcagttcgtggttgtttccaaacctgaatgcgttctgctcggtcacgatcagcccggctttggtctcttcaagaatcttccgcctcttcaggcccgtcacgcgacggcgaaccgtctcgagcggaaggctgagaaagcgggagagtgccgcacgcgagaccccctgcttgatcacatccggctcgacggcatgaatgctggagaatttctcgtccaagacgggatcgttcattacatggatgacattcgcgttcagaaccgcatgaacgataagaagatccagcggatcaaactcgtcgtaatgccggaacaactcgctcatcgagaacagcatataggccagcgtatgccgcgagaccgtccggatgatgtctgaagcattgcgcatgaatcggaaccaacattgatgttgtaaacgatggctatggcgaacggatcaccggccatacccaaaatgagtatgcgacgacttgccagcggtcttcgatttctcattgtgacgctcggccttgggcgcaatcagccctcgtttgccgacgcgttcgcgaggtgtgaatgctggatgttcggcgtctctgtcgaaccgattgccgccatgactttggtgcgcgagcacgcatccaagcgtttcggcagtgcgatcggcctcaaggtggcgatgaaagagatggctatgaacgaagatgttctgttgagcgcgaggcagttcgaggcgctgcggctcatcaaaacgtttctccgactcacaaccccccgcaggaggcagagggtactcgaactcgccgagcaccttgcggaagaagccgaatccaccgcaacagggtcggcgtttgccgcgactgatgcatcatccgcggacccggccagagacgttcccgtcccgaccgaatgaaaagccgatcctctcttccgcctcgcctcgcagcgaaactcgacgcgaggcaaggtatcaaaataccaggaacggaagtccaaacagtgcctatttcatgcgcggtcggcagtccggcggcgctcccgacttgttaagcgattgatcctttggaggtcgaaaccgcttccgggccatgctaaggggctgcgcgaacccgcttgcctgccttgccctgcccggttcgccgggccgatggacccgagagatgaccgcgactgccacctcaaatgctgccggctccgcctgggcggaaacgctgctcttgtcgttcgcgcaggccggctatgtcagggccgagccggcgatcctgcaaccggccgagctgttcctggacctctccggcgaggacatccgcaagagcctttatctcaccaccgacctctccggcgcagagctctgcctgcgcccggacctcaccatcccggttgcgcgcgactatctcgcctctggccgtgccggccagccggccgggttcagctatctcggcccggtgtttcgctaccgtagcggccagccctccgagttcctgcacgccggcatcgaatcgttcgcccgccaggaccgcgccgcggccgatgccgagatgcttgcgctggcgctggaggcgaccgccgccttcggcgtccgcgatgtggagatccgcaccggcgacgtcgcgctgttcaatgcgctgctcgacgcgctcgacctgtatccggtctggcgccgccgcctggtcaaggatttcaaccgcaaggtcagcctggagcaggatctggagcggctggcggccgcgaccacggcgacccgcagcgaataccagggcgtgctggcggcgctcgccggctccgaccgcaaggcggcactcgccttcgtcaccgatctgatgtcgatcgccggcaccaccaatgttggcggccgcaccacggccgagatcgccgatcgcttcctcgagcaatccacgctgaagggcggcgccctgccgcgcgaggcgatcgtcgtgctcaagcgcttcttgggcgtttcaggcaatcccgacgacgcgatcgccgagttgcgcgcgctgaccgcggatgcaaagctcgatctcgatgctgcgatcgaccagttcgagagccgcgtcggcttcatggccgcgcgtggcatcgacgtgaagcaaacgcgcttttcgacggcgttcgggcgcggcctcgattattacaccggcttcgagttcgagcttcatcacaggggcaacggcgccgagccgctcatcgccggcggccgctatgacgggctgatgacccagctcggctccgccgagccgattcccgccgtcggcttctcggtctgggttgacgcgctgacgaagatcggccgcaaggtgggagcttaagtcatgagcgcgccattcgttctggccgttccttccaagggccgtttgcaggagaacgccgaggcctttttcgcccgtgcgggactcaagctgtcgaaggccggcggcgcccgcgactaccgcggcacgattgcgggcctcgacaatgtcgaggtcgcctatctctccgcgagcgaaatcgcatcgcaattgtcgcgcggcttcgcgcatctcggggtcaccggcgaggatctggtgcgcgagaccatcgccgatgccgacaggcgcgtgtcgctgatcgaggggctcggcttcggctatgccgacgtggtcgtcgcggtgccgcaggcctggatcgacgtccgcaccatggccgacctcgatgacgtcaccaccggcttccgcgagcagcatcacatgcggatgcgggtcgcgaccaagttcgtcaatctgacccgtacgttcttccagacccacggcatcaccgattaccgcatcgtcgaaagcgcgggcgcgaccgaaggcgcaccggcggctggcagcgccgagctgatcgtcgatatcaccacgaccggcgcgacgctcgccgccaacggcttgcgggtgctcgacgacggcgtgatcctgcgcagccaggccaatctcgtggcgtcgaaggatgccgactggtcgccgcaggcgcgagagacagcccgtgtcatcctcgatcacatcgcagcgcgggcgcgggccaacaagtaccgcgaggtccggacccgcttccggcagtgcgatgccgccctgctgggcgaggcccacagccggttcggcgtcgaagctccttttggcggaccgacttcgtcagggatgctgacgctgcactgcccaccagggcagctttatgcgctggcgaccttcctgcgggagcatggcgccgagaccgtctcggtgggatcgctcgactacgtgttcgaccgggagaacccgctgttcgcgaagctcgaggcgtttctgggacgttgagccaggttcgttcagcatagcgacagcaaacggcagctaccatatgctgttgagaagatctaacacctctggaaccttgatcgatgacgctgggctctgacgtttccggcatgacgaccaccgcagcgagcgccgcagcgaaggggctgtcgatcgtcatccccgtctacaacgaggcggcgggtctatcggccttgcatcagcgcatctgcgatctcgccaagaccctgcggcaacgctatcgcctctcctgcgaggtcgtctatgtcgacgatggcagcaaggatgcgacgctggcgatcgcgcgatcgttgcccgcggacgcgatcgatgtccaggtggtgtcgctgtcgcgcaatttcggcaaggaggccgcgttgatggcgggcctcgaccatgcccggctcggtgccgtcatgttcatggacggtgacggccagcacccgccggcactggtcgagcagctggtgcggcactggatcgacgacggctatgacgtcgtctacaccgccaaggcgcatcgcgacaacgagcctttcttgcggcgggtcgcggtgcacggcttctacgcgctgatcaattggggtgctcgccagaagattcccgaggacgccggcgatttccgcctgctgtcgccgcgcgcggtcgctgcgctcaggcagctgccggagcgcaaccgtttcttcaagggcctcgccagctggatcggcttccgccagatccgcgtagactatgaacccgcggcgcgcgcccatggcgtcaccaccttcaacgccgcaagcctgctcggcctctcgatcgagggcctgacctcgttctcggtggcaccgctgcgcttcgccagcctgttcggcgtcattctcgccggaggtgccttcctgttcggcctttcgatcctctgggaggtgctcacgaccggcaagcaggtgcccggctatccctcgctcgtgatcggcctgatgaccatcggcggcgtgcagctcatcatgatcggcatcgtcggcgaatatatcggcaagatcctctccgagctgaaggcgcggccgatctacttcgtcgccgaacacagcgaaaagcactccgaggccgacaaggcccaggacgcctcaagccgggacgcggcgagcaggacggcggccgaatgagcgcggccgcggacctgcggcggatctggctctgcgcggacgattacggcatcagcccgggcgtcaatcgcggcatccgtgacctgatcgaacgcggccgcctcaacgcaacctcggtgatgatggtggggccggcgatcgcacgcagcgacgtcgaagcgcttcaatccgcggccgagaccagcccgcgctgtgcgatcgggttgcatgtgacgctgtcggcgccgttccggccattgacgatgcacttccgtccgctcgacggcgacatgttcatgccgttcccgaagctgctgcgcgcgggcctcctgcggcggctcgaccgcgaattcgtccgcaacgaggtcaagtcgcagctggcagccttcatggacgcgttcgggcgcgcacccgatttcgtcgacggtcaccagcacgtgcagctctacccgcaggtgcgcgacggctttgtcgatgcggtcgttgaggctgtgccgaacgcctgggtgcgtcagggcggccgcgatctaccgctcaggcagcggctggcgtcccccaaggctctggtgctcgacagtctcagcgcgcaattccgccgccgcgccggcaacgcaggcctcagcttcaatcccggcttcgccggcgcctatgattttacgcgcgccgccgatttcggcgcgctgatgcggcagttcctggaaggcctccccgacggcggtctcgtgatgtgccatcccgggttcgtcgatgacgtcctcgccagcctcgacccgatgacggacgtgcgtgaacgcgaacatgcctatctcgccggcgacgccttcccgcgcctgctggcggacagcaaggtgacattgggatgagccggcgcaacgacagcttgtcgcatacggaaatttaatccgggcgacactgttggggccataatggaaccctacatctcctgcgcgcttggtttgcgcgaaggagagagatcatgacgccgcaggaacgccagctcgtcgacgacctttttgaccggctttcaaagctggaaaatgcaccgcgcgatcccgatgcggtcgccgcgatctccgatggcctgcgcaaggctcccggcgccgtctatgcgctggtgcagaccacgctgctgcaggacgaagcgctcaagcgcgcgcataatcgcatccaggagctcgaatccgctcaggcgccggaccctgcccagtccggcggcttcctcgacaccatgcgcgatacgctgttcggcggggcaccctcacgtggctcggtgccgaacgtgccgccgcgcgagcagcgcccgacatggaatagcggccaggcgatgcagcaggcccagccgggctacggcgcgccttatggccaaggtccgggacaaggttttggcgccccgcccgcgggcggtggcggcggctcgttcctaggtacggcggcggcggccgcggccggcgtcgtcggcggctcgctgctgctctccagcatccgcggcatgatgggtggatcgcatcaacagggctttggcgacagcaatgctctcggcgaccgcagcgctggtgggagcccctggggcggcggcggcgaccagtccggcggatcgctggcgcgcgatgccggcctcaatgacatcggctcgaaccgcgattcccgccagggcttgttcgatcaggcgtcgaacgacgatcggcacaacgacaacaaccagagctacgacgatcacgacgacaacatggacatggccgacgacggcgatttcggcgacgacgacggcggcagcgattacgcgtgacgtcgcccgatagtggcgcaagcaaagacggccgcccaagtggcggccgttttcatttcgaacctcgcgcgatcacaacaccacgaccttggtgccgacactgacgcggccgtagaggtcgatgacgtcctcgttgcgcatgcggatgcagccggaggagacgttggtgccgatggtccagggctcgttggagccgtgaatgcgatagagcgtcgagccgagatacatcgcgcgggcgccgagcggattgtccgggccgccttccatgtgcctgggcagatcgggccggcgcgcgagcatttcggccggcggcgtccatgccggccattcgcgcttggccgtaatcgatttcacgccggaccaggtgaagccaggacggccgacgccgatgccgtagcgcatcgccctgccgttgccctcgacgaggtagaggaacttgttcggcgtgtcgaccacgatcgtgccgggactttccttgccgttatagtcaacaagttgtttctcgaatttcggatcgaacggacgctgccgcgggtcgacggcgtcctgctgcagcgcgccttgctgaattgcgccttgctgatattcaccctgcatctgcggctcgcccatcggcggcaggcggcgctgatcgtagtaagccggctgctgctgatataccggtcgctcgggcgcgtaagccggaccgcgtccggggccgtcgccgaacagaaactcgatgaagccgccgcccaggttcgaatttgaagcgacgcgcaccggcgctggcggcacccgcggcgcgtagagcaccgcaggcggatcgttcggcacgctgttgtcgaaggcgccggcttcgttcacgccggcaatgaaggtacaagcgctgccgagcagcgcgacagacatttttttgaacatcgacgtactctgtactgtttcgtctagatcacacaccccgtagacggtgcctggctgatcggcgcccgcgacgtggtcaataaaaggcaaaagccgttttgtttggtaaacggaacgagcgtttggattcaccacgtcgcgagcgacggcgcaatttggcaatcagcgtttattttccatgaacgtcgcgcgtccatggttaatcgccgcttgcgcagcgtcgcgcgaagccgccgagcggttccggctgtgaacttcgtgttaaatcgcttctgcctacaaagacgcgtgagtgaggtggggggagtatcctgatggctgttcaccgcaagcgttttcgtgtcgaggatatcgttgctggcgagatgcccgttctagacgtgactgaagaggtactcccgatgcatagcgagatcatggccgagctgcgtgcgatccgcgcacagatggcgaagggcctcgccgcggctccgctgtccggcagcgcagccatggcggcgatcgacgcctcgacggctcacgagctcgccgaagcgcgtgccatgctcgacacctaccgagcgcagatcgagcagtgcgagaagctgaaggtcgagctcgacctcatccacgacgccatcgatcgcaccaagcgcgaaatcgcaacgttgcacggcaagagcttcgacggcggggagatggccaaggtcaatggcgagctcggcgcggtggtcggcggcaccgagcaggcgacccagcagatcctcgaggccgcggaatcgatcgaccaggccgccagcgcgatgtccaaggtcgactcggccgatcagcagaagcggctcgccgacgacatccaggaacgcgtcatctcgatcttcgaagcctgcaacttccaggacctgaccggccagcgcatcagcaaggtcatgaacaccatgaagttcatcgagcagcacatcaatgcgatgatggacatctggggcggcgtcgacgcgatcaaggcccatgtgcctgcgcaggtcgacaaccgcagcgacgacgagaagctgctcaatggcccgaagctcgccggcgacgtcggccacgcctcgcaggacgacatcgacgcgctgttcgactgagcggtcgcggatacggaatgacgagaaacaaaaacgccggtcccaggaccggcgttttgctttgagcgaagcaatgacgaggggttaggccggaggccacctcacgcccggggcgcgcagcggacgtagaccatgttgccgtagcgggtggcggcgtccttgtcgatgaagcgggtgatcaggacgcggccgtcgaaggagatgatctcgcggtcctggtcgccgggggtcggaccggcgggaccgatgtagttcttgccgctcggagagcccttgagccgcagttcctgcggcgtcgcctggtcggcgagatgcatgatgacgccgccggaggagccggcggtgatcacgtaggggttcttgcattgggcgcgcgcggcggcttctgtgcgagcacggtcggcggggttctggaacgaggcgaggccccagcggccgacgatctcgtcggcgcggatggtggcgggcatttccggagccacgccgggctcggcttcgggcggcggcggggaggacgtcaaggacggcaggttgaagccgccgccgcaggctcccagcagcagcgccagacaagaggcggcggccagattggcaaccgtgcgcgcgtgagccgaactgatcatggcattccccccgaacaagaccatggccgcacccctcccgcagccaagcgcaaaactgctgccggagcaatgacgtccttctgtacgccgacaccccgaacgagtttccaatgccaccatcctatatccgcctcaacaaccgcttaaccacctttgcttgacaggatcgcggccaagccatatttccgggcccactattagcactcggaaagcccgattgctaagcgcgccgttcgattctcgatgagagggtggacggaagcgccgccccaccgacttccactatttcctaagcgagcctccaaagggaaacgtcatggctaaatccaaatttcgtccgctgcatgaccgtgtcgtggtcaaacgtatcgacgccgaggaaaagaccaagggcggcatcatcattcccgacactgccaaggaaaagccctcccagggcgaaatcgtcgccgtcggccccggcggccgggacgagactggcaagctgatcccgatcgacctcaaggtcggcgaccgcgtgctgttcggcaagtggtcgggcaccgaggtcaagatcgacaacgaagagctcctgatcatgaaggagtcggacatcatgggcgtgctggcctagggccattcgcctgaacggccgctgaatatcgtctcgtcatgcccgggcagaagcgcgtcttcgcgctagacgacccgggcgtccagcacgtttcgcaacatgatggattgccgggtcaagcccggcaatgacgaagaagaagcggcaagacacatcacgaacacgagggattgagagatggctgccaaagacgtcaaattctccggagacgcgcgcgatcgcatgctgcgcggcgtcgacattctcgccaacgccgtcaaggtgacgctcggcccgaagggccgcaacgtcgtcatcgagaagtcgttcggcgcgccccgcatcaccaaggacggcgtcaccgtcnnnnnnnnnncgggagggcgccaaggcagttgcggccggcatgaacccgatggacctcaagcgcggcatcgactccgccgtcgccgccgtgatcaaggacatcgagaagcgcgccaagccggtcgcctcctcttccgaggtcgcccaggtcggcaccatttcggccaacggcgatgccgccatcggcaagatgatcgcccaggccatgcagaaggtcggcaacgagggcgtcatcaccgtcgaggagaacaagtcgctcgagaccgaggtggacatcgtcgagggcatgaagttcgaccgcggctatctctcaccctacttcgtcaccaaccccgagaagatgaccgccgagttcgaggacgcctacatcctcctgcatgagaagaagctctcgggcctccaggccatgctgcccgtgctcgaagcggtggtgcagtcgggcaagccgctcgtcatcatcgccgaggacgtcgagggcgaggcgctggccaccctggtcgtcaaccgcctgcgtggcggcctcaaggtcgccgccgtcaaggcgccgggcttcggcgaccgccgcaaggccatgctggaggacatcgcgatcctcaccggcggccagctgatctccgaggagctcggcatcaagctcgagaacgtcacggtgaagatgctcggccgcgccaagaaggtggtgatcgacaaggagaacaccacgatcgtcaacggcgccggcaagaagcccgacatcgaggcccgggtcggccagatcaaggcccagatcgaggagaccacctcggactacgaccgcgagaagctccaggagcgcctcgccaagctcgccggcggcgtcgcggtgatccgcgtcggcggcgccaccgagatcgaggtcaaggagaagaaggaccgcgtcgaggacgcgctcaacgccacccgcgccgcggtgcaggaaggcatcgtccccggcggcggcgtcgcgctgctccgcgccaagaaggccgtgggccgtctcaccaacgccaatgacgacgtccaggccggcatcaacatcgtgctgaaggcgctggaagccccgatccgccagatctccgagaacgccggcgtggagggctcgatcgtcgtcggcaagatcctggagaacaagtccgagactttcggcttcgacgcccagaacgaggactatgtcgacatggtcgagaagggcatcatcgatcccgccaaggtggttcgcaccgcgctgcaggacgcctcctccgtggccggcctcttggtgaccaccgaagccatggtcgccgaaacgccgaagaaggacgcgccgcccgccatgcccgccggcggcgggatgggtggcttctaagcctccaccccacgacattgattgcgaaggccgcctccgggcggccttcttttttgccgaccttcccctttcgctttccgattcaaccagcggccaaaacccactacggtggcgcgccgattcgattgcgcgaggatttcatcgatgcgtgcgcttctggtttgttcgacggccgtcgtggcggccctgctcgccgtttggccggatcgggcccctgcccagatgaagctgtcgccgaaggcgacagcaccgggcggaaccgagacgcgctatttcacctcgatcgacggactgatggacggcaatgccgacgtgatcctgaaagagacgcgccagggcaagaatgtcaccgcggcggtgctcgatgtctgttacccgatcgccaggaattccgaccgcaaggaccgcttcgtcgtcaatctccaggtcgcggggcagacgttgaccggaacgacgcagagccttggcgagaagtcgccggtcagcgtcaagctgacgcgcaagcagtccggcgacacgtttgaattccgcggccagatctcgatcggccaggccgtgaccgaggtcacatcgcccgacaattccgacctcagcgaaagggaattcctggacaaccagacctccgacgacggcatcacctcccagccgaaggacttcacggacgtttctccggaagcgattgcggtcagggtcaagctcgacgctgcgacggacttcctgaagagcctgaagggccaggaggtcgaggtgacgctggcgagcctcagcgtcggctgcgatgcactgcgcgcgggcgagcagaccatcaacatgtcggtcgatccagagcgtgcgggcgcgctgctggccaagttcaaggcgatgccgggcgtcacggcggcaggttggaccgcgggcatgaccgagatggaccggaccatccgcttccccgcggcggactggcgcgagggcgacaagatcaacaaagccaggcttgcgactgcggtggccaacgtgctgagcaggacactcgccgcaaagccggtctcgcaggacttcgatcccgcaacgggcaagctcaagctggtgttcaagcggcccaatcaggattttccggcgctcgagctcaccgacacgatcgaggtcgcagggctcgtatcgccggacaagccgggctccaccgacaagctcatgctctggatcggcagtcccgccaccacgactgccgacgagagcggcggcgccaaactcaatctgtccgacgacgcgagcctggacgaagaaggcgatcttcccgaggacaacgggtcgatcgaggcgcttgcccgggagctgaagggccagcactgggacgcggacaagtcggtgtggaagtgacgtagtctattccggggcgacgcctcaggcgtcgaacccggaaggacctgacggtcaattccccgtcgtgcgaaaacgcagcggtttcgggccgatcagcgtgagcacgtcgccttggcgcgtccaggtctcgacgctgccgacgaaggcttaggtgt

SEQ ID NO: 169 - DNA, 1918 bp, Bradyrhizobium colbertium
ggcgcgcgcgaagctggacgctacgcttgcccagttgaaagggcggatgctccgcattggcgatattctgaaatcgagcaagttcctcaccaccgatatcggcgatgcgtcgcttgcacagcaagttcgacgcgcctttgtcgtggtgctctggcggctacgggcgatggtcagggcatatggcgagcccaagccgcttggcgctgatccgctccaggcgcttacgatcctcgcagccgatctcaaaaggcgcgccgcgcagctttccgccgatacgcagagcgacgactacaagagactgaaatccgaataccttgaactcaaggagcgcgccgctcttgcgccgctgctcccggacatcaaggcgcacatcgcgcgcctcaaggaaatcgagtcgatcaacactgcgctgaagtcgattgccaagaaaccaatcaccgacaagaacaaggaactctcggatcgcatggtaacggacgctctgcgcggtcgctttgcgcgtgagattggaaaactcaaactgtcccgaatgccggttgagctacgcaaggagaaagaccggcaggcggtatcgtattttcgcgttgcgttggtggagaacccgaccgccaaggtcggcgagatattcagtgaaggcgagcaccgctgcgtcgcgctcgctgcgttccttgccgagttggtcacggcgcagcgttattccggtatcgttttcgatgatccaatgtcatcgctcgaccacattcaccggaacgcggttgcgtcgcggctggtggaggaggcggaacaccgccaggtcattgtgttcacacacgaccttgtgttcctatacgaacttcgccgcgaggcagagaaggcgaaccggccaatcgcatttcgcaatgtcaggcgtcggcaggataagcctggccacatcgagaacgagttgccggataaggcgaagtcgggccttgagatgtgcaatgcgctgcgatcctcgctcaaatcggcaaaaccgacctttgataagctgacagatactcagcgcactacgttctgcaaggggactatcggtcaactgcgcgatgcttgggagcaggccatttccgattacgtccgcccagtgctcgaaaggttcgacaacaaagtaaaaccgacctcgatcttcaaactcggcattctcaccgaggacgacgtgaagtccgtaatggaagcccaaagtaggctatctgaggacctccattcctcggcacaagcgttgaaccctgaggccttatcgcttgatgacctgcttagcgaggttaaggccctggaagaatggattcagtccatccgtgatcgccaaaagaatgcggtaaaacccgcgcttaattagatcatcaggccagatcgatcagaagcagttgctcaacccagcgcttttcgcgaccatttcggacgtgcagtttgttggcggagagccacggatcggtcgtatcccgccgcttggctgtcagcgggcgtgcaacaaagcgcccatcagcagaaggccaatgccaacagcgcccaacgggataaactgagcgatgccagcttgagtgctcgccattgcggcgccatacattgcaagtggaaccgcaatggccgcgccaccccagagaacttttccaactgcgcgcatgaccagcatttgtttacctccatctcggtgttcatagagtgagaccagagggcaaaagcgacaagaccttgtgcactctctccacatctcgcttctggtgcaggccgtgcttgagtcgcaaaggcttcttctctggcccaagggtcagcagcaagattgatggggctgagggtggggcttagagacgaagtttggcaaattgcccgaagtgtcgattttactgccgtctaacttgttgaatttatttataatctggtacagttgggtgggctcgaaccaccg

SEQ ID NO: 170 - DNA, 16193 bp, Bradyrhizobium colbertium
aaatttgccggtttttcagcagactgctagcgcctgacgctctgccgtcaggagacggcgactgcacgcaggtcgccgcgatggccggccagactggcgaggctggcttcgccctgccgcatcgcggcaagtccctccgtcatcgtgatttgcggcgcgtagcccagctcggcctgcgccttggctgtgctgatcgtgaacggcttgccgataaggcgcagcatctggcgcgtgatcggcggctcgccgccgaggcgcaggatgcgccacgctgcgcccatgaggccggccatggtccaggccatggcgaacgggacggacttgtctggcgggctcaccccgcgggtggcgagcagcgacgagatgaagctcttgagcgtgctctgctccgaatctgcgacgaagtacgcctccccgccacgaccccgatccgcggcgagtatcagcgcggagcacagattgtcgacgtgacagctcgagatggcctgcgtgccgccagcgacccattgccaccggccggcctttaccgtctgcaccatgtgatcgagggtcggcatgttgcctccccagacaaagggcggccgcagcgcgatcgtctccaggcccgggcggacgccgctcgcggccagcaagacacgctcgccctcagctttcgatgaggcgtagggcgagaaggcgcggacttgcagcggaaggctctcgtcggcattcgacatcggctcgggatcacccatgaccaccgccgctgcgctgaccgcgaccacgcggcgcacgctggccgtcgccgccgccgcgttcacgaccacgcgcgtgccctcgacgttggtccggtcgaaaagctcgcgcttgccccaaagcttgaagtgcgcggcggcgtgaaacacgatttcgcagccttgcatcgccattcgcagcgcctgctcgttgtcgagcgcaccccgcaccggcgtcgctcccagcgctttgacctgcgcctcgctcgaagcgcttcgggccagcgcccgcacctgccagccgtggctgagaaggtgcgagatcaggcggccgccgacgaagccggagccgccggtcacgagcgcaattcgggcctgttcggatggcttcagggcatcagtcatggcgaacctctcgggctggattaagcctgatgatgtcgcgcacccgttcaaaagtcaacgaacataattcatatcttgttcggatttgcgcgcagggcggctttgctgtacttttcgccagcaaacgcaggtcgatatgccttcaagtccttcttccgacgacaattcgttccgagagcagattctcgaaaccgcgcgagcccaggtgcgtcggcatggcgaggcaaagacgaacgtggtcgacatcgcgcgcgcgctcggcacgtcgcacaccacgatctatcgccacttccgctccaaggccgacatcttcgacgccctcgtcgttgaaatgatgcgcgacgaggaagagatggcgagacagttcgtcgaggcgcgaggatccttcgcggaacgcctggagggcatggtgctggcgctgcacgcccgcaagcgcgaacggttcacggccgacgcggaggtctatggcctgtaccgccggatcgtggaggagcggcctgagatcatcgcggcgtatgcgaaagcgatgacgtctctggtcggccgcatcctgaccgacgcaaaaaagcgcggcgaaatccgggttgatgacgtcgaggccgcggccggcgtcgtgcgggacgcggtgaccgtgttcgtccatcccgtccacgtggcagccgccgtcgcggccaatctccccagcgagaagatggcccgcaacgtcgtgcgcacgatttgcgccggattcaaagcgggtgccaaactgacgtgagtccggtgtcggcgcgctgatcgacccggagcggaagtcgcgcccggcagggctgtcgctcgcagcgcgcctcaggtctctcgctcgggatttaccgagatcaggcgtgagatagcctcggcactctgagatggcttcagattatttacatcgagggtgactgcaggctgaggcatcgataccatgcaggcgtcgaactgcggtcgaagtgcgcgcagtagcgacaggtcccgcatcttgccgaatgcggcacgattgtcatcgaccaggcgtcgctcttgctctgcctgttccaggtgcagtgccacgaagatgacctcgccgccattccgctccacgagttcttttacccggaccgggaagtccccagccaccgttggctcgggggcgaatgtgaatatcaacgatcgcttctccttggcagcttcctcgaacacggccatccagaactgttcgcgcaaacgcgagaatgcctccgtgccgaacggaaacaccgagccaactgcgtcgacgacgaggtgattgtgaaacagcgcaatccctgtccgggaggcaagatggcgcgcgatagtcagtttgcccgaggcgacttgcccatagatgaaaataagctgcatcggatcatgatatcacactgacaccctcgaaggcgtctcctggaatcgccaggcaggcattgccgcggctcgaccaggagcctcaacggaatcgggaacaatgccgtggggatctgattggaacgttgtacgcccgatcctgggatcaaccagcgagtttcctgggaggcgtcttatcaggaaggagccaccaaatggatgacgaacgaaaatcatcaagggcggggcaacaggccgccgaaggcttgcgtgaagcagcgtccaaggaagaagcgaagaacgagagcaggatggggcacgatctggccaagggggctgatcgtttcgaagagcgctcgaaaagctccgatggaaaaagcgcagaagagaagcaagaaggatgaaagcagcagagcacgatgggtagatctgcccgcgcatcgcgcttgagcgggttggctttggctgaagcgatcccggcgggttcggtgcaacctctcccgcgagcgggagagggagtgcaattgcgttgtagcaatcaagcctgatcccaacctacgtcaggacacgccgccgatcttctcggagacgatcctggccgcattgcgcagctcggcggcgatggtgccggcctcgctagcggggatttgatcctgccgcaccagcgggacggtcatcgcggccaccgcgcggcctgaggcttcgacgatcgggcagctataggccaggatgcgcgtatagccgtcgtcattggagaagtttcctccctccgccgaaatgcggtcgagcgcggcaagcgcctttttcgtgctgatccggtcattggtcgcgatgacctgcgcaagctcctcgcgccggccctcgagctggaaggccgccagcaccttcgcggaggcgtattgctgggtgagcggaaacaccgcgccgaccttgaccgaccagcccatcagccattccggctcgatccgggcgatcaccatgaactgctcgccgtgcagcaccgtgaggtgacaggacaattgcacgcgcgacgccagctgctccatcaccggcagcgccgccttcagcagccgctcggtcggcgggaattgcgaggcgatccggaacagcttcagcgtcaaggtgtattcgccggtcgccgggtcgcgcgcgacatagccgcgccgctccagcgccaccagcatccggaagatctcgctgacggagcgcccgacgcgttcggcaagctgcttctggctcattccgcgcgcagcgcccgccaatgcctccagaaggtccagccctttttccagggcgggcgcgcccggctgcggcttttcagtcatctctgggccttgttggatcagcgctttgcgagcacgcgggggaaatgcaattcccgtgtagccgattgctcgcacggcgaaaagtcgatcgccggcaagcgcctggccgagctcgacgagctcaccaccagacagttcgtaggatgggttgagcccttgcgaaacccatcgctgctttatccccgctcaccgtagtcgcggccgtgatccaattgatcgctggcccaatcgaccggataattgccaagcctgacgtggcgatgaaacgacgagggcgcccagtcacgcacccggttgacgagcccgtgcttgaccggattgatgtgaacatagtcgacatgccgcgcgaaatcgacgtcgtcacgaatggtatgctcccaatatctgcgctgccaaatgccccgttcacgtttggccaagcggctttgggatatcctttcattgtgcgccaggccgcgcgaaaaggtggacttgatcagctgccagcgcatcgcaaaatcggcatcaccttctggtagcgtccacaccgtgtgaaggtggtcaggcaaaatcacgatggcatcgatcgtgaacggatggcgctgacgcgtttcgcgaaacgccgcgcgcaacgcctcgacatgatctgtcagcaatgacagcctccgctccgccagattgacggtgaagaagaaacaaccaccggcacgaagttgcggcggtacgcggtcataacgcgatcttatcacgaaacaagcgcgatgggtttcgcaagagctcaacctgtcctacgggctgtcaccgtaattctgacgtttaaatctgcttcggttggtacaaggctgggagggcttagaccgcttgatgctcttgttgataagtagccgcgagccttgccctagcaagagtggactgatcaactgcaactaaggcttgcggatagattttgctgttgtgcttcgcgacagttgatatgaatgcgcgtaggaatgcgcgctccgtgccgttcgctgcgtctatgcgtctgatctggcgtacgagtatccgcaagcccttttccctcatgacacagctggctagactcagaggcgttaagacgctcccccaactggcacgagttttgggagtccaaccggcatccttgtcgttcgttctttactggctccctgatgagcagaagtacgagcagttcactatacccaagaagggaggtggctggcgattaatcacggcccccaagccgcgcctgaagatgattcagacaaagttggctgatcttcttttggacattcatgttgagttggaacaatcccgctcccgaagtcagtgccgactggcacacggctttaagagggacttttcgattgtcacgaacgccacggcgcaccgaaacaagcggttcgtgttcaacgccgacctcaaggacttctttgccgaacagcttctcaaagtacgcttcgtattcgttgtcggcccattcggcaggaaatccgcgagactccatgaacgattggatacggtgacggacagcgtcgttctggatgtcttggcgcgtaatttcctgattttcctcgcggcaataataatggcgcttgaggtcccaaaggagatcggtggcgctggggaggccagcagaccgtgatgcaccagcgcccaggaaccacgcgaagttctgcggcttggcgctgacgatctcgatcagcgctttttggtcaaatgcatgctcttccttcatgccgctaccctcacgcgggatacgtctgttggggattgagcttccggccgcactgacgcggcaccgacgattcgttgcgcattgtaaagtggcacgggcaacctgacataaatcagctcaggttacccccagcggatttggtccttgtcggtttgatttgctggatccgaggcgctacctgcgacagtgcagcttccaccgcgcattgctcatagcgcggccattcccaatcttcgagatgtccgctcctcgcccatctgagactagtgggtccaaccgagtgtccggtttgcgcaaatactgtccgtgctgacagccggcggcctacggatcggggctcacgccctagcgtgcgcgcctcggaatgacgggagttcggagcaggtcccccttgagccccaccccgattcatgcgacctccgccccagcaaaacccctcattctgagcctcttatgcatattctcctgctcggttccggcggccgcgaacatgccctggcgtggaagatcgcagcctctcccctggtgaccaaattctggtgcgcgcccggcaatgccggcatcgccagggaggcggagtgcgtggcgctcgatgtcgccgaccatgccgcggtgatcgacttctgccggcagaacaaggtcgagctcgtcgtggtcgggccggaaacgccgctggcggccggcatcgtcgacgatctcgcagctagcggcatcaaggcgttcggcccgagccgggcggcggcgcagctcgaaagctccaaggggttcaccaaggcgctgtgcaccgagttcggcattcccacaggcgcctacaagcgtttcaccaatgccgatgacgcgcgcgcctatgtgcagagccagggcgcgccgatcgtggtcaaggccgacggcctcgccgccggcaagggcgtcgtcgtcgccaagaccgtgcgcgaggcggaggatgccatcgccatgatgttcgagggcgccttcggcgaggccggcgctgaggtcgtgatcgaggagtttctgccgggccgcgagatcagcttctttgcgctgtgcgacggcgagacggcgattccgctcgcctccgcccaggaccacaagcgcgtgttcgaccacgacgtcggcccgaacaccggcggcatgggcgcctattcgccgacgccgctggtcacgcctgccgtccacgacgcgatcatggcgaagatcatcctgccgacggtcgcaggcatgaagcagcgcggcacgccgttccgcggcgtgctctatgccgggatcatgctgacgacgcagggcccgaaattgttcgagttcaacgtccgcttcggcgatcccgagtgccaggtcttgatgctgcgcatgatgagcgacatcgtgccggccttcctggccgcctgcgacgggcagctgaagaatttcgacctgcgctggcatccggattccgcgctcaccgtggtgatggccgcgaagggttatcccggcgactaccggaagggcacccgcatcgccgggctggaggaggccgccaaggtcgagaccgtcgagatcttccacgccggcacggtggcgaaggacggcgccatcctcgccaatggcggccgcgtcctcaacgtctgcgcgctgggcaagaccgtgaccgaggcgcaagcccgcgcctaccaggccgtcgaccgcatcgactggccggacggcttctgccgccgcgacatcggctggcaggcggtggaggcggagaaggcccagggctagcccgtcatgccggccggcgcgcaagccggccgtccggtccatcgcggttttgcgtcaccaccccgccacatcggcattgcagattatgcaatcagctgttggggttaggtgccgggctgataataccggtactgtgcatggggttgttttcgactttcgctgtgtcgggcggccccgcgaccgaccaataaggatgcaagaagatgtccgacctcgtcgacctctatccgggcttcgccgccgaatggatcgatacctccttcggccgcatcttcgcccgtgtcggcggcaagggcccgccgctgctgctgctgcacggcttctccgagacgcacgtgatgtggcaccgggtggcgcccgacctcgcggaagccttcacgctgatcatcgccgatctgccgggctatggctggtccgacatgcccaccagcgatgcgctgcacatgccctacagcaagcgcgcgatggcgcgagccatggtcgaggcgatggagcgcctcggccatgtgcatttcggtctcgccggccacgaccgcggcggccgcgtcgcctaccgcctggcgctcgaccatcccggccggctgtcgaagctcgccgtgctcgatatcctgccgacctacgattactgggagcggatgaaccgcgcctcagcgctgaagatctaccactggaccttcctggcgcagcccgctccgctgccggagacgctgatcgcgagcaatggcgaattcttcctgcgcttcaagatggcgagccagaccaggtcgaagacgctggacgcgatcgatccgcgcgcgctcgagcactacatcgccccgttccgcgatccttcccgggtgcacgcgatgtgcgaggactaccgcgccggcgcctatttcgactacgacctcgacaaggccgatttcgaggccggcaagaagatcaccattccgatgctggcgctgtggggcaatgccggcatcgctcaggcggccgcgaccccgctcgacacctggaagcaatgggccaccaacgtcgacggcatgccggtggattcagggcacttcctcaccgaggagaatccgcaggtgaccgcgaaggcgctgctggagttcttctcaggctaagccgcaatgacgggggagagacctaccgccgctcgcgaaagaactccttgagcagccgcgcggcctcgctctcgccgacgccggaatagacgtccggcacgtgatggcaggtcggcgaagcgaagaaccggacgcccgattccaccgcgccacccttcgggtccgccgcgccgtaatagaggcgcctcacccttgcaaaggagatcgcgcccgcacacatggtgcagggctccagcgtcacgtagaggtcgcagtcgacgagacgttcgctgccgatctttttcgcggcctcgcgcagtgcgacgatctcggcatgggcggtcggatcatggtccgtcagcgtccggttggccccggtggcgatcacctcctggttgcggaccaccacgcatccgatcggaacttcgcccgattgaccggcattttcagccgcctgaagcgccaaatccatgaaagaaggggctttcatgcctcgtatcatcgccagaaacctgctactagctccgccttcagcgagagtggataccgaatttgcctgagcgtgcggctcggaacgagcgcgcagtgccgtctggctaccccgtcaagtgagattagtcatgcctcgcgacagcgacaaagacaacgattcccgcggccggcgaggccccgccaaaggccgcagcggcaagccgcgcgggcctgagaagaaattcgccaagcgcggcttcgagggcaagggcgatcgcgacagccgtccgccgccgcgaggcgaccgtgacagccgcccgttccgccgccgcgaggagggcgatgccccgcgccgcgatttcagcgaccgtccccgcgtcaagcgcgacgaccgcggcggtgagggccgcggcgagcgcagcttcaagccgcgcggcgaccgcccgttttccgatcgcggctcgcgcgatggcgagaagcggccgttcaagccccgcggtgaccgtccgtcccatagccgcgacgaccgcccgccgcgcagccgggatcgcgacgatgcgcgtccggccgggcgctccagcgagcggaagttcggcgacaagcggccctatgcgccgcgcggcgatcgtcccgaacggaagttcgacggcgagcggaagttttcgcgtggcggcgatcgcggtgatcgtccgcgcgatcgtggcgagcgcggcgattccaagccgtggcagaagcgcgatgaccggccgcatggagatcgcccgcgcaagagcttcggcagggacttcggcggccgtgaccgcggcgaggagaagccctggcgtcagcgccccgaccgcccggacggtggtcgcggcgaagaccgtccgcgcttctccaagcgtcgtgacgagggggatgatcgcccgcgcttctcgcgcccgcgtgaggagcgttccggcgacgatcgtccgcacttcaagcgtccgcgcgaaggacggccggaaggccgcacggactggcaggagcatccgcgcaacgaaggtcgttttcgcgacaggccgcggcgcgacaacgaggacgacggcaggattttcgagaagcgccccgctttcggcggccgcggcgcctatcgcgagcgtgatcgcgacttcgagggtcggccgcggcgcgaagacgcgccgaagccgaagaaggccggagagcgcatcgccaaggcgctggcccgcgcgggtcttgcctcgcgccgcgacgccgaggaaatggtcacgcagggccgcgtcaccgtcaacggccgtgtcatcaactcgccggcgctcgacatcacgaagaacgatgtcgtcatggtcgacggcaagccgttgccggagcgcgagcgcacgcggctgttcctctatcacaagccgcgcgggctgatgaccacgcatgacgaccctgaggggcgtccgaccgtgttcgagaatctgcccgagggcctgccgcgcctcatcagcgtcggccggctcgacttcaacaccgaaggcctgctgctgctcaccaacgatggagggctcgcccgcacgctcgagctgcccgacaccggctggctgcgccgctaccgcgtccgcgctcatggcgacgtcacgcaggcgcagctcgacgagctcaagaacggcatagagatcgagggcgtcaagtacggtccgatcgaggcgacgctggagcgcgaccagggtgccaatgtctggctggtgttcgcaatccgtgaaggcaagaaccgcgaggtgcgcaatgtctgtgcccatctcgggctcgaggtaaaccgcctgatccgcgtctcctacggcccgttccagctcggcgagatccccgagggccaggtcgaggaggtccgctcccgggtgctgcgcgagcagctcggcgacaaggtgatcgagaagtcgggtgccgagttcgatgtgccggcgaaaccagccacacgcgaggacgatggatcgaagaagcccgccagcaagcgcgcggtgatcaacgaccgcaagggccgccgcgtgctggtgcagcgcaccggcagcgaggaggcgcgcgagcgcaacgagatggaagcgggcggctatggcccgccgcgccgtcccaagcgcggctaccacggcaagcgcgacctgaccccgcgggaggattgacgttgcgcgtcgtcggcggtcgtttgaaggggcgcaatctcgcctcgccgtcctcgcgcgacatccgccccacggcggaccggctgcgcgagtccgtgttcaacattctcgtgcacgcctatgacaatccgatcgaggatgcgcgcgtgctcgatctcttcgccggcacgggcgccctcggcatcgaggcggcctcgcgcggcgcgaggttcacgctgttcgtggacaatggcgccgaggcccgtgcactgctgcgtaacaatgtcgaggcgctcggcctcggcggcgtcaccaaggtctaccgccgcgatgcgacggatctcggccctgcgcatcccgtcgagccgttctcgctggtcttcctcgatccgccctatgggaaggggtttgcggaaaaggcgcttgcgagcttgcgcgatggcggctggctcacgccgggcgcgttgttggtggtggaagagtcgaaggccgcgcaggtcgtgccgccggagggctttgaggagttggagcggcgggcgtacgacgacacggaattcgtgttcttgcgcaggacgggttagcgaagcgtaatccgccacggtctctcgctgcggaagaggaagaggtggattacgacttcggctcatccaccctgccgctgcggagtcacctccgcccgaacagcttctccacgtcgctcagcttcagctccacataggtcggccggccgtgattgcattggccggagttcggggtgtcctccatctcgcgcagcagggcgttcatctcttccggccgcagcctgcggccggcgcgtaccgagccgtggcaggccatggtggcggcgacgtgcatcagacgacgttccagaggaagcgcctcgtcccattcggccatgtgctcggagagatcgcgcaggaggccgccggcattggtcttgccgagcagcgacggtgtctcgcgcaccgcaactgcgccggggccgaaggattcgatcgcgaggccgaaggatgccagctccgcgctgcgctcgagcaggcgctccacggtcgcctcgtccatctcgacgatctcggggatcaggaggatctgccgctgaacgccgttcgcggccagcgaggctttgagccgctcgtagacgatgcgctcatgcgcggcatgctgatcgacgatgatcaggccgtcacgggtctgcgagacgatgtaggtctcgtggatctgcgtgcgtgccgctcccagcgggcggtcgacgagatcgccggcgggctgcggctcgatccgcacgtccgcgctgggtgcaccgacatcgaaggccgcctgcgcgcgttcagcgaaggccggcgctgcggcaccttcgaatgatggtaacggcgcgacgggagctgatggcgaggcccgccagtcccagctcgccggacgctgcggcgtgaaggcgggccggaacgatgacaatgcgctctcgccgctgttggcggcggtccgccggccctcgcgcgcgagggcctccttcaatccgtgcacgatgagcgcgcgcacgaggcccgcgttgcggaagcgtacctcggtcttggccggatgcacgttggcatcgacctcgcgcggatcgagcgtgacgaacagcgccagcaccggatggcgatcgcgcggcagatagtcggaataggccgcacgcaccgcgccaaggatcagcttgtcgcgcacggggcggccgttgacgaagagatattgcccgagcgcgttggccttcgtgagcgccggcgctgcggcatagccggcgacgaccacgccctcgcgctcggcatggacctcgatggcgtggctgcggaattccgcgcccagaatgtcgccgagccgcgtcagccgtcccgcggtgccgggcagggcggcggcccaggtcaccggcgcgcgttcttcgcccgcgagcgtgaaggcgatgtcgggccgcgccatggcgaggcgccgcaccacctcgcgaatggcttcggcctcggtgcggtcggtcttcaagaacttcagccgcgctggcgtcgcatagaagaggtcgccaacctcgacccgcgtgccgtgggccagggccgcgggcatgatctcggactttgtgccaccctcgacggtcagcgcccaggcgtgcggttcgctggcatgtcgggtggtgatggacagccgcgccaccgagcctatcgacggcagcgcctcgccgcgaaacccaagggtgcggatctgcagcagatcctcgtcgtcgagcttggaggtggcgtggcgctccacggcaagggcgagatccttcgcggtcatgccgctgccgtcgtcggtgatgccgatccgccgccgcccgccgccgtcggtgaagacgtcgatgcggctcgcgccggcatcgatggcgttctcgaccagttccttgaccacgctcgcagggcgctcgaccacctcgcccgcggcgatgcggttgacgacctgttctggaagctggcggacgggcatgggggactcagtggacgttcagacggccaatctagtcctgctggcgctcaattgcatgaggcatgtccgggctgcccacatgctgtccaccttggaacaaccgctagtcttcgaagctacggccgcgtccggccttgacgtcactccggcgcttcttgccttcgagccggcgctgcttggaggcgaaggtcggccgcgtcgcgcgccgcggcgtcggcctgatcatcgcctcgcgcagcatctcggtgagacggtcgatggcgtcctgccggttgcgctcctgggtgcggaagcgctgcgcctggatgacgatgacgccgtccttggtcatacgctggccggcgaggcgggcgaggcggatcgccgcatcctccggcaaggtcagcttgcgtgtatcgaagcgcagctgcgccgatgtcgcgaccttgttgacgttctgcccgcccgggccggaggcgcggacaaagccgatctcgatatcgtcctcgtcgatgacgagattgcgggatatccgcagcatgatggcaccagcaagagattcgggtgcgcacaatagcggttttagatggagttcgtcattccggctgtccgaagggccagccggaacgacgagattctcaggtgcgcaatcgcgcaccatgcttcgatgccttgcatcgtcccggaatggcagctggtcagttcgacttcgtcgtcggtgctgccgccggttgcacagcggcctgcggggtgcggccgaccacgacggtcaggagaccttggccccacaggcgcttggcggccgccttggcgtcgtccagcgtcaccgcgtcgacgatggcgttgcgcttctcgatatagtcgatcggcagcttgtcctgctgatattgcagcagcgcctgcgccagcttggacgaggtgtcgagcgccagcatctgcgagcccttcaggtaggatttggcctcgtccagctccttctgggtcgggccttcctcggcgatgcggcgcacctctttctcgatggcatcgatggtgtcgccggcgcggtcggcgcgcgtgccggtattgccgatgaagatggccgaatgctccatccaaagcagcgattcgaacaccgaataggccagtccacgcttttcgcggacctcgcgatagagccgggaggacagtccgccgccgccgagaatgtgattgacgacataggccgccatgaagttgggatcgctgcgtttcacgcccgggccgccgaaggtgatcacggtctgaggcacatcaagcgtgacgaaggcgcgttgcggcggattggcggcctcgacgtcggggaccggcgtcagattggccttggcgggcaggctaccgaacgtgtggtcgagcaacttgccgagggtcgccggatcgacatcgccgaccacggcgatcttcagcccatccttggcgatcacccgaccgacataatccttcatatcggcgacggtgatggtcggcacactgtcgaggttgccgttggtctgccggctgtagggatgatcgccgaaggcgacctccaggaacttgcggcttgccagcgaggtgggattggtggtctcgcgacgcaggcccgaaatgacctgcgagcggatgcgttcgacatccgccgggttgaaatgcggtgacgtgagcgcgctcctgagcaggtcgaaggcctcgtccttgttgtcgcgcagcatgcgcaggctgccccggagggtgtcgcgggtggcgttgaaggagagctcgatggcgcgtcggtcgagccgttcacggaatgtcttggaatcgagatcgcctgagccttcgtcgaggagagagccgaccagattggcaacgcccggcttgtccttggggtcctgcgccgagccgccggcgaaggaatattccatggcgatcagcggcacggttgcgtcctgcacgaaccaggcttcgatgccgcccggcgagatcaggtgctggatctttgcggcagcctgcgacggcgagaccgccgccagcgcaagcgccgcgccgatgacgaaggagtgcgcggcgtgtcttgtgcctcggaagcatcttgcgcgaaggaagtgatgggtcacgaacgcttctcctcgcgcttggcggtggcggtgtccttgatcagatagcccgtcaccgagcgcttcttctcgagccatttctgcgcaacggctcggacctgctcggcagtgacggcgcggatgcgatcgggccagctcctgatatcctcgatcgaaaggcccgtggtcagcgcgccgccgtaccaacgcgccagcaccgcctggttgtcctgggcgtagatcgcctcggcaatgagctgggtcttgaccctttccagatcctcagcgcggatcgggttctgcgcaacgctggcgatgacatcgtcgaccgcctgctccacctctgcgaagctgacgccgggtttcggcgcagcggagatcgcgaactgggttgggtcgagcgagatgctcgaatagctggcgctggccgagaccgccaggggcttgtcgacgacgagcgcgcggtagagataggaattgctgccgctgccgatcagctgcgcgagcacgtcgagagccgcgctttccccggctgcagccgtggtcgccgacggcacgagataatagcgccgcatgttcggctgctcgactcgcgggtcggccagcgtgacggtgcgcggcgccgtggggtccggttcctgcggacgaacacgtcgcgccgggatcgcgggctgcgccgggatggaaccgaaattgcgctcgaccagcggacggatctcggcagcgtcgacgtcaccggcgatcacc

SEQ ID NO: 171 - DNA, 38448 bp, Bradyrhizobium colbertium
ccggcacgacgccaagggatcggccaatacgatgcgcggcttccagggcggtcgcccctcgatctacaccatgacggacgcgatcaggggcgtagcgacgcccgcactgatcatctgcggcgacgaggacgatccgtgcgtcgggccgagcctgttcctgaagaagcacctgcccgcggccggcctcgcgatgtttccgaaatctggccacgtcctcaacctggaagagcccgcactgttcaacgagagcgtggcgcggttcgtcacgctggtggaagccggtcgttggccggcgcgcgatccgcggtcgctggcggcgcactagagcgaaggcgtcgccaaacactccgtctcgtagcccggatggagcgcaagcgtaatccgggactctcgagcgcggcgcgacctgccccggattgcgctccgctccatccgggcgacggcagactatttcccggcgcccctgctcagcaagaacaccgcctgctcgccgaacatgttccacacccaccaaggcaggttcagcggcacgggccggccatagagatcgagcgcgacggagcgttccatcttgacgttgatctcgtcgcaaagctcgacgaaatccttgatcgtgcagaaatggatgttggcggtgtcgtaccatgtcgccggcaagttctcggtgcgtggcatgtggcccccgatcagcagctggagtcgcatcttccagaagccgaaattcgggaacgacacgatggcgcggcggccgatgcgcaggagattctccagcacgacacgcggctgccgcgtcgcctgcagcgtctgcgacaggatcacgtagtcgaaggcgtcatcgggataattcacgagatcggtgtcggcatcgccctgcaccaccgcgagccccttggcgacgcagcggttgacgccctcgcgcgacagctcgatgccgcggccgtcgatgccgcgggtctccagcagttgaagcagatcgccctcgccgcagccgacatcgagcaccttcgaccccggcttgaccatctcggccaccagcagatgatcgacgcgatactgaccggccgccccgctcgtcacgccgttcagcggcagcacttcctgcacagacatcgctagccgtcctttctgcccgtgagcccgcgggccttcccggcggactgcaggaacgcgcgcgagatgtcgaagaactcgggaacgtcgagcaggaaggcgtcgtggccacgatcggtctcgatctcggcaaacgacacccgcgcgctggaagcgttcaacgcgtgcaccagcgcgcgcgattccgaagtcgggaacagccagtcgctggtgaaggacaccacgcagaaacgcgtcttgatgcccgcaaacgccttcgccagcacgccgccgtgatcggcggcgatgtcgaaatagtccatcgcacgcgtcaggtagaggtaggagttggcatcgaaacgctcgacgaaggacgagccctggtaacgcagataggactcgacctggaagtcggcgtcgaacgagaaggtcggcagatctcgatcctgcatgcgccggccgaacttgcgatgcagcgccgcgtccgagagataggtgatgtgcgccgccatccgcgccacggcgagcccgcgatgcggatggatgccgcgatctgcatagccgccgccgtgccagtcggggtcggccatcaccgcctggcggccgagctcgtggaaggcgatattctgcgccgagtgacgcgtcgagcatgcaattgccagcgcggagaacacgcgggcgggataggccgcggtccattgcagcacctgcatgccgcccatcgagccgccgacgacggcaaacagcgtctcgatgccgagcctgtcgatcagcatcgcctgcgcgcggaccatgtcgggaatggtgatgacgggaaaatccaggccccagaccttgccggtgacgggattgatcgaggccggcccggtcgagcccatgcagccgccgatcacgttggagcagatgatgaagtagtgcttgggatcgatgggccgtcccgggcccaccagcgtctcccaccagcccggcttgccggtgacgggatgcacattggcgacatgttgatcgccggtcagcgcatggcagatcagcacggcgttggagcgatcggcgttgagctcaccataggtctgataggcgatctggaacggggtgagatcgacgccgcaatcgagccgcagcggctgctcggcgccgaaatgcgcgacctgcgagcttggatgatccacttcatgcgaccgttcgtcggcgctgatcgcaggactgggtaccgacttgacgccaaccatcatcgacctcgtttgcgactgccctcagaccgccgctggaatcaggccatgaaaaacccggcctgaacgataggttcggccgggatcggaagcgtccccggcctgtttagcgagttttttaacgtggctgcaagccggccggctcaaatgaccacggaacgggcaaaagctaccgtcttgggcggttttcgtcaagtcgcggcccgaatgagctaagatcagtgcggcgccgcccgcagaaagagccgtcatttctctttgctttcgccgggccgactgcctaatcaggatgttgctcgcagcggatccacccctaaggctgatccgcatcggaacgtcttcaacagccctcgccagatatgtcccaacgtccgcccgcgccaccctcgcttcaggaactgcgcaaggagatcgatgcgatcgacgagagcatgcatcgcttgctgatgcagcgcggcgacatcatcgaccgcctgatccaggtcaagcagacacaggaggtcggctcggcgtttcggcctgcgcgcgaggccgacatgatgcgccacctcgtgcagcgccatcgcggcatcctgccgctcgacacggtcgagagcatctggcgcgtcatcatctcgaccttcacttacgtgcaggcgccgttctcggtgcatgccgatatctcggcgagcgagccggcgatgcgcgattccgcgcgcttccatttcggttttaccgtgccttacgtcgcgcatttcagcgcgcaggccgcagtcgaagcggcagcaaagtccaagggcgatctggcgctggtctcggcgacgtcgagccgcacgccgtggtggctggagttggaagccgatggcgcgccgaaaatcatcgcgcggctgccattcgtcgaacgcgcggaccatccggccgccttgccggtgtttacgatctcgcgggtcgccgacagcgcgctggttacggaggtcgagaccttcagcgtgcgcgtctccgggtggaacgccgaggtcgcacgggccctgtcgccgctggcggagatcgtggcggtgccggacacggccttcgacggcgcggcgctgctggtctcggtcacgagcgcaaccagcatcgacaaaattaaggctgccctgatcgaggcgggggcgtcggtgcgctccacggccctcgtcggcagccacgcaacgcgctatacggtgcccccgaccggcacgaaatagtaaatcgcgagcagcccagcctatccggagtcccagatgtcccgccccgtgccgaatcccggcattctcgatattgcaccctacacccccggcaagagcccggtgccggagccgggccgcaaggtgttcaagctctccgcgaacgagacgccattcgggccctcgcccaaggcgatcgaagcgttcaagcgcgtggcggatcatctcgaggactacccggaaggcacctcgcgcgtgctgcgcgaggcgatcggccgctctttcgggctcgatcccaaccgcatcatctgcggcgccggttcggacgagatcctcaacctgctcgcccacacctatctcagccacggcgacgaggcgatctccaccacgcacggcttcctggtctacccgatcgcgaccatggccgtcggcgccaagaacgtggtggcgcaggagagcaacctcaccgccgacgtcgacgccatcctgaaggccgtgacgccgcggacaaagctggtctggctcgccaatcccaacaatccgaccggcacctatcttccgttcgacgaggtcaaacggctgcgcgccggcctgccctcgcacgtgttgctggtgctcgacgccgcctattgcgactacgtctcgcgcaacgactacgagatggggatcgagctcgtcgccaccaccgagaacacagtggtgacgcacaccttctccaagatccacgggctcgctgcgctgcgcatcggctggatgttcgggcccgagcacatcatcgatgccgtcaaccgcatccgcggtcccttcaacgtgtcgacaccggcgatgtacgccgccgtcgccgcgatcgaggacaccgcgcaccaggcgatgtcgaagcagttcaccgagacctggcgcaactggctcaccgaggaaatcggcaagctcggactgaaggtaacgccaagcgtcgccaatttcgtgctgatccatttcccgaccgacaagggcaggaccgccgatgacgcggacgctttcctgaccaggcgcggtctcgtcctgcgtgcgctgaagaactacggacttccgcatgcgctgcgcatgacgataggtaccgaagaggccaaccgcctcgtcgtcgagggcttgcgcgacttcatggccggcaaatgagcgaacaggcgcacttccagcgcgtcgcactgatcggcttcggcctgatcggcggctcgatcgcgcgcgctgcgaagctccagggcctggcttccgagatcgtcaccaccgcacgctcggagaagacccgcgcgcgcgtcgccgagctcggcatcgtcgatcaggtggtggcgaccaatgcggaggcggtgaaggatgccgatctcgtcatcctctgcattccggtcggcgcctgcggagctgtggcgcaggagatcgccgcgcatctgaagccgggcgcgatcgtctccgatgtcggctcggtcaagggcgcggttgtccgcgacatggtcccgcatctgccgaaaggcattcatttcgtgccggcgcatccggttgcgggcaccgagcattccggcccggattcgggtttcgccgagctgttcatcaatcgttggtgcatcctgaccccgccggaagataccgatgcggcggccacggagcatctgcgggcgttctgggcggcgatgggcgccaaggtcgagatcatgacgccggatcatcacgatctcgtgctcgcgatcaccagccatctgccgcatctgatcgcctacaccatcgtcggcaccgccgacgagctggcgcaggtgacggaatccgaggtgatcaaattctccgccggcggcttccgcgatttcacccgcatcgccgcgtccgacccgacgatgtggcgcgacgtcttcctcgccaacaaggaggccgtgctggagatgctgggcaccttcaccgaggatctcgcaaaactcacccgcgcgatacggcgcggcgatggcgaggcgctgttcgaccacttcacccgcacccgcgccatccgccgcggcatcgtcgagatcggccaggactcggcggcgcccgactttggtcgcctggctgcgctcaagaagccgtagcttcacactcgaggttccgggttcattcgctttgcgaatgccccggagtaacggcaagtcaatacagcggcggaatctggccgaccttcaccgggccgagcagcacggcgccgtcgacgaatttcagcgggaaacttcgcgccttcttgccttccagcgtgctctctgtgccgatcgaattgatgccggccgcaacgcccgcattggcgttctgcttgatgaccttgccgaggccgggaacggcgcggtcgagcgctccaaagagattgttgaggtcctgcgacttcacgcccggcgcgagtcgatccagcgtcgcctgcggcacgccctcctccagcatcttctcgatgccgagcgccgggatcacgcgctcgaggcctgtgacggtcatctgcaattcgccgtcgagccggccattgggcgagaggccgagcttgccggccgcgaccgcgatcatctcgccctgctggatgcgcgactgcacgatctcgatatggccgccggcggcctggatctcgcgaaagcgctgcggccagggctttggcgtgaggtcggagaggccggtgatcttggcgcgggtgtcggcttcgaacggctcggctaacagcgggtgcacgccctgaatgctgccctgcgcgacgtgaagcacggtctcgatcacgggatgatcgggctttgatccctccgcgagacgtccgtgcagctcgacctgcctggcgcgcgcaagcggcacctggacgctgccgtcgagccgattgaggctggggtcgtcgaacacgatggaggcacggtccggcacggccggcaggccagccacgctggcgcgccccttgctccagttcaccgcgaaggtgttctgcgtgatgccgtcggtcagcgtggccggcgcggagaattccgcgatgacgcgcttggggtcgtagacctgggccacgaccaggatgttgtcgagcttcgccgtgaacggtgtcttgctcgcgttctgcgacaccagggcgacgctggcgccggagcattgcacctcgaagcggaacgggaagcccgcgatcgagcgcttggcgcaatcatagatgcggccggacttggcctcctgcgcgcgccaggcgtcggcggcgatttcggcctgcgacgccgcatagaaccagaagccgctccacgcaacggcgaggatcaggacaaagacgggggcgatgaaaaggccccaacgggagcggcggcctgtggcaacggtcatattggacatgcggcgaccctttgacgccagattcaggcaaatgtaagcggggccggcctacgacgaaaggccgagaaatcgcttcgcttcggggcatggttctggtagccgtgcccgaaatgtcggaaatcaccgtcccctccgtcaccaccgccaagggcgacctctgggtgttcggctacggttcgctgatgtggcggccgggcttcgagttcgaggaacgcgtcccggcacggctggtcggcgagcatcgcgcgctctgcgtctattccttcgtgcatcgcggtacgccagaaaagccgggtctggtccttggactcgaccgcggcggcgcctgccgcggcatcgcctttcgtgtcgccgagaagaaccgcgccgacgttgtcgcctatttgcgcgcacgcgagcaggtcacgtcggtctatcgagaggtgatgcgttcggtgtggctggagaacgatgcgcgccagcgtgtctcggcgctcgcctacgtcgtcgaccgcggccatgtgcaatatgccggccggctgtcgctggccgagcagcaccgtcatgtgctccagggccatgggcagtccggcgccaaccgcgattacctcacggcaacggtaaaggcgatcgaggcggaaggctttcgcgacgcccagctgcaccagcttgcattgatgctgcatggtgatgcgctgcacgtgccggccccgaccggagatcgcgaaagccgctagccaccggtcggcgcgtagcttggcgcggagccaatcaattgctcctgctccttgcggccggcttcgacgagacggccggtcgcgtcctcgatcgccgtctgcacgcgcgaaagaaactcgtccttcggcagccccgccggcagcgggtcgagaaactccaccaccagggttccaggatagcgcatgaaggtgcggcgcggccagaacagaccggagttcagcgcgatcggaaggcacggcacgccgcaggacgaatagatctgcgcaaagccggtcttgtagtcgggcgccgccccgggagcacggcgcgtgccttccggaaagatcacgagctgctttccgctgcgcaccgcctcgcgcgcccgccgcgtcatgtcgagcagcgccttcacgccggcattgcggtcgatcgcgatcatcccggtcttgaccaggaattgaccgaacaccgggatctgcatgagctggcgtttgaggatgaagatgggccggtggaagaaacccggcagcacgaaggtctcccagaacgactgatgcttggccacgatcagcagcggtcccttcggaatcttctcgacaccccggaattccaccttgatgttgcagaccacgcgcatcaggaacagcgtcgtcttggcccaccattccgccaccgtgagcatggctcgcggcggcaatgcgaaggtcggcagcgccacgatcgcaagacacaccagcacggcgtagaacagcacgttgaatacgagcgagcggagaaatatcagaaacatcgatggtccgatcaattggcctgtgcggtggcgggccgcttcggctgctgacctgcaggctgctccgatatctcgggccaaaggtcaatcccgagatcctccagccgcaccctgagctcggccgcgatgtatttgacatattccgacagaagcagccggagcgtcgagcccgacgtccaccacggctcctcgcgccatttttcgccgaccacggcgaacgggatcagcgtcgtctgtggcatcgcatgtgaaaattccaccagcgcgcgcggcatatgatagttggaggtgaccacgatcagcgatctgaaccggcgcccctcggcccagcggcgcgcctccgctgcgttgccgcgggtcgtgagcgcggtacggtcgagatcgacgcaacaggtcatgaatgactggttctccggcagggtccgggagatgtcgctcgccgtcgaagtcggatgcacgccggagatcaggagccgcctgccgtagccggcagcgagcagctccatcgcgtccgatacccgcgaggagccgccggtcaacaccacgatcccgtccgccttgcggtcgggcaccgtctccacgccgcgcaattgcgacaggaatgcaaggaagcctgcggccgcggcgacgaaggcaagcgcgatcgtcgacacgatggccgcgcgcagccagccgcgcggcagtttcggcgatcgatcgtcggtcggcgaggtcatgcgatgtcggtgatcccttccctgagatgattttaagacgtttttgggcgaagtggagtccggttagtgcgaagaacaactcggtctgagaccggtcgccttctacaacagcaagcgggaaagaaagaactcaatcaacatcattcaacgtcgcaaacagagtctggcgtgcggccgccgcggtgatggcgccgatcagcacggcctggacggcgagcacgatgtagccggatggccgcagcgagaaggtgccgagcagcgcggcgaactggtcgccgacgggggtaccggagaaccagcccgcgacggactcggagaagccgaacaccagcatggccgcgccgccgccgatcagaccgccttcgaggcccagcctgaggaaatgacgcaggaagtgattggcaatgtagcgatcgccggcgccgacgaaatgcaggacttcgacgatcggacggttcgccgccatggcgccgcgggttgcgaacgagaccgatatgatggtggcgatgatgacaagcgcgaggatgccgaggccggccagcacggtcgcgttggtcatcgagcgcatgcgctcgatccaggcccggtgatcgtcgacgctggcacccggcgcaacctgtgtcacgagcgcgcgcaaggcgccgagatcgagtggcgtgcccggctgcacgcgcgcgatgatcatgcgcggcaccggcagatcgtccatcgacaggccggtgccgagccagggctcgagcagcctgccgctctcttccctggtgaacggcttgacctcgactatgccggcttgcgtgcgcattgcctcggtcacggctgcggtgtcacgatcaaggtcacgaccggcctgcggacgaacctggatggtgatctcgctcgcgacgtcggactgccattcggcggccgaggcactcaccagcagcaccgtgcccgtggccatcgaggcgaggaagctcatgatggcgacgacggcgaccagcgcgcggccgtggatcgaggcgcgcgggacgatcggcgacatgttgcgcgccttggccggaagctgcggacgctcctgcccgaggtcgaccaggacgccgcgctcgtcggtcctactcatagacgtgcagccgtccctggtgcagcaccaaccgtcgtgcttcgtattgatccatcaggccgatgtcgtgggtagcgatgatgacggcggtgcctgacttgttgagctcgatgaacagccgcagcaggcggcgtccgagcgtcgggtcgacgctgccggtcggctcgtccgcaagcagcagctgcggccgcgagatcacggcgcgggcgatcgccgcgcgctgcttctcgccgcccgacaggatcggcggcagcgcgtccatgcgatcgccgaggccgacccagcgcaacaggtcgatcacctccttgcggtaactcgactcgctgcggcccatgacgcggaacggcagcgcgacgttctcataggtcgtcatgtgatcgagcaggcggaaatcctggagcacgatgccgatgcgcttgcgcaaatccgcgatctcgtccttgcccagttgcgagatatcgtggccgaaaaggttgacgaggccccgcgtcggccgatgcgacagaaacaacaggcgcagcagggaggtcttgccggcgccggacggtccggtgagaaactggaaggaatgcgccggaatctggaagctgagatcgcgcaggatctccggccccaggccataacgcaatccgacattttcgaaccgaaccaagctcagctccgttcgagaggggcggcaggctgcacgccatcgccccgcaatatgcgattaacggcttttgcgaccgttatggtttccggttcgttaacgctcccccggtagcatacaggcagcccggttgtccgggcctgcggcttcttcaagaccagttcatgcatcaaggctcgtccatgcatatcgtctgcccccattgtatgacatcctacgcgatcaagcttgcgagcctgggggcgaacggacgggccgtccgctgttcccgctgcaaagagacctggatcgctcatcccgaggacgcggtcgaggaggcctccgttccggccatggccgcggccggccgagccgacgagcagtccgatctcgccgagcaatggaactcctatgccagggacgacggcgtcgctgatgcgccggtcgttgacagtccctcgattgccagcgactggccggacgaagcggccagggaagccgaggacgaatggtcagcggcggctcggcaggccgaggcggaggtcgtcggcgcgcagcatcaatcctggttctccggcctgttccgccgccgcggcgcacgggtaagtcgcccggttgctaccgcggctccgcccaggtcctattttggcctgccgaccgcctgcgccgcgatgggcgcactggtgctggcgctggtgatctggcgcggcgacgtggtgcggctgctgccgcagacggcggcgttctacaagatggtcggcctcgaggtgaacctgcggagcctcgccttcaaggacgtcaagctctccagcgagaccgtagacggtaagcaggtgctggtcatcgagggcgtgatcgtcggccagggtaagaagccgctcgatatcccacgcttgcgctttgccgtgcgcgacgcgcaaggcgcggagatctacgcctggaatacggtactggaacagaccgtgctgcggcccggcgagcgcgccttcttccgctcgcgcctcgcctcgcccccgccggagggccgcaacatcgacgttcgcttcttcaaccggcgcgacattgccggcggcagcgtataatcgaccccgcagggcccaaaggttggtctcatgccgaaaatcttgatcgccgacgacgaggactcgatgcgcacgcttgtggcgcgcgccatcgcgatggacggccacgagaccgtcaccgcccaggacggcgccgaggcgctggagatcctgacccgcgaacacggcgctttcgacctgctgctcaccgacatccagatgccggtcatggacggcatcgcgctggcgctctccgccgcgcgcgatttccccgatctgacgattttgctgatgaccggctttgccgaccagcgcgagcgcgcctcgaacctgaatgcgctggtccatgatgtcgtgaccaagccgttctcggtcgcggatattcgcacggcggttgccgatgcgctggcagtgaagaagagatagcggcgctgcttctccagattgccgctcaaaactccttcagcagccgctcgatgtaatcgagctcgatctgcgggcgcgagggatcgccgagacggcggcggagctcttcgagaatgcggcgaacacgctgggtgtcgatctcgccgggaatcttgaccgtgtaatcgtcgccatattcgcgcccgtgcagcggacggccgagcggatcggtctggttgccgccgctctgctggcgcccggcgcgctgtccggggccatcgccctggccgtcgccatcgccctgctgcatggcctcggccatcttctgcgcacccttgcgcatcgcgtcgagcgccttgccctgcgaatccacggcgccgtcggcgttgccctcgccgagctttgatcccgcatcgcccatggcaccgtcggcggcatccagaccgccgtcgtcatcgccctggtcgccgtcctgatcgccgttctgacccggctggccctggtcgccttgctggcccttctgtccctgctgccctttctgccccttctctcccttctgcccaaggccgcgcttggcaagctcgtcctgcaacttcttcagccgatcgcgcagcccctgctggtcctgctgcagctcggacatggactgatcgccctgttgctgcttgccgcgcgagcgttcgcgccgggaatcctggccctgcttgaaagtcttgtcgcgcaattgctgctgcttgcggatcatatcgccgagctcgttgagcgcctgctccatgtcgctctcgccggcttgccccggctgcgccatctggaggccctccagcatctgctggagctggtcgagcagctgcttggcggcatccttgtcgccggaccgcgacagacgctccatccggtcgatcatgttctgcagatcctgctgccgcaggaccttggtattagggtcgagcggccgcgccagctgctgcggatcattgttgttgcggagctgctcggcaagctggcgcatgaaatcgttcagcgcctgacgcagatcctgcgtgagcttcttgatctcttcatcgctcgcgccgcgctccaaggcctgcttcagcgcatcctgagctgcgcgcagggccttctcgacgtcggagatcttgccgtcctcgatcgtcaccgcaagcgcccacaggctcgccacgacctcgcgcagggcatcgtcggtgcgcgcggcctcgagctgccgggccacgctgtgcaggccgagatattgtccgggctccggcgtaaacatttccggcgcaatcatcagggcgtcgagcgccgcatacacgtcggagttcttgttggcgtcgagcgcgagaatgcggcgctgctcgatcagtgcacgtgccaccggcttcgtgaagagccgttcgggcaggcgcatattgaatgcctcgcttgtggcctcattgccggcctcgtccttggccgtgagggtcagcgcgacctcggcgccggcatagggatcctcgctgagatccttcaccgactgtccgacagcgttgcgggtccgcgcattcggcagcgcgagcgggaatcgcggtggctggaacagcggacgcgcagccgtcctggtgtcgccgtcgccggcagccttcggcgcatccttggcggggtccttggtgtcgtccggggcatcggtcgaacgcagggcaaatttcgcctcggcgccggtgacgccgtaatcgtcctcgatcttgtaggagagctggagtgcgccgcgcgcctggcgctccgggtccttggcgagcgcgatcgtcggcgcacggtctggcgttgccgcaaaggcccattgcggctgtccggagggcgcgcggacatgtgcagtgccgtcgccggaaatggcaaaatgcctttcgttggtcccctgggggctagcctcggtgggagccacctccttgaggccgcccgagacggcgacatcgaggctaccgccggacgagcgcacgatcagggtcgagccggcgggaacggcgagaggaccgctggcgggcagcgccgcggcctccttgttggcggccgacaggataaccggcggcttgccggtatagagcggcggcgtgacccaggcgtcgacgcgaacattggtcggcgccagcaccccattccagttgaaggcggcgccaagccgcatcgcacgctcgtcaccggcggcgaagaaggtcgcaaccagcatcaccatgaccagcgcccgcagcgcccaggggtcgtgaagcgcgagccgcgggtgcggcagaccggcgtggatgcgcttgagggaggccagcgtacgctcgcgctgcgcctgccacagcgcctgcgcgaccggatcctgcgaggtcagcgtgtccgtgagcgtggtggccgggcggtgacggatgccggagccacgatcgagccgggcgagcgcttcctcgcggctcggccagcggaagcgactcaacgggaacagggcggcaagtgcgacggcggcgaagagccccaggccaatggcccgggccaggaacggcaccgccagccagaggccggcccaggacaccaccagaaacaggccgacgacggtcaggaggcgcgccacattgggccaggcacgctcccacgcgatggcataagtagcccggtcgagggcctgcgccagcttcagccgcgacagcgcatcactgttgcggatcgggtctgacgggtcgggggtgacgccgttcaatcaactctccaggttgcccggtacagcaaagcgtatcacaacggcagcactgaggcatccgttcctgtacgggagagcccccttttcccgcataacacgaggacgtgactggctcggaacaaccccgtaatttccgcgcgccatccaccagagaaacgaaggaaacgtcatggacaagaagatgcacgacaagggcctggaagtccgcaaagcggtgctgggcgaggcctatgtcaacaacgccctgaaaaacgtcgacgatttcaatcgcccgttccaggagatgctcaacgaatattgctggggcacggtatggggccgcgaggagctgccgcgcaagacccgcagcatgcttaacatcgcgatgatcgcgatcctcaaccgccagcacgagtttcgggcgcatttgaagggcgccctgaccaatggcgtgacgcgcgacgagattcgcgagatcctgatgcaggtcgcgatctacggcggcatgccggccgcagtcgacagctttcggatcgcgcgcgaggtgttcgcggagatcgacggcaaggcgtaagacaggatagccgctctgaaatcgtattgctccgtgatcgggagcgaagcaacgaagcaatgacgacgggaggaaggatcaccatggacatcggattcatcgggcttggaaacatgggcttcccgatggcgcggcggctgatcgaggcgggacacaggctcgtcgttttcgatacgcgtaaggagatcatggacaagctcgtggtgcgcggcgccacgccggcgacttcgccaaaggacgtcgccgatcaggtcgagacggtcatggcgagcctgccctcgctgcaggcttcgctcgaggtcgcgacgggcgcaaacggcgtgatcgagggcagacgcgccaagcgcttcgtcgatctgtcgaccgtcggctcggcgatggctgcgaagattcacggcctgctcgccaagcgcaacatcgtgcagatcgactgtcccgtctccggcggcgtcggcggcgccgagaagggcacgcttgcggtgatggtgtcggggcctagggccgagttcgagctgttgaagcctgcgctcgacgtcatcggaaaggtcttcttcatcggcgagaagcccggcgcggcgcagaccatgaagctcgccaacaatttcctgtcagcgaccgcgatcgtggcgacctcggaagcggtggtgatgggcgtgaaggccggcctcgatcccgcagtgatgatcgacgtcatcaatgcgggctcgggcatgaataccgcgagccgcgataaattcccgcgcgcggtgctgccgcgcacgttcgatttcggcttcgccaccggattgatggtgaaggacgtgcgcctggcgctggaggagatgaagcagctcggcctgtcgatggaggttgcggacgcagtcgggcggctatgggagacggtgatcagcacggaaggcgccgagtccgatttcaccgcggcgatcaagccgatcgagaagaaggcgggggtggtggtgggtggagcgaagggtggattggcaggaaaatagccgccccaatctccgctgtcgtccccggggcgcgcgaagcgcgagcccgggacccataatcacggggcaggatttggcgaagactcgtagtgaccgatttcgcggagcaacttatccctgttgttatgggtccccgccttcgcggggacgacaccgaggtcgttgcagcgggtcgtcagctcacagccacggcgcaggcttgtccatcgcgatcagctgctcgacctcgacgcgcgggcgcaccacggcatattggtcgcccttcaccagcacctcgggcaccagcggcctggtgttgtatgtaccggcctgcaccgcaccgtaggcgcctgcggtcatgatggcgaggagatcgcccgccttcggcgtcggcagcgtgcgatcgagggcgagatagtcgccggtttcgcagacgggaccgacgacgtccgccttgatggtggcggcacccttcgcgggctgcttcaccggcaggatgtcgtgataggcctcatacagcgtcgggcggatcaaatcgttcatggctgcgtcgatgatgacgaaattcttgccgtcgccgtgcttcacataaatgaccttcgtgaccaggatgccggcgttgccgacgatcatgcggcccggctcgaacatcagcgtgcaaccgagattgtggctgacgcgcttgaccatggcggcataggcatcgggcgccggcggcacctcgccgtccatgtcatagggaatgccgaggccgccgccgaaatcgacgtggctgatgttgtggccatcggcgcgcagcgtctgcacgaattcggagaggatgcggaacgcggtctccatgccggaaaggtcggtgatctggctgccgatatgcacgtcggccccggtcacctcgatgcccgggagcttcgcggcgcgcgcgtagacctcgcgggcatgcacgatcgggatgccgaacttgttctcggacttgccggtggagatttttgcatgcgtgccggcatcgacgtcggggttgacgcgcagcgagatccgggcggtcttgcccgtctctgtcgccaggcgcgacaacaattcgagctcgggctccgattcgacgttgagacaaaggatgtcggcagcgagcgctgcgcgcagctcctcttccgtcttgccgacgccggagaagacgatcttgctggcgggaatgccggcggccagtgcgcgcttcagctcgccgccggagacgacgtcagcaccggcgccgagcttggccagcgtgcgcagcaccgactggttcgagttcgccttcatggcgtagcagaccagcaccttctcgccggcgaaggcgtccgcgaagacgcggtagtgccgctcgagcgttgcagtcgaatagcaatagaacggcgtgccgacggtcgcggccagctcggacagattcaccgcctcggcgtgcagcacgccgttgcgataatcgaaatggttcatggcgtgggctcggttgtgccggcttatctcttgccgggaggttcgtccaggagcgggtcgagaatgaacggtttcttcctgcccctgcctgccgcgggtgcggcatccgcaccgtaggttgggttgaacacgctcggcgtcctctgggcttcggtctcggtatcggtcggtgcggcaccgccggcggttgacgcggtcggcggcaagtccagcgggcccttgcggccgcagccggcgagcgcgagcgccgtcaggctcaagacaatgatggcccaccccgagccggccgggcgaaactttgacgtcacgacgaaatccccactacgcgggccgcaccatacagagattggcgcgctctggcgagagccggatgactatgaaacatcagcgaaattttaccctcagccccgttttcgctctttttccagccgcttcgcccaggccttggcctgagccgccacgttcttcggcgcagtgccgccaaagctggtgcggctcttcaccgaggattcgaccgagagcacaccgaggacatccttggtgattcttggctcgatcgcctgcatctccttgagcggcagttcgtgcagggcgacgccgccctcggcggccttggcgacgatgcggccggtgacgtgatgggcctcgcggaacggcatcttcaaggtccgcaccagccagtcggcgaggtcggtcgcggtggcgtagccctcgcctgcggccgccttcatcttggcttcgtcgggcacgaggtcgtggaccatgccggtcatggcgcggatcgccagcgacagcgcggcgaacccttccatggcgccctgcttgtcctcctgcatgtccttttgataggcgagcggcaggcccttcatgacgatcaggaggccattgagcgcgccgatgacgcggccggtcttggcgcgcaccagctcggcagcatccgggttgcgcttctgcggcatgatcgaggagccggtcgtgaacttgtcgctgagtcggatcaggccgaccaaaggcgaggtccagatcacgatctcctcggcaaagcgcgacatgtgcacggcgcaaatcgcggccgccgacaacgtctccagcacgaagtcgcggtcggagaccgcgtcgagcgagttcgccatcggccggtcgaacagaagcgccttcgcggtggcgtggcgatcgatcgggaacgaggtgccggccagcgcggccgcgccgagcggggattcattgagccgcttgcgcgcatcctggaaccggccgcggtcgcgcgcggccatctcgacataggcgagcaaatggtggccgaaggtcacgggctgcgcggtctgcagatgcgtgaaaccgggcatgacggtcgcggcatgctccagcgcgcgctcgaccagcgcctgctggaacgcggccagcgccgcatcggtctcgtcgatgacgtcgcggacgaacaggcggaaatcagtcgcgacctggtcgttgcgcgagcgcgcggtgtgcagcctcccggccgccggaccgatcagctccgacaggcggctctcgacgttcatgtgaatgtcctcgagcgcgcgcttgaactcgaagccgcccttgccgatctctgacaagatcgtgtctagacccttgccgatatttttcgcatcagaggccgtgatgatgccctggtcggccagcatcgcggcgtgggccttggacgcggcaatgtcctgggcgaacaggtgacgatcgacgtcgatggagacgttgatctcttccatgatctcgtcgggacgttccgagaatcggccgccccacatcttgttgctcatgatcccgtgctcacgcctcgaattaccgcgcatttgctggccgcaaccagccgtattaagaggcccctgatagccatatctgcgaccggatgacaaacgatatgctcgacaagacgccctcggccacgcgccggatccccctcatcgtcgccgccgtgacggtcgtgggcctggccggcttcgccgcactgtacgggttcggcctgagccgggtgccttccggcgacccgacctgcaagccggcggtggcgacggcgcaaaagatcgcccccctcgcccacggcgagttggcggcgctgaccatggcgagcgccccgttgaagctgcccgacctcgccttcgaggacgccgacggcaagccgaaaaaactgtccgactttcgcggcaagacgctgctggtgaacctctgggccacgtggtgcgtgccctgtcgcaaggagatgccggcgctggacgagctccagggcaagctgtcgggcccgaatttcgaggtggtggcgatcaacatcgacacccgcgacccggataagcccaagacgttcctgaaagaggccaatcttgtcaggctcgcctatttcagcgaccaaaaagccaaggttttccaggatcttaaggctgtgggccgggcgctgggcatgccgacctcggtgctggtcgatccccaaggctgcgagatcgcgacgatcgcggggccggcggaatgggcgagcgaagacgcgctcaagctgatccgggccgctaccggcaaggccgccgcgtcgctctagaatagctcaggcggtgacgttgagattgccgcccacgccaggaccgacattggcaagcgagggctgcccggcacccatcagggtcaggacggtggatttctccatgtccatgttctgcttggtcagcgtcgccgcgatgttcgactgcagcgcaccttgctgagcggccagcatggtgctgaccattgccatcatgtccattacgcgaaccctcttaccggccgtaacctaggcgcgagaggttaacgcgacatgaattgtcacgaaacggatcaacgagtcggaaccggcttggcgccgcggtaatcgtagaagccgcgctgggtcttgcggccgagccagccggcctcgacgtacttcaccagcaacgggcacgggcggtacttggagtcggccagcccctcatgcagcacctgcatgatggagaggcaggtatcgagaccgatgaagtcggcaagctccagcgggcccatgggatggtgcgccccgagcttcatggcggcgtcgatcgcctcgacattgccgacgccttcgtacagcgtgtagatcgcctcgttgatcatcggcagcaggatgcggttgacgatgaaggcggggaaatcctcggagaccgcgacctgcttgccgagcttgccgacgaattccttggcggtctcgaaggtggagtcgtcagtagcgatgccgcggatcagctcgaccaactccatcaacggcaccggattcatgaagtgaatgccgatgaagcgctcgggccggtcggtggcggcggccagccgcgtgatcgagatcgacgacgtgtcggaggcgatgatcgcctccggtttcaacacggcgcagagctcgtggaagatcttgcgcttgacctcttccttctcgaccgcggtttcgatgacgaggtcgcaatcggcgaggtcgtcgagcttctccgcgggcgagatgcgcgccagcgccttggtcttggcctcctcggtgacgaccttcttggagacctggcgcgccagattgccgttgatggtggccatgccggacttgaggcggtcggccgaaacgtcgttgagcatcacgtcgaagccggcgagcgccgcgacatgcgcgatgccattgcccatctgacccgcgccgatcacgccgaccttcttgatctctgccgccataatgtcatccaccggaacggcgcgcatgtcgcgcctgcctatcccccgagccgggaggatcgatttaatcagaaccttggctcgaaacctagattggatcgcttcgaaggcgcgcccaacgccaaagaaagcgcctcagaaatgcaacaccggccggagcttatacctccggccggtgtttttcctgccttttacttgccgagcttgccgagttcggccgtcagctccggaaccgcctggtagagatctgcaaccaagccgtaatcggcgacctggaagatcggcgcgtcctcatccttgttgatcgcgacgatcaccttggaatccttcatgccggccagatgctgaatggcgccggaaatgccgacggcgacatagagctcgggagccacgaccttgccggtctggccgacctcccagtcgttcggcgcatagccggcgtcgaccgcggcgcgcgaggcaccgacgccagcgccgagcttgtcggcgagcggctcgatgtacttggcgaagttctcgcggctttgcatcgcgcggccaccggagacgatgatcttggccgaggtcagctcgggacgatcgctcttggcgacctcctcaccgacgaaagtcgacaggccgggatcggccgccgccgcaacgttctcgaccggcgcactgccgccttcgcccgctgcggcgaaggtggaggtccgcaccgtgatcaccttcttggcatccttcgacttcacggtctggatggcgttgccggcatagatcggccgctcgaatgtgtcgggcgcgaccaccttgatgatctccgagacctgcatgacgtcaagcagggcggcaatgcgcggcatcacgttcttgaagcgcgaggtcgccggcgcgacgatcgcgtcgtagccggacgccagcgatacgaccagcgcagccagcggctcggccaggtcgtgcgcgtagaggtcgccatcggcgagcaacaccttcttcacgccggcaagcttcgcggcggcatcggccgcggccttggcattctgcccggcgaccagcacctcgacgtccgcgccgagcgcggcagctgcggtgagagccttgttggtagcgtccttgagcgacgcgttgtcgtgttcggcaatcagaagcgtcgtcatcagagcaccccggcttcgttcttgagtttcgacacgagctcggcgacgtccttgaccttgacgcctgccttgcggccggccggctccgtcgtcttgagaatctcgagacgcgctgcgacgtcgacgccgtaatcggccacggtcttctccgcgatcggcttcttcttggccttcatgatgttgggcagcgaagcgtagcgtggctcgttgaggcgaagatcggtggtgacgatcgcgggccccttcagcttcacggtctgcaggccgccgtcgacttcgcgggtgaccttgaagtcggacccttcgacctcgagcttggaggcgaacgtcgcctgcgaccagccgagcagcgcggccagcatctgtccggtctggttcgagtcatcgtcgatcgcctgcttgccgaggatgatcaggcccggttgctcttcttccgcgaccttcttcaggatcttggcgacagcgagcggctcgacattgccctcggccttcaccaggatgcctcggtcggcacccatggcgaggccggtgcggatcgtctccgacgcctgcgccggtccgatcgagaccaccacaacctcagtggccttgccggcttccttcaggcgcagcgcttcctcgaccgcgatctcgtcgaacggattcatggacattttgacgttggcgagttcaacgcccgatccatcgcccttgacgcggaccttgacgttgtaatcgaccacccgctttaccggcactaagaccttcatcgatcctctttcactcaatttgggaggggggttatcaactggcgcggaacctaaaggcccgatctgccccggtcaacgcgcgaacggctctaattttggccctctgagatgcgggcgcgcgatgggtcagcggttctggccgggaacccagagcacgtcgccggcgccattgccgttggcagcacggctggccacgaacaggaagtcggacaggcgattcatatagtgaatgccagccgcgttaaccgtctcggctggccgagccgccagttccacgatcacacgttccgcccggcggcatatcgttcgggccacatgcagatgggcagcggcgggcgtgccacccggaagcacgaaggaggtcagcggcgcgagcttgtcgttgagcttgtcgatgtcgcgctcgagccgttcgacctggctcgccaccacccgcagccgctcggctttcccctcccgttcgggcacggcgagatcggcaccgagatcgaacagatcattctggatgcggccgagcatcgcatcgagttcgggcatgtcccgggtgtggagcctgaccacgccgattacggcattggtctcgtcaacggtgccataggcctcgatgcgcagatcgtatttggggcggcgctcaccggttcccagcgccgtcgtgccgtcgtcgccggtcttcgtgtagatgcggttcaatacgaccatgtcagcgtcccatcgcccagaccgcggccatcgcgatgatgatcgccacgaactgaagcagtacgcgccagcgcatcagcttctgcgaggtgttaggcgagccgccacgcatcatgttgatgagcccgagcagcaacaccaacgccacggcgccggctgccgccggcaggatgaaagtactcaggagagatgccatttgagggtagataacaccgtgtgcacggatgcgccatggcgccgcgacagcctccggcgtgattccggggcgatgcgaagcgcgagccgggcatccatcgggctacctgcctgcggccagatggattccgggctcgcgcttcgcgcccccccaatgacggcagggcgcttcgcgaactggctttcggaccgataatatcagatggtagcaccatgattaccgatttgcgctcattgccagctgtcctgacctctccctgcgtgcggggggagagagcagtcgtttaggccgggcatgaaagcgatccgctacatctacgctgtggtgatggacgcgttctacacgttcctcgccgatgacggctgggcgatcgcaagccacatcgcgctgtcgacgctgatggcgctgttcccgttcctgatcgtgctgacctcgctcgccggcttcttcggctccaaggagcttgccgatcaggccgccagcctgatgcttcaggtctggcccaagcaggtcgccgattccatctcgggcgaggtccatgacgtgctcaccactacccgcaccggacttctgaccatcggcgcggcgctgtcggtctatttcgcttccaatggcgtcgaggcgctgcgggtggcgctcaaccgtgcctacgcggtggtggagatgcggagctggtattggctgcggctggaatccattgcctacacgctcatcgcagccttcactgcgctcgcgatggcgttcctgatcgtgctcggtccgctgatcatcgaggccgcacggcgccacattccactgttcgtcgaatcgaacgaaagcattctcacctggctgcgctacggcatcaccatcagcgcgctggtgttggcgctgttcatcctgcacgcttggctgccggcggggagacgcagcttcctccagatcatgccgggcatcatcttcaccgtggtggcgtcgctgatctccggcatcgtcttcggacagtatctggcgcgcttcgccaacaattacgtgacgatgtatgcgggcctcgcctcggtgatcatcgcgctggtgttcctgtatttcatcgccgcgatcttcgtttacggcggcgagctcaacgccgcgatcatcaagtctcggcttcctcacggcgtgtcgcttcaagcagcgcagtcgctaaagcccggggagacacaggcttgacaaggaaggcgtcggcaccggcctcgcgcgaggccgcctcgtcctcgccgcggccggacacgccgatgatcgggatctgagccagcggagacggcagggtccggatccgccggatagcttcgacgccatcgatgcccggcagcaccatgtccatcagcaccgcgtcgaatgcgccctgctccagccggttcacggcatcctcgccgcgcccgatgaactcggcatgatggccaagctcggtcagaatggtgttgagcacgacgcggccgaacggattatcctcgacgctgagcacgcgaagggcggcgatcgcctcgggctcgctgccgtccttcgccttgcggctcttgcccgatcctgccgcatccagcgacaccgtcaatgtgaaagtggcaccgccaccgcgacgcggtgcgaccgtgatgtcgccgcccatcgcacgcgccaattgcttgaccgaggaaagccccaagccggcgccgccgaagcgcgaggcgatggtgacattggcctgggtgaacgggcggaacagccgcttgatctcggccatggtgaggccgatgccgctgtcggacacctcgaaggcgacgccgaccctgcctttgcccttcgctcgacctttaccgggacgccatggcgcgacggcgagcgccacgccgccttggtcggtgaatttcaccgcgttgtcgatcaggttctcgagcgcggcgcgcaggcggacgggatcaccgaccacaagtccgggaagcttttcggagatatcaacctcggcctggagacccttggcagcggcgcggccggtcagcgaatcgccggcgctgcgggcaagcgtcctcaggtcaaacaggtcctgccgcagcttgctgccacccttccccgttcccttgccggttcgggcagcgtccacgaacagcgtggcaaggctcgccaggtgctcggcaccggccttgatggtgtcggcccagcgccgctctcgttccccgagatctgacgtcgcgagcaggtcgctgatcgccagaatgccggtcaggggggtgcggacctcatgagcaaaggcagccagcgctgcctggaccacgcccggcgcgacggtcgtgttgctgcgcttacgcgcctttccggccgtcccggaccgctttcgaggcagccgcctggacgtccgtgttgtgcgcactggacgcgttttcgccgccatgaatccccttcgaagtactctcttcgaaccccgcgctggccaagcatggcacggaggaacacccggagtcacggcgacgttttgctaacccccagagaaacttaatctaatcccatcagctggcggatgcgagcgggcgtgactccggccgcgcgcaaggcacgcaaaccggtcgaccggctcgatttcgacagcttccggcccgcctcatcgcgaatcagccggtgatggcggtaggcgggctccggcaggccgagcaggacctggagcaagcggtgcaccgcggtggcgtaaaacaggtcccggccccgcacgatctcgctgacgccctggagcgcgtcgtcgaccaccaccgacagatggtagctggtcggcgtctccttgcgggccaggatcacgtcgccccacgcctccggccgcgccgcgacgatgccgtactcgccggccggcccctcgccgagttcattccaactcagacgggcggcacggcggcaggcggcaggcatgtcgagccgcagcgcatacggcgcgcccgaggcgatcaactgcgaccgctcgtcggccgacagtgatctggcggcgccgggataaagcggcgcaccgtcgggatcgcgcggccatggcccttccacctcgcgcgcggcgatgagccttgcgatctcggcgcggctttcgaaggcgggatagacgagaccaagcgcagacagcttttccaacgcagcacgatagtcggcgagatgctccgactgccgtcgcaccggcgtctcccaggcaattccgagccagtcgagatcctcgtagatcgccgtctcatagtccggccggcagcgtgtcgcatcgatgtcctcgatccgcagcaacatccgcccgccggtctcttgcgcgcgatcaaagttgagcagcgcggaataggcgtggccgagatgcaggaggccattggggctgggggcaaatcggaaaacgggttgtgccatcagatgaatctcgtcatggccgggcttgacccggccatccatcgtccaaggactctgttacgataggagatggatgcacgggtcaagcccgcgcagcacgagccaaacaccatgaccatccatctcgaaacccagtccgatctcgaagaggccgtccacgcgctgatcaagcgcgatccgcggctgaagccgattctggagatcgcaggcatgccggcgctgcggcggcgcgagccgggctttaccgggctcgcgcacatcgtctgcgggcagcagctttccaccgcgagcgccgcggcgatctggggacgtctttcggccgccttcgatccgtttgatcacgatgccgtgcgacgggcccgcaccgaccggctgggacggctcggcctctccgccgccaagatcaagacgctcaaacatctcgcccgcgagatcgccgccgagcggctgaacctcgacgtgctcgcggaggaagatgccgatgccgcccatcacacgctgatcgcgctgcccggcatcggcccctggaccgccgacgtctacctgctgttctgcctgggccatggcgatgcctggccggccggcgacctcgccgtgcaggagggcatccggatcgggctaggcctcaaggcgcgaccgacggagaagcagatggcaccgctcgccgaaccctggcgcccgctgcgcggtgcggcggcgcatctgtggtggagctattaccgcgccgtgaagaagcgagagggcgtgctggcgggatcaggctagccgcgcagcctggcgcggtcggcccgggcgcattcggcgacgaaatcgaccacggcgcgcaccgccgggagctccacgaggtcgggatgggccagcagccagagatcggcgatactcgcgagcttctgcggagcgacgcgcacgagatccgaataggtttcagcgacgaagcatgacagcgcggagatgccaattccggcacgaaccgccgccagcatgtccccctgggacgagcagcgcatcaccaccctcgcctgttgcgtgacgacatcgctccagcgcgcgagctgcacattggatgcttggtcggcgaagccgatgacgctgtgctccttccaatcgccgcggcgctccggcagggaccggccggcggcatagtcgcgcgaggcatagaagccggtgccgagacggccgatcttgcggccgaccagattctcctctccactgtcgactggccgcagcaccacgtcggcctcacgccggcgtacgcttgccggaaacggatgagtgatgatctcgagctggatatgatcgtgcgcacgcaggaaggtcggcaaccgcggcatcagccagtgcgaggccagcgtcgcgccgatcgacagcttgacgatgccgcgcgccctgtgccctcccgccgccaccgcggtctcagcccgtagcgccgcggccgccatcgcctcggcgtgctcgcgcaaggtccttccatccgcggtcagcgccaggccatctgcggcgcgcgccaccaatcgcgtgccgagctgggcttcgagggccgcgatcttgcggctgaccgtaggatggctggtgtgcagccggcgcgcggcagcggtgaagctgccggtgtcggcgactgcgacaaaggtcttgcaaaggtcccagtccatcggcagctccgttcacatttgaatggcccttcgttcattattgaacggccggaccgcgccgtccaaccttatagtggccgtcaatccgcaaccggcggcactccgcccgcacgacaatcaacaggaaacgtcacgtcgtccgcccgccggcgggccgcgtttcgggaggacaagatggcgctgcccactctcttgaaggattcgctggaactgcccgtcgtcggctctcccctcttcatcgtttccgggccggagctggtgatcgcccagtgcaaggcgggcgtcgtcggctcctttcctgcactcaatgcccgcccagtcgagaagctcgacgagtggctgagccgcatcgaggacgagctcggggaatacagatcgcgcaatcccggcaagaaggtcgccccctacgccgtcaaccagatctgccatgcctccaacgatcgactgatgaaggacatggagatctgcgtgaagcacaaggcgccgatcatcatcacctcgctgcggccgccggcggagattgttgaagccgcgcattcttatggcgggctggtgttccacgacgtcatcaacgtcaagcatgcgcggaaagccgccgagcagggcgtagacggcctgatcctggtctgcgccggtgcgggcggacacgccggcacgctgtcgcccttcgcattggtgcgcgaagtcaagcagtggtttggtggagcgatcctgctgtcgggcgcgatcagttacggcttcggcatcgcctccgcgctgacgctcggcgccgacctcgcctatatgggcacgcgtttcatcgcgacccaggaagccaatgcggacgacgcctacaagtccgcgctgacgcggcacgccgcgcacgacatcgtctacaccaacctgttcaccggcgtgcacggcaattacctgggcccctcaatcgcggccgcagggctggacccggacaatcttcccgctgccgacaaatcgaagatgaatttcggctccggcggcaacatgaaatcgaaagcgtggcgcgacatctggggatcaggccagggtatcggccagatcgtggatgccccgccggtcgccgagctcgtcgagcgcatgaagggggaattcgaccaggcgcggcgcgatttcctgatgcgcgtgagcgcctgacgtctcggactgaataaacacgggaggacatcatgaagcaggcagccgcactgatcggactatcgttgctgacacttggcgcgagcggcgcccatgccgaaggcgccggcgagatccgcatcgggcagaccctgccttatagcggccctgcctccggcttcggcacgatcgggcggacgcaagaagccttcttcgagaagatcaatgccgagggcggcatcaacggtcgcaaggtcaagttcatcacgctggacgatgcctactctccgcccaagacggtcgagcagacccgcaagctggtggagcaggacgaagtgctgatgatgttcggctcgctcggcaccgccaccaacagcgccgtgcagcgctatctcaacggcaagaaggtgccccagctgttcgtgctctccggcgcgacgaaatgggccgatccgcagaaatatccgtggaccatgcccggcatggccgcctacgaatccgagggcgtggtctatgccaagcacgtgctgcgcaccaagccgggcgccaagatcgccatcctgtcccagaacgacgatttcggccgcgactatgtggcaggcttcaagcgcgcgctcggcgacaaggccaacagcatgatcgtggccgaagcgacatacgagaccagcgcgccgacgatcagctcgcagctatcggccttgaaggcttcgggcgccgacgtgctgttcggggtcgtgctcggaaagttcacctcgcagatgatcaagggcgtagccgagctcggctggaaacccgaactgttcttcgtgccgacctcggcctcgtcgatctcgttcctggagccggctgggctcgacaacgcggtcggcctgatctcgtccagcaatcaaaaggacacgatggatccgcaatgggccgacgatcctggcgtgaaggaatacttcgcgttcatgaagcaatacatgcccgccgccgacctctccaactccaactatgcggccggctatcattatgcgaccctgctcatgaccgtactcaaggcctgcaaggatgacttcagccgcgacaacatcatgcgccaggcagcctcgctcaaggacgtccagctgccgttgctgctaccgggcataacggttgcgaccgggcccgacgattatcttcctttccagcagctgaggctccggcgcttcaatggcaagagctgggtgggattcggcgacgtgctggatgaccgctgacatcccggaaggaggataggcccatgatcatcagcggcgaccgccggattagctacagcgaaatccaggcacgcatcagacgcgccgccagcgggtttcgcgcgcttggccttgccgagggcgcacctgtcgcaatgatgctgcgtaacgatttcgccctgttcgaggtggtggcagcttcggccgccctggggagcccggtggtgccgatcaactggcatctcaaggccgaagaggtccgatacattttggccgatagcggcgcaaacatcctggtttgccacgccgacctgctgccgcaaatccgctccggcctgccaccagacttccgcctcctcgtggtcgagaccccgcccgaactcaaggctacgttcgccgtgcccgcggcgctggcgcaggtcccgtccggaatgaccgattgggatcgctggcgggaggatcacccggaatcacaggagccgccgaggcgagctgccgcaatgatctatacgtccggtaccaccggcatgccgaagggcgtgcgccggatgccgatgcagccggatcaggccgccgcatcagaacgcgtcggcgcgatcacatacggcatcaagccgcgcgagggccaggtcgtgctgatcaacgggcccatgtaccactcggccccgcactcctatggcatgatggcgttccgcaacggctgcacgatcgtcctgcagccgcggttcgaggcagaggaactgctggctctgatcgagcgccaccgtgtgacgcatatccacatggtaccgaccatgttcgtccggctgttgcgccttcctgacacagtcaggcggcgctacgacctgtcgtcgctgcgcttcgtcgtgcacggcgccgcgcccggcccgcccgaggtgaagaaggcgatgatcgattggtggggacccgtcatcaacgaatatttcggctcgaccgagaccgggattccggtctggcactcggccgaggaagcgttgaagaagcccggcacggtcggccgggcaatcgagggcggcatcatcaggatcttccgcgacgacggcagccagtgcggcgctggcgaagtcggcgagatctacatgcgccagagggcggtgcccgactttgattatcacggtaaggcgcaagcccgggcggaagcagggcgcgacggtctggtcagtgtcggcgacgtcggctatctcgacgaggacggctatctgttcctgtgcgaccgcaagcgcgacatggtgatatcaggcggggtcaacatctaccccgccgagatcgagaacgtgctgatcgggatgcatggggtgcgcgactgcgccgtgttcggcatcccggatgcggaatatggcgaacggctgtgcgcctgcatcgagccggaaaggggcgtgcagctctcagctgccgcggtgcaggcctttctgcgcgagcggctggccaacttcaaggtgcccaaggaagtccagttcctggatgcgatgccgcgcgaggcaaccgggaagatcttcaagcgcaagctgcgcgatccctattgggcggactggaaaccggacgggcctgagccggcggccccgaaatcccgggcttgaagaatcacgcggcctattccgcccgagcagggctatatgccggcattactcgggtcaccggcttttggcggtctgcgaaagcgtatagcgtcagcctcagaggaaacgccgcgaaggccgccatgaggtcgcgcatgctggacaagaccaaggatatttacgtctccgcacagtcctggctcgatgaattcgagcgcgccctgggcaagcctgatgccgccctgaagcgcctcttccttgcagacggcttctggcgcgacgtactggcgctgagctggaacctgcagacgatcgcgggcgccgatccgatcacgcgggaattggccgcgcgcgcgcccaaggccgcgccgaccaatttcaggatcgctccgaaccgcgcgccgccacgctgggttacccgcgccggcaccaataccatcgaagcgatcttcgatttcgagaccgcaatcggccgcggcagcggcatcgtgcggctcgtcccggaccctgccgacggcgaccgcctgaaggcatggacgctgctgaccgccctcgatgaattgaaaggctacgaggaacagctcggcacctcccggccgcgcggtcaggcctattcccgcgatttccgcgggccgaactggctcgatctccgcaacgcctcgcgcgactacgccgaccgcgacccggccgtgctggtggttggcggcggccaggctgggcttgcgatagcggcgcggctgaagcaattgaaggtcgacacgctgatcgtcgatcgcgaggcgcggatcggggacaattggcgcaagcgctatcacgcgctcaccctgcacaaccaggtgcaggtcaatcatctcccctacatgccgttcccgccgaactggccgacctacatcccgaaggacaagctcgccaactggttcgaagcttacgtcgatgccatggagctgaacttctggaccggcaccgagttcgaaggcggcgcgtacgaggaggcgaagggccactggaccgtgaggctgcgccgtgccgatggcagccgacgcaccatgcatccgcgccatgtgatcatggcgaccggcgtcagcggcatcgccaatattccggacattccgacgctttccaatttcaagggcacgctggtgcattcgagccgctacgaagacggtgagaactggaccggcaagcgcgccatcgtcatcggcaccggcaacagcggccacgacatcgcgcaggacctgtattccagcggcgccgaagtgacgctggtccagcgctcgccgacactcgttaccaacatcgagccctcagcgcagctcgcttacgccacctacaacgagggtacgctcgaggacaatgatctgatcgcggcgtcgatgccgacgccgctggcgaagaagacgcacgtgatgctgaccgagcagtcgaaggagctcgacaaggagctgctcgagtgcctcgcccgcgtcggcttcaagctcgacttcggcgaggctgggaccggctggcagttcaaatacctcacccgcggcggcgggtattatttcaacgtcggctgctcgaacctgatcctcgagggcaagatcaggctcaagcagttctccgatatcgacagcttcgttgccgagggcgcccggatgaaggacggctcgaccattgcggccgacctcatcgtgctttcgaccggctacaagccgcaggaatatctggtgagaaagctgttcggcgatggtgtcgccgaccgtgtcggcccgatctggggcttcggcgacggcttcgagctgcgcaacatgtatgcgcgcacgaagcaacccggcctctggttcatcgccggcagcctcgcacaatgccgcatcaattcgaaatacctcgcgctccagatcaaggccatcgaggaagggattttggggcgtgaggagggcacggcttaaccctcgcgtcgttggacgcgatgcgtatctctgcaacgggtgaggagagaccaatgcccgccattctcggcgccggcgagcaccgctaccgcgttgtcgaagacttcgccaagctcccggacggctggcagctcacggacgtcgcctcggtcgccgttgacagcaaggaccgcatctacgtcttcaaccgcggcgcacacccgatggtggtgctggatcgcgagggaaactttttgcgcagttggggcgaaggcctgttctcccgcgcgcacggactgcacatcgatgccgacgaccatctctattgcaccgacgacggcgatcacaccgtgcgaaaatgcactgcggaaggaaaggtgttgctcacgatcggcatcccggcaaagccggcgccgttcatgagcggcgagccgttccaccgctgcacccacactgcgctctcgccgaagggcgagatctacgtctccgacggttacggcaacgcccgcgtgcacaagttcacgccggacggcaagctgataaaaagctggggcgagccgggcaccgatcccggccagttcaatatcgtgcacaatatcgccacagacgccgacggctgggtctatgtcgccgaccgcgagaaccatcgcgtgcaagtgttcaacggcgagggcaagtacgagacgcagtggaacaatctgcatcggccctgtgcgctgtgctgctacggcggcaggagtcccaccttcgtgatcggcgaactcggccccggcctttccatcaaccgcaatgtacccaatctcggcccccgactgtcgatcgtggacgccaagggaaatcgcatcgcacggttgggcggcgaggaaggtccgggccttgccagcggcaagttcctggcaccgcatggcatcgcactggactccaagggcgacatttatgtcggcgaggtcggcgtcaccaactggcagtccagctttccggacgagaagatgccggccgcggtgcgcacgacgcggtgcctgcagaagctggagcgggtacgggagtagccgccattgcaagtccatgaggtgcggacaagcggtttcacacgcccgccgggatcgcagcgttttgaccgcttttgccaccccgccgccgcattgctcgcgcctgaataagtcgctcaacgggcttcacaatcccgtcacgctgcatgtagtatgtcactacatgctgcttcgcagcgtacattggaggccgggagcgttacttgaacgcacatgtctcgcaaggcagttggccggtgttggtgctgaatgcggacttccggccgctgagttactacccactgtcgttgtggtcgtggcaggacgcgatcaaggcggtgttcctcgaccgcgtcaacatcgtcgcgcattacgatcaggcggtccacagtcccacgctgcagatgcagcttcccagcgtcgtctcgctcaaatcattcgtcaagccgaccactcatccggccttcacccgtttcaacgtcttcctgcgcgatcgtttcgcctgccaatattgcggctcgccagaagacctcaccttcgatcacatcatcccgcgcagcaaaggcggccagaccacctgggagaacgtggtcgcggcatgctcgccgtgcaatctgcgcaagggcaacctgacgccggcgcaagcaaagatgtttccgcgccagagcgcgttcgcgccgaccgtgcaccagctccaccgcaacggccggttgtttccgccgaactatctgcacgacagctggctcgactatctctactgggatacggagctcgatccgtagggcgggcctccgcaggttatccccgctgcagagcgagcgtcacgccgccgagcgtgagcgccatcgccgtccattcgcgatagcccagcggctcgcccagaatgatggcggcggagatcacgccgatcaccggcacgatcagcatgccggtcgaggccgtggtcggtggcagacggcgcagcgtctcgaaccaggtgacgtagcagaggcccatcggcaccagcgtcatgtaggcgaagcagccgagtcccagcggggtaatcgcggtgatatcgggatgctcgaacacgacgccgaggatcagcatcgtggcgcagccgagcccgacctgccagacaacgacgaccagcggcggcatcggcagcggcttgcggttgagcacgttgccgagggcgaagaggatggcgcagagcagcgcgagcacgatgcccagcagcttgtcggcgctgaacgcaaggccgttgccgctcaggagcagcgtgacgccggcaacgccgaggacgagcccgaaaatgtcccggggcgccggccgcgtgttgagcaccggccaggcgaacagcatcgcccagatcggcatggtgtaggcgagcagagcgccctcgctcacgctcacatatttcatcgcgaccgtgccgagccccatccaggcgaagacgttggtgaaggtcgcaaacagaagccgcgggacggcttcgcgcggaacggcgaaggactccttccggctcagcacgagggcggcgagaatgagcgaggcgcaaacgcccgcaaggccgcgcgcgaacagcggcggccattgctggagcagaagcttcatcagcggccagttcagtgcccagccgcatgccgtcacgcccaggcagagtgagccgatcgtcctgtcgcgccgtgccgtgtccatggatagcgcttagcagcccagcaccagccgctccacctcgaatggcgcatgcgggggcatcgcgcaggacggaaccggaccggccggcggtcgttcaaatggaagcccacgcgtcgatgcgtgccgcacaaccgagggaggccatcatgcccgcagccgagaaagaccacgtttacaagattctggacctggtcggatcgtccgagacctcgatcgaggacgcgatcaagaacgcgatcggccgcgcctcgaagaccgttcgcgaaatgaagtggttcgaggtggtgcagacgcgcggtcacatcgagaacggtacggtcggccactttcaagtcaccttgcgcgtcggcttcacgctggaggagtgacggcggtcccgaggtcgcggccgatccgctatctcggcacatgacctgtttgcacatcccacatcggtgaacggaagtccttcggaataccggctcccttcgggtaacataggtc

SEQ ID NO: 172 - DNA, 4369 bp, Bradyrhizobium colbertium
ggtgtccactcattcggaggaagttcagaaacttctagcactgcgcgaacgcggccgtgagtggaccgatgtgtggtctgcacagtatgacgtgattgtccctactgcggggcccgccacatgtctccttacaagagcgggacgctgatgacgcagaggagagcgatgacgaataggatcgctcttctcatgaagtcttcataagcgcattccgcggcggcaaggtgatgctgccgatggcgggggtgcgacactgcctgactgcgaaggcacagccgctgcttttggtgacgagcttctcggaattttccaccgagaatgactcgcatggcgagcacgacttaggccgctttagcttggtgggccgcacgttcttctggaagatagacaatcgataagggcatgcggcacgactccgaatacccgagcgatcccgaacggacgctgcgtgtgctcacgttgatgctcgccagtgagtactgaacagagcaagaagtgaccgcctcccatctagacgcgaggggcgaatgctccagcaggaggagcacagttgtggggaccatcgtatggcctgccagaacctacgggttcggtgcccgatcagggcggattttccctggacattcttgtccaccaacccttgcttcaacgcgagggtctttttttctcgatcgaaatgaccccttccaattcaatggcagggaaaggcgcatttaatcatactgctgacattgcatcactttagtcattgaaatatcttcaaagaatcggccagtgcagcggtgatagggtaacgggcaccggcggcttggtcgagctgcctcccttgaaccttacaatgacctagaccattcgaaacctttgacatgactcagatccggttctgcaaatcctcagacggcgtccgtatcgcttatactcagggcggccaaggtccggcgatgatcgaggtagcgacttggctcaatcatgtggaatacgattggaagagcccaatctggaatgcgcgacttgccgagctgacaaggaactacacgcttacgcgctatgatggtcgcggctgcggactctccgaacaaaatcccccgcacctgacattcgatgatcttgttgccgacctcgaggcggtcgtcgacgcgtcagggctgaagcgattcatactcctcggctgctgccagggagcgccggtggcgatggcttacgcggcacgtcatccggagcgcgtgagccacttggttctttatggcgcctatgcacgcggaaagctcactcacaatccgttgccgcaggacgttgacgaagccgagacgatgctcaagctggtcgaactcgggtgggggcgtgacaatccggcgttccgccaggtgttttctgccctcctgatacccgatagcaggccggagcaatacagctggttcatggatatgcagcgcatgacgatctcgccacaaaacgtggtgcatctgatgcggacgcataaccgcatcgatgttagcgacatgctgtccgatatccgcagtccgacgcttgtcatgcacgcgcgcaatgacaggcgagtgccgttcgccgacggccatacggtcgcccattcaatcccgaatgccgaattcgtgcccttggaaagcaataaccatcttctgctcgaacatcagcctgcgtggcgtcagttccttgacgagacggcacgatttgtccgcgctgatcggcgcgcggaatccggagaaaccccgtttctcgagctgactgcacgcgaacgcgaggtgctcgacctgatcgcccgcggtttaggcaatttgcagatcgctaagtcgttgacgctgagcgagaaaaccgtccgcaatcacatcaacagcattttcggcaagctcggcacgctaaaccgcgcgcaggcgatcgtccgtgcgcgcgaggcggggcttggatctcggggcttctccaggaactgaccgaatctgggtcctgggccccaaactctttcattgatctcgtcaaaattgtgcagccgtctgggtccggcggctcatgacgaatgctcagtattcttgatgaattggcaaacctggagcgatcgcgccaccagccaagtttggagggagaaggcaatgaccgtgacaaaaaccgcacctgctggatctgcttcggtgcaaggggacttgtggggctcgcgtccccgtgactatgccgaggtacaggagccgacgttccttcccctttatgagagcgtgctggcgcgtccggaagtcgcgaaggctgggtcaatcctcgatattgggtgtggagctgggctcgcagcgcaggttttctcaagagcaatcggccgtgttgcaggcgtcgatgctactgcgcccttcatcgagattgcgctgcgtcgcgtccccggtggagagttccacgtcgtcgaaatggaagccctcccctacgaggacgactctttcgacgtcgtgacaggcttcaacgcatttcagtatgccgcttcaccggtgaacgccctgcgtgaggcgcgacgcgtcgtgaagaccaacggcatcatcatcatcgcagtctggggcttgccggagacctgcgaggctgccgggcacctgaaggctttgggatcgctgatgccgccaccaccccacggcgctccaggcccgtttgcgctctcggatgaaagcaagctcaaaacgctcgcgagcgaagcgggcctgacaccgggcgtagtcgtggatgtctcatgtccctggatttatcccgatttggagaccgcactcaggggcatgctgtccgcgggaccagccgagcgcgcggtccgggcctccagctttgaacgcgcccgcgacgcagtcgccgctgcgatcgagcgctaccgcactgcgtccagcggctatcgtctgaacaacacgttccgatacctagtcgctcgctcatagagacgagactcaatgtccgacatagatttgcccccgacgcattacgcgctttcaggtgaggtcagtattgcctaccaggtgatgggcaacggagcgatcgacatcatcatggtccctggcctgttttcgcacgtcgagttcatgcatgagctcccaggctacacggcgttcttgcggcggctatcccgatttgcccggattgtgagcttcgacaaacgaggccaggggttgtcggacagaatgtccggcgcgccctcactcgagcaacgcatggacgatgtccgcgccgtcatggacgagattggatcccgctgcgccattattttcggcttctctgagggttgtcctatgagcattttgttcgcggcaacctatcccgaccgggtctcgcaccttattctcgtgggagggttttcccgcgctgcggatcggatgtctgacgacttgtggcagcctcgtttggaacagatcatcaagtcgttcggtagcggagccatgatcaaaacggtcatcccgagtcaattgcacagcgccgccgccgttagccagttcgctaagctagagcggttatccagcagtcccggcgcgttgcggacgctcttggcactcaaccggcagatcgacgtctcctcgatcctccccacattgcagatccccactttagtggtgcaccgcaaaacagatgctcaggtccccgtcgccctgggtcgaaaactgggtcagaaaattccgggggcaaagtacgtcgaatatgccgagggcgatcactgttactggctcggtgaagttgaggcgctctatggagacattgaggagtttgttaccggccgacgggaagctgcatcaatggacctggagcgagtattggcgaccgtgcttttcacggacatcgtcggttcgacccggaatgccgccgagatgggcgaccaaacgtggcgtcgattgctggattgtcacgatgaattggcgaagcagatggtcgcaaagcatcgcggcactttgatcaagaacactggcgatggtattctcgcgacattcgacggacctggtcgggcagttcgatgcgcgattgccgtcgtgtccgcttcaaagagaatcggtttaacattgcgcgccggccttcacactggcgagatcgaaatcagagggcgggatgtcggcggtattgccgtgcacgtcgcggctcgcgtcatggccaattccaaagctgatgaggtacttgtttcaagagtcgtgaccgatctcgtggccggagcaggtttgaaattctccgatcgcgggtcgcacgagcttaagggcattccggaccggtgggatctctttgctgcaagcatctagtctctggtccacgacgtcatctgttgcggtttgcacaagagaggtcgttatcggagcgaagcgcccgtcgctgaagtttatgagtgtgcgccctagggtccggactcaattgatccaccaag

SEQ ID NO: 173 - DNA, 22286 bp, Bradyrhizobium colbertium
cgatgcacctatagattgcgtgcaaacttacgttatgagactttgttacgaacacctgatgcggatgtaggctagtgactgcgctgcgtcctcgtagaaattcatccatttatcgcctcatgtaggcgcaaggcctggggaggccacctgtggagccccagctacttcgcggccttttgtggaggcgccccgctcgcgatcgtgaagcaatatatcgagaaccaaagacgcgcctcgacccggccctgaagggccaggtttgctgcgcgcaagaggatcaaggattattgcaaatgaccggcgacgccggcacatcgtccagccttcgctccggtctgatcactcgccgtacgaggagcgcggatagtccgacgcaaagcgcggtgagcagccacaagacgagcggctgcacgatcggaaaaaacgtcacggagcctggtacggcacggtccaggtcgccgatctgatagtagttctcgagatagccgcccttgcccggcgcgccgggcggcacgagcgaatagaggccggcccccggatgcgtgcaatagccggccgcgcgacccttgccgcagctttcgcccgcggccacgagttgctcggggtcgtaaccctgtgccctcgcttcgatgtacaccttcatttcgttgctgtgcaaacggcgcaggaaatgcccgttcaggtacagcggtatggctaccagcaggaccagcgtcgccacggccgcgaaacgtgacgacgatggacgcggcggggttccgaggaagccgaattgcggaacgcgcatccaccaagggtgctcgcgatacgccttggcgaacgataggaggtaccaaagcataaggggcatgaggaatgcggtcagatgcaggccccagaacgcggccaggatttcgttgccgaaaccgagcgagaggaaacgaggaaactgtctgatgcgatccgccaaaaagtggaccagtacggcggcgaagaacagcgtcgcggcgatcgtgaacgtggaggagaagttcgatggaagatcgcgtacttcgtgcgggatgtcgccggcgaactcaatgagggcctccgccggcaggaaatacgcgacttcgcccgcaccctgccgcctgacggccatgccgatcgtggcctgatgagcttcatcccagattccggcgccgctgaagccgggctccaacggctttccttgggcgaccgtgatctgccgccacgccgccgtcgattggcccaggaatctcgcctcgacgtgttcgcctacggcatacccggagcgcacgccgaacagacttaggattcctgaccggcctcgttcggcgattgaggcgagcaccgcgacgccagcggccgccggcgcgggctcgtccaattccaacagcgccatgtcgtcgagtggatatcgacccatcttcctccatcgcacgacccgcgcaagccggatctgtccgcccggcaccatggggaagaacagcgtgatccggatgtcgggggagggccgatcctcggcttccggtttccgcggtatcgccgcgttcacaacgtgcgcgcaggtgagcgccaccctcggcgacacgaggatcgccattccgcagtgatcgagatttgacggatcggcaagatccggtaccttgacctcgatgatgcccattgccctgccgatgccgttggtgcgcatgactcccgctctgcaatgtggcggcgctttcacggaacgatcttgccacacaagtccacggactgcgaggacgcgatgaacgagtggttggtggtccggcgctcccgcccggcgcgcactttcatagcgaaatcaccagagccgatcgcgaggaccgcggtagcgaacgagacgcagtcggaagacaagttgcgcgtcggcgtcgagcacgccgtcgttcgggatgggttgcgcgacaagcgggagatcgaaaccgtggcgccgcccatgcccatgtccctgatcgagcctctttcgtgcgaacccgcggccgttgaggatcttctgctgaagagccggcaggcgggtgtcgcttggggtctcggagccatgggagtggatccggacaagttcgacggtgccggcgtttcgatcgcggtgatcgacaccggcatacagcgatcacatcccgccttcgcccacattccgcaagaagccatcctggaagccgacttcaccggcaagccgggcggcgacaagggcgcgggcaaggcggccgacggccgcggccacggcacccattgcgccgcgaccatttgcggcgggaccgtcgatggcatccgcataggcgtcgctccgaagatcgacagactgctgatcgccaaggcgatcgggggagaccgcggttcagccgctctcatcgaggccctcgattgggcagtcgcggaaaaggtcgatgtgatctcgatgtcgctcggcttcgatttcgtgggctatcgtgacgccctgatcggcaagaaggtccatgagaagaccgcgacgtcgatggcgctgacagctttccgcgacaacatcagggttttcgatgcctggatggagacactccggaccaggcgcaagcagggttacgatccgctggtgattgcggcctgcggcaacgagagcgggcggccgggctacatcgtggagaaggccagtccgtccgaagccgaaagcgtgatcgcggtcggagccatcggcgaagatttcgccgtcgctccgttctccaacatccatccgaaattcgtcggtccgggcgtcgacatattgtcggcgggaatccgccagaatctcacggtgatgagcggcaccagcatggcgtgcccgcatattgcaggcttggcggctctctattggcaagctgcgcgcacgtcgggatcggtggccgactctgcgcgcgtcctgcggatgatggaaaacagcgccgagcggaacttcgcgccgtttcagtcgcagccgctcgccgacgtcggcatgggaatgccccgcgcaccggagcggccccaaccgtcggtccgctcgcgtggtccctcataggagccgcgattcctcgcggcgtggcctgccccgtcttcctcgtcgcccacgtccgctcgatcggtgcacgcgaggctggtgtcttcgaatgccctgaagttcgcaccggccgttcccatagggacattcctaggtgaccggttctgcaggcagtgcctatcatggcagcggcttgggccgtccgggcctggcgagcgggagaacgagggtgcgcagaagatacgtcgtcttgcggagaactctgccggtcaggcgccacgccgcgccgccggatggtgttcgggaattgggcgagccacaggaagagagcttggcgggtccgacgcatctgacggtcgaggatttggacgacggggacgtggcggagatcggccgcgacccgcgggctaacgtctcgccggtgatgccgacgaagctcgtgagaccgctcgacctaggggatgacgacgctgacgacgtatggggcatcgctgccgtgggggccgacaagtgcggctacaccgggaaaggtgtgcggattgccgtgctcgacaccgggatcgaggaaaagcaccccgcattccgcggagttcatttcacgacgtgcgactttacggggaccggcatcgacgaccgtgaaggacacgggacgcactgcgcgggtaccatattcgggcgggagatttccggcaagcgcatcggggtcgcgccgggcgtcgagacggccttcatcggcaaggttctgcgcgacgacggcagcggcacctccgatatgatcttcacgggactgcgatgggcgatcgaacagaagtgcgatgtcatatcgctatcgctggggctggattttccgggccaagtcgactctcttgtcgccgatgggtggcccttggacctggccgcgtcgatggcgatcgaggactaccgcaagcactctgccatgttcgaagccctgatggggctggctcgcgtcaaggttagcttcggtggcagcccgttgatcgtcgcggccagcggcaacgagagcagacgcaaccagaatccgatgtaccggatggcgacgtcattgcccggcgtcgtgtcggatatttcggtcggcgccgtcgagagggcgagcagcttgttcagggtgggctatttttcgaacgcctatcccaccgtggtcgcgccgggcgtgaagatcgtctccgcggcgctcggaggcggcctcaagaccttgagcgggaccagcatggcatgccctcacgttgccggcgtggccgcgctgtgggccgaaaagctgcaccgtgatggcgagactgtaagcgcggaggtgctcttcagccacatcaccgcccgcgctcgtcgcgatgtcttcgcccccaagccggacgaagccgacgtcggccgcggcctggtcaccgcacctggctaggtcccgaccgcggaccgtcgggaagaaaggcgaactcggatggattggcgatggtcccctgtcgtggctcgaacgacaggtcgaactggctcttgttcggcctgagggcgtctccgtccacgtgcgaaaaggcgatctgggcgatctgcagaccggggtacagcgccagaggtatctctcccaaattagccagttcgagggtcacgatcccctggtagccgggttcgatgagggtggcggtcgcgatgctcaagccctcgcgggcccacgtcgaacgggcggtcactgcgccgatcagatcggtgggaaggctgacccattccaacgtgggaaccaaggccaggcttccgggatgaagcaggaagcgcgaacggaaaggcagttcgtatctttcgtgcttttgcgccagatcggtctggcgggcgtgggccgagatctgctccaagctcttggccgcggcggggtcgacatgggacgacccgcgggctctcacgatgagcacgacgttgcccatccgcagatcgatgctggcggcgccgatctggtcggacagaagcggtgcgactgccagatctcgtgcgcggagacgttcgatgatcttctctcggccgagcgcgctcactgcttctcggctccggccagatcggtcatctcgatggccctttgctgcagcagggcatactcgcagagcctgttgatttcgaggaacgacatcttgcggagcaacggattggaggcggccacatccgcctgcaggcgatcgcggccgaaccagaagcaccatcccgcgtacagaccgtgcttcatcggaacgctggcgttgctggcaattccgcgctcgtcgatctcgtacgatatcggcggtctgcagagggtgagctggcggacgagatcggcgagcatgttccgatcaggacgatcgaagatgaactcggtgtggcttccgaacgaattccttaggcgcgccgctatctccgaaatctgatccggtgcgaacaactctgcccagcggccgtccgcatcgtcgatcgcatagttcagcagagcggtctccgcttcgtgcagcgcgccatcggagggcgccgaaattggggcatgccaacccagcgcttccatcgccctggagatgatccttcgccggaccgggaaggacggatgcgtgaagctctgaacgaaggcatctccgggactgctgttgagcggctctaggatggcccgatgtgctgcggcgaacgacgggccgaagagcatcagcccgaacagatcgcacgcgatttcgatgcaccagttgtgcagcgatatctcggagaaactgtaggacgtcgaagacggaccggctgcgctccgtatccactgcgtggcttgtatcgtgtcctgcagcggcgttttgtccttcagcgcggacagcacctgtgaacgcagcacgccacccggtccggtcgactggaaggcggtatgacctagttcgtgaccgaagagcgaatggagcaggacgtggtgcttgaactgccgcggaaaggcgaccacgaccaggcgttgggaaccggcgacgggtacttcgtccacgatgtggtaccccatgccctcggcgatggtatgcatgatcggcttcacgaacgagccgtccagctgttcctccgcgaacagggtctcggcgatatcccggataccctcggcgaacggccaggagaactcgccgagatgggaccgctcgatgagcgagatgcggctgccgatctcgctcaacgaccgcatgttgtcggcgatgtccttgccccgcatggagggattgttcttgatcgactgctggatcgcggcgagccgcgtcttgcattcgttgaagtagtccagacttctagcgggaccgtagtcgtggcgtagcgtctcgttgagcgcgagcagcacgctctcgcattcctccctcagaaattcgtagggggtcaagtagccgccgggtagagatggtcgatgaacgcgccgaggaagcgcgaggcccggtcgcgctcttccttgtccgacgtctgcatcgcgggatatgcgaccgatcgcagcacgccttcgaccgacttgatggcggcgtcggtatcggcggaaccgtagacggcctcgatcgcctgcccgatggcgtcacgaagctccagcacgtggcggtccgatgagggcaggagggtcagcgcctccggacctcttgaagaacgcggttcgaactcgaacccgacgaagcgatgggagcggtatgcttctagaaggcggaacacgttgttgagcgcggggacctcggtgctcgtcgccttcgcctcctcgatgcattgcttcgccgtgacggcgatcagcctggcgggacctcgcgcgtctctttcgtcgtgcgcagccatgatcggcatggtccgttccctcttccaaaaagccggggtcagcgtaggacaacgcagcgtacgcggcaagcctattgtttatatactaaatatgagcttatttcaattttagatcgatcttcgacagagttgtccccaatgccgatttcccgaccggcgatcaacgccttcacgccgaagatggcgtccgccatcgtcggcatgagcgtgcacatgctcaactatctggcgcgcgagggatatctgcttccgacctatccccagtcgcgcagacgcaagccggccagagggagaccgcggtactattcgtatcgtgacctcgtgatcgccaagatcgtccagaggctgctcgatggtggcctggaactgagccgcctgaaggacggcatcaggaagctcgggcgacatccggcttggcaggcgtcgaaccagcagaagaccctgcggtcgctcgcgaccgacgggcataacctgtatctgctggacgatcaggggcggctgacggatatcacccgacagggtcagcttgcgtttctgttcgtcctcgatgtcgcctcggctcaggacgaggtcaggcggaaaatggacaaggagcagctcgggtctttcagccttgtgaaccgtccgatccgctttgcgagaccgacgtgacgaatctcgatcgtcggggacgcgttgatcccgccagcggcggatgcatgggaattttcggccgttcttgcgatgctctgcttcccggcatcgacgcgtgacgttctcggcctgcgaacatcttcgagcaagagatcgtcgccgcaacacgaacggacgaaacgatgtctggctgccccttttaagatgcaatgcgacgccttggttgtcgccccgccgtcggaatgcgccgcggcagcccggtaatgccgtgtcgcccgcgcctagagcgacctccgatgcattctgttggagctccgacccgaaatgccggtcaatcgcagcctcgacttcctcgctgaactgcggttcgcaaaacggcgaaggcaggccgcgacgggcgtattccctttcgaggtcgatcgcattttgctaagagctccgacgcacagcttcttcttccattcctcggcgccggacgcccaaccggagaagcgcttcagggtgcgcgctcgatcggaagccgatccgtccttctccagacactctcgcaactgccgaagctcgatgcctattcgcgcctgccgttgtccgtggcgggacgcccgatcgcgaccagccgcgagagcttgcccagcgtggcttccatctgcaccttcattggatcctgtcggagcagatccggaagcagggtctcaccgtggaatgcgccgagaacttaatgcgcatctccgtcgcgaagtccaagcggtcgccgacctcgaacgtccgtcagaacatcctcgaacgccggtttgcgccgactgctggcgagctcgacgatcgcgggcgagattcccatgcacgtgacgcttctggttaccctatccgccagaggatccggagcggcgcgcctgcgcggacgaataccgttttgcgagagcgcggtatccacgctccacggcttcgcgttcggcgcgcagcagattgtattatggaaagcggtgcctcctgcgagtacttgggacgcgcctagtcgtcgggcgcgtcccctagccgcatcgcactggcaattgcgcaaatcctgcgacgcggccgtcagatcctgcgtcggcaacgcggagaggacgtcggtagcgggctggagacccaggtccttcgacagatagcgcgcacatccttgtgccggaccacgcgtgcttcggaggaccatgatcttctccccgttggcgaccaactgcttggcgagaggcacgatcacgtcctgcgaacttggcttgtcgtgccgttggacgatgtggcctggcgggatcaagatctcggtctttgtcgtgccgtcgacatcgacgaactggaacgtgccgcgccgatcgagcacgccctcgatcagcggaacggtcgcgcgaggtcagcaatggtagatcgagccagcggtcgaaactgttgaggttgccgatgaccgcggacaggaccaccaattggggatcgatgcctcgctggtcggagcagcagtgcgaagatcagttcgacggtgatgccgcgcgtgggatccgtgatgaactgcccttcgtccagcatgactagaccgagccggtttgagcaggcgcggcgaggaaagcgcaaggttcaggaacgtctcataggtgaagaagctgaggtcgtaccgagcgagccgcagcgtccgggacgattgtcaatgtaaccgccgttggaggcaagatgcacgagccgttcggaggcgggtatcatgcaaccaagttcgccctttggaggcttaagcgaccgcatgcggatggagctcgcgccattcggtattcgcgttgtggttattgagcccggcgccatcaggaccgagtggggcgagacgcgtatcgcagtctgctggatcgttcggggacaggtgcctacgcgccctgggcccggcggcacggccggcttcctcgcgcgagcggatcgagctggcttcggatcgccacctggtgtcgtcgcggacgctattgtgaaggccgctaaagccaagcggccgcggactcgttacgcggttggtggcggggctccggtgatcttggggttgaggcgactgcttagcgatcgacagttcgacagcttgatgtggagtcagtcgcaagcggctcgaaacgatgccgttgcgaacgagttgcaggcgccgcagcacagctgacgaacgagatctgaatcggagaggctcaacagtccggctctctacagtgcgagcccgggcttgcgcccgaaactccagtcgacaccgccgccggggggcacgacacccgacacctgcttgccgagatgttcttcgagggcaggctttccaagggacgagttcgaagccgagcccgttgtcgatcattgcaaaccgacctgaagcgagatgcacgcgttgccggtacacgacggcgacgtgctcgcccggtgcggaggtctggtgcggcaggcctgtctccgcaacaagcttggagacaaccgcgttcagctcacgacgccggagcgtgtcgagcaggtcgcgcgcgaaaaactggaagcggtgcgcgaggccctaggcggccgcgtctaaaggtccggcggcccaaaatatgtgttcgcgaagaggattacgtcatcccaagcacgatcgactcgtcgtcgagcgcgagcagcactccgccttgactgataacctcaagcgcttgcgcgttcggcgtggcggagccccagacagcgatgtagccatatcgatcgtcgagatgcgctcggttccaggcggaaacggtctcacctctagcccgcgcgtctgcgatgcgttcggcacgatcgtgctccggcggcgtggcgagtacgtcgacgaggaggcgaagcgaggggattaaatagccttcgaacgtcgccgcaccacccggaaaagcaaaatcaggaaggcccgacggtcgccagatgacatcagaggcgccgagcgcctttgccacattcggtgtcttggcctctatgcgcggcggggttggcgcgggccccgggccattccagccgacggtcacgtccttccagaacgccacgcgccccgcgatcacctcgacgtttccggtcagttgaggataggaccacgccgcggcgcggttgatgctgccatcgacaaacagatcgaaatacttggcctcgccgcccttccattcgcacatgcttcaatcgggtgctgccgcgagaaggtcatgcctgagcgatttggttgggaaatagagccgaccttccacctcgatcacgtcatcgctgcaggctaattcggcgctgttccaaatagctttgaacattgtgatatctcggagaaacaggactatgtcggtagcaaccgcaaagattcgcgcagcctcggtgtcgcaaagtccaaaaaggcgcgcagcttcaacggcaagagcggcgggccggtatggaccagatggaccggcattggctcgccgacatacgcgcgcaggatctccaccagtcgcccttcacggagcgcaccggccgcctgataggaagtcatgcgcgccacgccgagccccgaggcggctgcctcaatcagcgcatcggcggtattgacacccagccgcggccggattgcgaccgggccattgccggggccggccgcgaaggtccaagtgcgcaaggtctgcaggccctcaaaagccaggcaatcatggttggcgagatccatagggactgctggctcgccgcgaagtgccaggtagtcggggctggcgaccgtgatccagcgcacctctccgacacgcagggcgatgaggccgctatcggggaggcgcccgagccgcgccgcgacatcgacatggttgtcgatcaggtcgacaactgtgtcggccagcacgaggcgcacgttcacctcgggataggcgcgaaggaattcgagcaccaccggcaggatgtgcagcttgccgaacgcgatcggcgcggtgacgagcaggtcgccccgcggcgtctgatactcgccggaggcggcgcgctccgcctcgtccagctcggcgaggattcggcggctcgcctcgacaaaggcctggcccgcatcggtcagcaaaagcttgcgactggtccggacgaccatctgggtaccgagatggctttcgagctccgacaccttccggctcaccgttggcagcggcatgcccagcgaccgcgacgcggcggaaaggctcccgccatccacggcggccagcaaggtgcggatggcgtcgaagcggtccaagagcctttcacctcgcggaagttagacttccgaaactagcggatactgcgccgcaacggaaggtcgtacttcgaggtcagcggctatggaggccgcgcctcgaaaggaaacctgctcatgccccgcatcccgacccccgccgatgttaccgccgcgccggaagctgcgcagccgctgctgaacgccgtcaacgcccagctcggcgtcgtgccgaacatgttccgcctgatcgccaacagcccgcagacgctcgagggttttctcggcctgtcgggcgcgctcggcaagggcgggctgaccgtcgccacccgcaaccggatcgcgctcgccgtcgccgaggctaatggctgcggctattgcctgtcggcgcacagctatctcggcaagaacctcgccaagctcgacgacgccgagatgagcgccaaccgctcgggcgcgtcgaacgaccccaaggcggatgccgctgtccgcttcgccgtgaagctggtccgcgagcgcggccatgtcggcgaggccgatgtctcggcggtgaaggcggccggctacagcgacggtcaggtgctggagatcatcgcgcacgtcgcgctgaataccttcaccaactacgtcaacgaagcgctgaagaccgacatcgacttcccggccgtcgaggctcgcaaggccgcctgatcgcgatcgcgagcgtcgcacgacgcggcgctcgccttcccgcgcccgaacaaggaaccccgccatgaccacgtacaaattcgtcaccgttagcggccgccaagtcttctaccgcgaggccggcgatcccgcggcgcagaccatcgtgctgctgcacggctttcccaccagcagccacatgttccgcgacctgatcccgctgctcgccgatcgcttccatgtgatcgcgcccgactacatcggcttcggccagtcggacgcgccgtcggtcggcgatttcgattacagcttcgacaatctgaccgcccatgtcgcggggctgatcgagcagctagggctgacttcgtacatcctctacatgcaggattatggtggcccggtcggtttccgcctgttcacgcaaggacccgacaaggtcgccggcttcgtcatccagaacaccaacgcctacatggccggtatcggcgagatgcccgcgcagatcttcctgccgctgtgggacaagcgcgacgcgaacagcgaggccgccgcgcgcgggttcctcgccgccgagacgaccaagttccagtatcaggtcggcgcgaagaatgtcgacgcgatcagccccgacaactggacgcacgaccagacgctgctcgatcgccccggccatgacgcggcgcacctcaacctgctcgagaactacaagaccaacgttgcgctctacgacagctggcatgccgcgttccgccagcatcagccgaagacgctgatcgtgtggggcaagaacgacccgttcttcatccccgccggggccgcggcgtacctgaccgacctaccgcaggcgaggctggtctggctcgatgccggtcacttcgtcctcgatgagaacgcagccgaggtcgcggccgagatcaaggcgaccttcgccgcctgatcaatccctctgatccatcccaatctcaaggagaacacccatgtccaagaccattctgatcaccggcgccgcttccggcttcggccgcgacaccgccgagacgctcgccgccgccggccacattgtctacgcctcgatgcgcgacgtcggagggcgcaatgccgaagccgcggcaacgctgcgcggcaagggcatcaaggtcgtcgagctcgacgtcgccgacgacgcctcggtcgagcgcggcgtggcgcaggtgctggccgacaccggccatatcgacgtgctcgtcaacaatgctggactcgcctcggcgggcgtctcggaggccttcaccgccgaccaggcaaaggtgctgttcatcaccaacgtcgtcggcgtcatccgcaccaccaaggccgtgctgccggcgatgcgggcggccagggacggcctgatcgtcaacatcggctcgatcctgggtcgcgtgacctttcccttcttcggcatctatggcgcgaccaagttcgcggtcgaggcgctcagcgacagctatcgctacgaactatcgcagctcggcgtcgacgtcgcgctggtgcagccgagcgcctacccgaccaatatgtacgcctcgatccagcagcccgccgacgccgccgtgggcgaggcgtacggcgagattggtgcgattccgggcaagatgttcgagacgttcatggggctcttccagagccagaacgcgccgaacccgcacgacgtcgcggaggcgatcgccacgctggtcgcgacgccgcgcggcagccgcccggcgcgcacggtggttggccagtcgttcggcgccgatgccgtcaacgacgcgacggcaccggtgcagcacggcgttgtcgaggcgctcggcctcggctcgctggcgacgatcgccgcctgacccccttggcggccgcggcccgcgcgggcctcggccgccgcgactgtgcaaggagcctttgacatgaccgcaccgctcgatctcgtccgcgctttctattccgcaattgctggcggcgacgtccccggtattgtcgcgctgcttcatcccgacctcgaatggaccgaggccgagggctttccctattacagcggcacctggcgtcagccgggggacgtggtggaaaagctgctggtgccgctgatgcgcgactgggacgatttcgcggcggttgccgacgatttcatcgtcgagggcgatcgcgtggttagcatcggcgcctattcgggcgtggccaaggcgaccggtagggcgatgcgtgctgccttcgcgcatgtctggcgcgtcgccgacggcaagctgaagcgcttcgacatgtataccgacacgctgctcgtcgaccgggcgctgaagccgtgagcacccgcgtagccatcgtcactggcgccagccggggcatcggccaggcgaccgcgatccgcctcgcccgcgacttcggcgcggtggcggtcgtggcccgcgatgcgaagacgctcgccgacaccgcggaccagatcgccgaagccggcgcgacgcccctcgcgctggcaggtgactccgcgaagtgccgatgtgcgaacatgtggtcagcgcgacgctggcacggttcggccggatcgacgcgctggtcaacatcgccggggcggtgccgcagggcgacctgttccaccccagcgacagcgactgggcggagggactgtcgctcaagttcgacgctgcccgccggctgacgctctatgcgtgggatgcgacctacgcttctgtgaccaccacccgcccgtcgggctacgtggcccgccccgattaccgcgtcgacttgctgcgccgtcccaaccgggtgacggcgagcgtcggcggccgcgagattgcgtccagcgaccgcgcgatcctggtcgacgaaaggatcatgcgctgatcgcctacttcccgcgcgcggacgtcgacatatcggcgctgatcccgctggcggcgcgctccacccattgcccgttcaagggcgacgcgcactattggacgctggccgatgcgccgggcgacccggtcgcatggagctatgccgcaccctatcccgaggtcgccgccattgccggacatatcgccttctaccaggaccgcgtcgacgtgcggctcgccgccaaggccgagtgaccgccatgggcgcgccctccagcgacgtcgctttcacgccggccgtcaaggcagtccaagagcgtcgcggctcgcgtgatctctatcggccgatggaggagcgcggcggcttccgcaccgcgatcgacgagcggatgctggaggcgctgagctaagccaacagcgcctacctcgtcaccgccagcgccgacggccagccctaagcccagcatcgcggcggcccgcgcgggttcatccgggccgtcgacgagcacacgatcgggttcgccgattacttcggcaaccgccagtatatctcgacgggtaatctcgcggagaacccgcaggcgttcctgttcctgatggactatgcccagcgtcggcgggtgaagatctgtggccgcgcgcgcgtcgtcgaaggcgacgtggcgctcaacgcgctgctgatgcccaaaggctacgaggcgcgggctgaggccacgatcctgttcgagatcgcggcctgggatctcaattgcccgcagcacatcccgcagaaattcgatgccgaggacgtcgccgttgcgctcggcgcgcgcgacgcgcggattgcggagcttgaagccgaactcgccagcctgaaaggacccaccgcatgagccgtcgaccaccgccgcagttcaccgacgccaccgctgccgagaaggcgcggctcgccgaggacgcttggaacagccgcgatccgggacgggtagcgctcgcgtatacggaggacagccgctggcggaaccgcgccgagtttattacgggccgcgcagagatcaaagcattcctgcggcgcaaatgggcacgcgagctcgactaccgactgatcaaggaagtgtggacgcacgcgggcaaccgcatcgcggtgcgcttcgcctatgaatattgtgacgacagcggcagctggttccgcgcctatggcaacgcgaattgggagttcagcgcggatgggctgatggctcgggtattgccagcatcaacgagcatccgatcgccgaggtggaccgcatttttcggtggtcgctcggtcggcggcctgatgatcatcccggtctaagcgacctttctctctaacgtctggaaaaacgatgcgcgttgcgttcgcagacggcccttcaacgtcaccgccatctcgacacgtcgtcggatgggctgaaggctagatgcccaaatggaactccgacatcttcgtcattttgtagcagttgctgaggagctccattttgctcgagccgcagaccgtctcggcatggaataatctccactcagtcattctatccgactccttgaggacgaagtcggtgtcagactcttgcaccgtactagccgacggacttggctgaggcctgcgggcgagaggttcttgaccgatgcgcgacgcctcctggacgaggtgaagaacatggtttcggccctcaaggcgctgttgcgagccgactgaccgtccgggtggggctcgcagagcatgcagccggagatcaattcacacgatttctcttcgaactcgagcacagcaaacaaccgatcaacgtgcagcccagagacctcaaaacgagcgagatcgtccaggaccttctcgacggtcggctcgacatcggcttcatcggcgaaagttcgtggtgcggcaggtcttatcagtcgcccaatctggcgagctcgtcgatggcggcgtctgggccaacaaccccatcggcgttgcgtctgttgaagccattggaaagctcaactggcctgcggacaagctgaagattctgagcatcggcacgatcaacgacgtgaaggctccaccacggcggaaaggcaagctgcccatggtcacgtcgatggcgcgcctgttcatggcgggccagtctcacagcgcgatcggcacggccaagatcgtgaccggcgatgttcatcaacggcaagcgatctggcgaatcgaccacaccgcggccctcggccgctacacgctggacaacgccggtcgtattgccgagatgaagaaccgcggcttcaccgaggcccgcgaacaactcccgattctgcggcgccacttcttcgccgagcaggcgccagcgttcaggccgttccattctcaagccggcgagcgacggtgccgataaggagaagtcagccctcgacccggccacctgaccaaggcagaccagtcgtaatcgagagcgactcgggatctagagcctcctgctccaggtggcgcacgcccgacccgaacgccaaccagtccgccagctcgcggattgcactgtcggaccttgcgaccgaggccaggctggagtccgcatctgccggctgacctgatttctcggccagttccttggtcatcaggtggggccgcggcccgcgcggtagattttcctcaagatacctgaagatgcgcacgccgccggcgtccacgtcaccccagtggaggaacggcacctcggccggcacgaccgtcaggatcttggccaggaggtcgacgactccagccgccggaaagcccccggtgtacacgaccaggctgccgtcctcgatctcgcggacttgccgattgaagcttgcgtagttctcgatcgtcaggatggccgttggcgtctcaagcaccgacaattgcgagatcatctccggatggatcgaggcgaacggcttggcgcggccgtcgaccaggcgttcgccggccccttccacggcaacaggacctctcagatttacaggatgactgaatcgctccagtccgatgtgcgcccagaccacatcggccgccgcgcccggctgaccgattcggacgccgagaacggcagcgagccgcgacgcgtgccgatcgaacgccttcgtgtcattcgtcgccttgtttgagaaggtgcgcgcgtccaatcctctagcctcctcccgcgagatagacgccagcagcgcgaagaactccttggccgcgtctgtttggccggctgtcaggcggtaagctgcctcgttgcgggcccacctagcagtcatgtcgtccaacagggtggtgacccacggttctccggtcgccgcgaccggaagcaattcgtccctcacgcgcaatgcggtcatcggagccgtcgggcggccgagatgcctggcgagcagctcaggatcgcagacggtgatgcgctcgattaggtggctccgttccctcttgtcccatctcacctcgatagcgccgaacctctcggccgcgaccatctgatcatggaatcggctcaattgctgcgcggtcaaaagcttgtcgtaatttggagctccggaagcgggccttgagcgatcagggttgcgctcggtccggtccagcagccgttcgaggaattcgatgccgacatctgctgtgcgaacgtcggtcattccgccgcctggtcctgcgggacggccgcagctttctcggctgcgatcagatctgacttgaaggcgtcaaagcccttgcggtacggatcggcggcaacgatcgcctcgcgagccttgttggtcaggaactccgtgtcgatcatgacctgattacctaaacggttcacgttcaccacggtgtcgaccacctccatgaacacgtggcgcttctcgtctggagtagccagcatgacctggagccccaggtcccgcatgaactccgaacactggccgatggccttggtgtccaggcgattgaaggcctcgtcgaagatggcgagcgaaagcccactctcgcccgtgcgccggttctggtacgtggcggccagcgaagcaccgatggcgatgtagaacggcaattgcccttccccgccggaccccgtcccagcgcggctcgtcagcgatgagcggatcttgccgttggcatcctggatgtagagctcgaagttgaaatacttgcggggatcctcaatctcttccgtccgcgcctccggattcgccaggatctcctcgatctggcgcacggcgcgcatcatgggagtgttcgcgtcctcgctgcggtccccgaagagcggcagattgaactcgggctttctggattcccccacgagatcgatcaggtcgacgtgggtgggcgcatcgagcgccttgaacgaatagtagtcccgcccgtggaactgacgatccttcaagtggcggttgagctcgttgagggtgttcttgatacccatgaacgcgtcatcgagccgatggaggagatcgtcgcggaaggccgaggtcatttcggtcgcggcattccggcactgctcttcgtactggaccaactcgtgcgcatcgaggcgttccttatcggccgccgcccactggtccacggccgccagcgtcgcctcttcggcggtgaagggcataacgacgtggaagtcctgacagtgcttgttcatcgtgttggtcatttcgcgcatcagactggagcgccggcccgtagaacgggcctccctgtccgcgctcaggccggctatgcgatccgggatcgtctcagtggccattgcggccaccgcagacctatattcgcgcatggccgtcgattgcggaaatccttcacgcatctgccgcgcacggtcgcgcctgcccgcacaagcggtgtcgcggttcttctggatgtaatcttcgtatgcgccctcggctcggtctctagcgctctgagcgcggctcgatgcatcctgcttctcggtcttgaggcgactcgcgatcttgacctcggcgccgaggcgctccagttcggaaacgagctttgggtcgcgattccgcctggcgtcctcgatgttcttcccgatctcgtcgagcttgcgatcgaaggcaaccaaagcggcgccgcaatcgacacaggtcagattggcgctgcggatcgcctgaaactgcgcgaacatggtttcgaacaggcgagcttcatcctccgaccgccggactgcacccgcggattccgcaagctgctgcagcaactgttgccgttcggcctggagttgctgtcgcatctggtcctgcgtggcgcgcccgagcttcaggtagcgcggcttctgtagtcgccggaccgtccggccggactgcatcatgaggtcgggagtaacggcgttctccgcggccaccatcctgtccatggcctcgaccagcatgaggtggccgatcctatagtttaggaaggctctggcatgacggttgtccgtggagatgatctgcgccagagagcccttttcagccggccgagtgttgtcagtcttggtcgtgttgatgacctcggcgtctctgaaggagtgctcgccaccctcgcggaagatctccagggcacgcactgcccgcgacggttcgacgatcaatgcttcgcgcgagcggccaagaaccgcctcggccgccatccgccacttgtcatcccggatctcgacgacttcgcacagaggcgtcgcttcgatgccgtgggactcgagctgtctgatgaggtcccgggtgcccgctccgatcgggctcaagccctggtccatccgcttcaggttgctgtcgatcaggtcgatccgattctgcagactctgcgtcgcaagccgagcttggaagtgagcatcggaaaatgtctttcgggccgcctcgaaccgatcctgatcgatcgccataagggccgcatccaggtgggacgcgctatccttccagtcttccggaagcgccttgtcccattcagaaagcgaggcccttccccgggcgacgactaccgcggccagcagcgcgtgcaggaggtcgtcccggccaacgagcagattgagatcgacggctttcctgatcgaaccgacgagaccttcgatctctttgaccggcaacatcgcattgccccgctgtccgagagtcagattccggtccgactcgtacatctgggcaagttgctcgccatcgctggtcctgatggaaagttcgaccgtcttgtggtcagcttcaagcatggcgtgcctggcggcggcgcccgtcgcttctatctcggcatcgcgtgcggcgctccggagctgcgtcagacctttttcctgccgcctggcttcccgcctgaatttttcccactccaaacgggcaatctgccaacttgtgacgacgatgaccctctcgttttcgatagcgcgggccacgatgcggagaatcccggctaggcttgcgctctgcgccttcaattcctcgatgcggcgcgtcagcgaacgccagtgctcgataccgcgacgcagtctgtcgacctggaggggctgcacgtcgagaacgtagttgcggacaaaatccgtgggattgtccacgggcttcagcagcagggcattccggaacgccttttggaagcgtcgcgggtcgagcgggaatcccgccggcgacaaggccctgagcgattccgccacgaaatcggtcgcgctcgagaacgcgtcgtcgacctcgacaccacgtgcccgtagcgcgttgcgcaccgcatgccagtgcaatgtctcaacttcatcgtccccgacggacaccagaatgtcctccttggtcaccgcgcccttggcgatgaaccgtgcctcgcaagattcgtcacttcttgaggccgccgccgagaaggtcacgccgagactgaccgccgagccatcgtccagatcctcgaagaccaggacgatgtaggtgtaggcatgctgccgggtcggctccgaccgttcgcccttctcgtccaacgagaccacgccgaggcagtagtcgcgcaaggtccgcttgctcctgacgttgctctgagcgctcggattgaaccggatgctggccatgctcgcaccggagagcacggtctggacggcgtcgatgatcgccgattttccggcgccgttcgggccgatgatggccgtcatgccgcgcatgtcgacctgctgcgcccgaaacaggtaccagtcgaccagaatgatgcgccggagctcgatcacgcctggacctcgctcggcgcatcgggcttggtcgccgccgcggtggagcgcgccacgaactcttcgagcgagccgagagtgtccttagtgatcttcccccgataaagtggacgggt

SEQ ID NO: 174 - DNA, 32151 bp, Bradyrhizobium colbertium
cccggaggaatttgaagtgacccgcggggccttcgacagaacgttggtaagcacgcgcacgaaggtttatcctatgttaacaaccgttaggcgagatagcgtcatggacacttgagtctgcggcgcacttgtcttgcgcgagcttgcgttttcttgacgctgagctgtcgagcggaagctggtgtgcccaccacctcaatgcttctccgtttccttggcctcagagaccacgtggatatgtgatcccaatcggtttgtggaacgaccatgtctacgctcgtgaacttccctatgcttcgtccaaggttatccaagaagaatccatcgccacacgatccagccgatgctttgacgcatttcgctgcgctcatcgcaattgtcgaagctcatcgaatcgattcaacagacgatctgcgacagggcatcctcactctggatctcgccaacgtctttattcaatccttgatggaccaaatgccgtgcccagcaacgacgagcgggacccactcatcagggctctttgtctcatcggtcgccctgccgcccgcttgggtattgccagcccagagcaccaagttcggtttcgagacaagccagtcccagaagccgctcaatgcccgtcgcatttctaacgtgctgcaaattctgaggacgtcgaaccgcaacatcgaagggagcgcggcttcactcgcagaagccatcgctgaaattcgggattgcaggccgattctgcaatccatcgctcgacatctcgagtcggtcccgcggggtgtcgagcgcacgatcgatgccttgccgaccaatgaacgccggcgggcgatcgaggcgcagcgatccgcgagcgcgtttgcagctttctcaactgcgacaattgatcagcaggatcgcggcggtagacatgacatggccaatgtctcggacgcgcgcccatctcgtcactcacatggcgaagcggccatttgaccgcacctctatgaacacttcactgtaggacatttccaatgaatcttcgtatcggtacgatcctgccgctcatcatctccggactcacggtaatagccgtcgcttcctccggattggccgcctacaaagcattcaaccgccgacaagaggcccagaccttcctcgaggtgaaccaggtctcccggatgctgctgcggagcgccggtgattgggctgtcgagcgagggctcaccaatacccgactcagatcgcctgatgcggcgtcgagcgagtccctggcggagatcgtcaatgcacgcgcgactgccgaccaggcattccgggatgccgaacagcgcctgcgcgcctttcccgccatgaaggcggcggaacaaagcctcgacgaagcgcaagccgctttccagacctttgaaagtctccgcgcgcgggtgcaagacaatcttgctagacccgcatcaggacggatgccggatgtggtcgagagcttcatgccgaccatcacgagcctgatcgacgtggccgcgacccgattgcggctcacgctcgaaagcctcaccgcgccaccaacttcggcgctggcacaactggtaggcttacgccacatggccgctcaaatggcggaaaatgccggcagggaacgcggtttagtcggcggcatcattggggcacgcagtaagttcacagtcgataaccgacgaatcgcggccaccgcgcgcggtcagatcgaacttgcttggcagaccatcgcagcggttcggcagcgtcctgatctttcggcggaaatgatccaggcgatcgatggcgtggaaaagaactattttggcggatatagctccttgcgcgacgccgtcttcgccgcgggcgactccggcgagtacaaagtcgccgccagcgactatttcacccaggcgacggctgcggtccgatccattcttcggcttgctgatgcgatcggcaatgccgcggaccaggaagcagcaagagaggctgccgacagcacctcaaacctgatcgtcgacgggacgatcctgcttgccagcatcgttctcaccctgatcagtttctggatcgccttccgccggatcgtccggccactctccggattgacaggcgcgatggaagaacttgcgcgcggggatttcgccgtgatcttgccggggctcggtcggaaggatgaaattggcgaaatggcgcaagcggtcgaggcgttcaagatcaaggccgagtcaaaggcgcgcgaggaagcggaagccaagatcagacaagatcaggccgtcatgcagcaacgcaaggacgacatgatcaggctcgcggacgccttcgaatcggccgtaggcgagatcgtggaaaccgtttcttcggcctcgaccgagctcgaggccgccgcgggcgctctcacggcgaccgccggccacgctcaggaactgactacgatggtcgcggaagcgtcggaagaagcctgcaggaatgtgcagtcggtggcatctgcgaccgagcaactaaactcgtcggtggacgagattggccgccaggtacgggcatcggcacggctgaccagcgacaccgtcaaccaggcacgcgtgaccaatgatcgcgtcagtggcttgtccacggcagcggctcgcatcggcagcgtggtcgagttgatcagcacgatcgcgggtcagacgaatctgctcgccctgaacgccaccatcgaggccgcgcgcgccggcgaggccggccgcggctttgccgtggtcgcctccgaagtcaaggcactggccgagcagacggcaaaagcaaccgatgagatcagtcaacagatcagcagcatccaggacgccacgggcgaggcggtccgtgcgattcaggagatcagcggcaacatcgagaaactctcggggacatcgtcggtgatcgccgcggctgtggagcagcagggagccgcaactcaggaaatatcccgcaatatccaggaggcggcagagggcacccaccaagtgtcggtaacgatctctgacgtccggcatggggcgagcgagaccggttcggcttcgtcgcagttgctcgcggcggcgcaatcgttgtcgaccgatagcaatcgcctgaagctggaggtgaggaagtttctcgagacggtccgcgcagcgtagagggaaacctggcagtcgtcattgtcgtcgctactccgcgccagccttccgcgcccatagcccaccttccgaagtctcgtggtcggctcggtcgcttacaggcgagccatcagttgcccagggatcgcgcacatgacggccgaaatctcgaagcgctattcgtgagtggggtctgaatggccagccaatcagcgtccttggaggtgcgaacgcaaaggcgggcaacgcagccgggaatccggcatgggccggacaggtcagctggcgattgccggaaggctgacggtgggatcatcgctcaacggcgcgatgatttccagcgtcatgtagcgggcgcgctggacggcccactcctcattctgctcaagcaggatcgcgtcgatcaggcgcacgatggcgtcctcaccgggtaagatgctgatgatctcaatgcgccgcttgatctcgccgttgaggcgctcgatcgggttggtcgagtgcagcttggtccgatgctgcggagggaacgtcattaggcgaccacgttagtctcggcctcgccttccgggcctgaacttccgacaaccacaccaaactcaggaagagcttcgcctttcccgagcgcgaaatacgcgttggccgagcgcgtcctcgtcgacgtacaagatatccccattgggaagccgggtgacatcttggatgcagccatggacgacgtcctggatcccttcaacgtcttcggaatgtccctttcgaagacatcgcgtcggtatggatcaacgaccagaactctcatttgacactccatttttctaaaaacgtcccgctgcatcgacctttggatcgctgcgactgcccggtctcggacctactccgtactcgaattcatgctgtcactccgaacgtctatctatcaccgcagcaagctccaaccgtcatccgatcgattcattttcgacggcgtctccccgcatttccggcattccgccgacctgcacgctggttggccggacgtgccaggttggcctcgggtctcgccgagcatgcttcgtcgctgggctttcaggaggccgtgcgccgagccgccctttcggctttgtacgcggcgatctgctgcggtgagcgccgcgtccgcttgagaggcgtcggcggccgattcaaggctgggaccttgaatctcgggaagagggccaactccttcgcaagcacaggcacctttcgtttgccgtaccgagccccggttccgctcttgctttcgtggccgcacatgtagtcgcacaactcgggcttcatcttcgtgccgcgcacgatctcgcgccagaggtggcgccagccgtggttgggctgcacgtcggtgattttgagcgaatcgcgcacccattctcccagccgctcggcgaccttgtgccattggggattggctccctttcctccgcgggcgcggacgggatcgtagaacagcggcttgccgagcttgcggcgtgcttcgacgtagaccatgaacttctggtcgagcagatgcttgtggaccggcacgcggcgcagccgcttgcctttcgtgatctcgggtctcagcacgaagcaccaatggccgagaatctgctggacgtcggacggcaaaagcgaggtgatttcgttgactcgtgcaccggtgtaggcgcagatccaggggacccaacgcctggccgccctcatctcggcggacatcaggtgcgacggtgtcgcgacggtcgccgacagaatcttcagcgcctgctccggatcgaaacctctctcgtcgtcctccttccaggccttgacgccctcgaccttgatccccgcaaacggattgatctcgagccgcagcgcattgagcatgtgggtggccaccgaccggggcgccgccaaccagacgtcgcggaccgccttgggagcgatgccctgggagatcatgtagtcgcgccagcggaccgcgtcctgcggcgtcacccgcgcgaggtcccggtgcttgatccattcgatgaaacgctcaatgaccggccgccagcgcttggccgtcggcccgtcgaggccgcccttgatccgtggctggctgcagtagagctcgaaggcctccatgatgtctaccttgggcttcgtcctcgtcttgggcagttcgccgagtttcgcgctctccttgtagtcgcccttcgaggcgcggaagacgtcgccgtaggcacccttcctcgcttcggcgagaaggggcttcagcttttcgacctgagcctcgtccggcgaccctccaagttcacgggtcaggacctcgcgtgcccagtgatcgagagcctcttcggctcccggatcatcatcgttttccgtgagggcgagccatctcagggcggcgaatcccgtgccgggctcggcgatgtgggcgtcgcggattcggacgtgcgtctcgcgctggatcgcgaacaggtcctgatgcgacaaacccaccttgggggccttcggtcttcgcctcgcctccagcgccagaagttcccattcgcgctccagttcgacggaggcgaccgcgatcctggcgttggcggtccgtcggtccgtggtcttcagggaccgccagacttcggtcttgccgaccagggcgcggtaccgtttcgggaccttcttccggatccagtagacgttctgctcgttgccgctggccttcgtgggccggaaaggggtcggcattctggtcgttcccattggtgtagaccctcggtgtagaaccgacggctcaaggaacgcccaaaaacactgataaacttgtatttaccggggattttcgcacgcgcgggggagagtccctccctctccgccagcagtcccgaaaacacccgtaaatcggctgtctttttgatctgaaaggacttttcgcgtttttccggacgaccgacggtacacaacgtcggtacacagatggttcatgcgctcggcacgcccaaacgtcatccgcaaagcggaatctacctgttcaggaagcgcgttcccgaacggctgaaggacttcatcggcaagagcgagatcaagttctcgctgcagacgcgcgatcccgtcgtcgcgcggatccgcaacctcgaagagatggcgcggctcgcgcgcgcttggtcggaaatcggcgggtcggtcgtcgacggcacgcgacatgcggcaatctgcgtcgattgcaagacggcgggatccggggcagccgccgcggccgcgcttgccgccggcgcgctgccgcctccgtccgctccggccgcaacagccaccgcgaacacgccggtcgcactgcgcccgatcttcgaatcctacgccaaggaggccgaactcgcgccttcgaccgtgaagcgctggtcgccggtcctcgaccgcctgatcggccatcttggccacgacgacgccgcggcgatcacgcgggccgacatcgttgcgtggaaggacgcgctgctcgacggcgacatgtcgaacgtcaccgtccgcgacgtctacgtggccgcggtgaaggcgacgttgcagtacgccgtcgaccagggccggctcgccgaaaaccccgccgccggcgtcaaggtgcgcgtgcgcgaggcgccggtggagcgggacaagggcttcgacggcaaggaggccgagacgatcctgtcggcgacgctgcgcaagccctccgacaagatcagcgtcgagatggcggcggcgcggcgctgggtgccctggatctgcgcctacaccggcgcgcgggtcaacgagatcaccccgctgaccaggcgcgacttcgtcctgcgcgacggcatctggatgatccgcatccgggcggaaaacaacaaggggcgcaagtttcgggaggtgccgcttcatagccatctgatcgaacagggtctgctcgactacgtgaagacgcgcggctcgcggccactgttctacgacccgcgccgtagccgtggcggcaaggattccaatccccaccataagaaggtcggcgagcggttggcggaatgggtccgctcgctcggtatcgacgaccgcgtcgcccccaaccacggctggcgtcatcgcttctcgtcgatcgcgcgcgtggtcgcaatgccagaggacgtccgcaacattgtccagggccatgcgggcacaaaggtcgctgatcgctacggcgagacctggccgctcgtcgcgctgcgcgagatcgaaaagctgccgcggtacgcagtcgaaagggagacctaaactgtcacgcttaggctgactgatgcgaacgggtggtccgacctggacgagatgtcccggatcgtactcagcatcctccgccaagccgcagagcctcttgccagtcgtccacttttgagtagagcggctttggacagaacgaacagcggctttcacggctcatgagcggacaggttttgcgcatgtgcgacctgcctagctcagggtggcgaaagttaacgttttagtaacactctgatattgtttgaaacttctctagggttcccgcgttgcccccaaaatataggatagccatgcggcgaattcgcgcttgaccaggcgaaagcgaccccctaggttacccgcgctcggtaattccttagcaagcgtctctgaggagataagccccgttaatcgtggccgccctagggtacaagcaaaatatggctcgcaagttgcgggccttattttttggtagattgccagtcgtcgcgatgagcaagattcttggtcatcagatcggcaaattgcgagtcaccgtgctcgtattttcgaaataggctccacgaaagaaagtctaccgcctgtagaccgggatacaggtgagactcgccgtgcgtgatggaaagcgaatgctcatgggcgcaatggccgactagcctcgtctctagatagccatcgaacttgttcttggtttggagttccttggttctggcgtcgataacgatctcaaggtcaccgacgaagtgattcggatacgcgcggcagacgagcgagccgcagagatagttgtacgaaatgccgtagtgggccttgctgaggaatggcggcaggtgctttttcttcgctatcgaataatgcactttgttcggaccggagcaaattgcggttattatctctttcaggacctgatcgcgcctgtcgctgatggcttttggaatgcccggaaggtggggcgatgcccaaatggacgtccccttaatctccatcctctttggccagccagcgtttattagcttggcgaattctttcttaacccttttttcgagcgcctttcggttctcggtccagagcgcggtgatcagaaaaaattcactcgattcctgcttctggccaagctcgccggactcgtcgataaacaagtgatgcatagattacttctctgttacgcactgaatgaattacattttttttgacgattcaactgctgacggttcgttgccaatagcccttccactgtcgcgaaacgcggtgctgcaaggcagcgggtggggcctgagtcgccggcgcggatgctaagctttcgaagtcgttcacgaaattcgaaggatatgacttaacccgcgcccgaaatccttacggtccccctgcataagggagttcgattttgggggcggaacaggtgcgggtccgggagccaattctcgataaaagcggcgtctatcactaccgtcgtcggatccccgacgacgtacgtcgggcgctccgcgagttggatgctgccgccggcgcaggtagccgtcgtcaggataagcgcgaggagaagaagcgactcggccgcgacaaggccagggccgaggccgcttgggagaaatacgatcgtgaagtcgaagccagatgggcccagctcaggcaggggcggatccgcggtctctctctggtccagatccaggctttggcaggggacatctaccggcgctggctgaacggctaccatccagcacgcttccatgccggcatcagcgccggtgttgcgctaggactcatggaggaaatcgacggcgagcagcccaggcaggtcaccaagccgatcgacgatgatgcggcgctcgaaagcctccatggctaccatgtggatgccgtcttggctgcgcgaggtctgatagtgaactcgcacgcccgttggcatttgattcaagcggctcaacgcgccgccaaacacgcatgtcgcgccgctctaaagaagatcaatggtgatctccgccccgatccggacgagaatctctatccggcgtggcccgaccccgagacgacgaccctgtcgggtctttgcgcgtcctgggtacgcgcgcggccgacggccaagcccgacacacacgccgcgttcaaggcgtgcatcgacaaattcatcgccttcgtcggccacgatgaagtcgcgaaggtctcggcagacgacatacggggctggatcaggtacctgaaggaaaagcaagggctaagcgacgttcgcatcaaggacggctacttcgcggccataaagaccgtattcaactcggcgagaaaacacggactgatcagcacgaatccttgcgacacggtcaatcccgacggcgaaccgttgcctcgcacgcgggaaaaggatcttcgggacagcgaaatttacgcgatcctgaaggcgagtcttacgcccaacgcgcaggtctgcgaggacgtggcgaacacccgccgctgggttccgtggctgatcgcttatagcggcgcgagggttgccgagataacgcgattggaatcgaaacatatcatcttcgaagccggcgtatgggggatcgacatacaaagaagcaagaacggtcgtccgcgcatcgttcccgttcaccgccacctcatcgagcagggcttcctcgaattcgtccgctcgcgcgagggattgccgctcttcttcgggaaggagaagttgaaagaggcaaagcttacgatccacaagacgcgcgccgaagggctcgcggagtgggcgcgggaggtggccggcatcgagccgggtacggtggcgcccaatcacggctggcggcatcgcttcaaaaccgagtgtcgccgcgtggggatggaccgggaagtaaggctctatattcaagggcatgccttcaagatggaaggggagaaatatggtttcttcccgatcggcatcaccgcggcctggatggagttgtttccgagctacgtggttagcgggaaatcgctccacgtcgaacgtcccgccgggaacgacgtcatcgcgcgggccatcgcgctcctgcagcgggagcggactccactcgacaagccgaaggcggcttaaaaagggtcccaagttcttaacgaggagaccgcgcagcccgagcgccaaccatgctgaatacttcgtcgtttggcgatgtgctcttcgacgcgccttcgcgcgccctcatcgaccgtcatacgagcgcgctggcgagcaatctgcgtgtgatccgggatttagtttgcgatctggtgggcattctgcatcccggaagcggtcttatccggccccgcggcaggaccggcccagcccagagttgacgcgatggaagccggaatcgcgacttgtctgttcggcgggagcatcatggcttccgagatgaagcggaatccgcgagtgaaaccagaacaaagagtggacgctggcatcatgccagaaaatcgggtctgtcctaattaggacacgcgccattttggattaggacacctcaaaatggaccagtgtttagctctcgctaaccatgccgagagcgattcctgtgatttaacggaacagaatccggttgtgcctaacgatccattcccgtttggggatggggattgcagcgtggctcgggcaaagatcgtaacaggtaatcgtctgttctttggcgacaaccttcccgttctacgggaccggatcgcaccagaatccgtggatttggtctatctagatccaccgttcaattctaacgcgacctatagcctgctgttcaaggagcctacgggcgaggctgccaaggcgcaggcggaagcgtttagggacacttgggagtggagcgaggcggcggccgagtcctatgacgacgttatgcgcgcctccggtgatatcgcgctggcgctgaaaggcatgaagtcttacatcgggcaaaacgccgtgatggcgtacctagccatgatggcggcgcggctgttggagctacgcgatgttttgaaggatacagggtcgctttatcttcattgcgatccaacggcgagccactacctgaagatactcttagacgcgatattcgggcacgaaaatttccgcaacgaaatcgtttggaagaggacaggatcgcacaactctgcgaaacggttcggccctgttcatgacgtgatcttttattacacgaagtctgcggcagcgacttggaatacattgcggcaggattacaccgacgaatacaagaagaagttcggcaaggttgacgcggcaaccggtgaagcctttcaagacgtggcacttaccggtccaggtacgcgaacaggccctagtggcaccgcatggcgcggcttcaatccaacagagcagggccgacattggcaaccggcctcctatctctactcaaaatatgagcaggtcacaggaggcaaccttgctgatttcgatttcttagatcgcttggacgagctggatcgtgttggcctgatctactggcccaaaaatgatggctttccccgttataagcaatttttgtcggacgctcccggcgttcctctcaaggacgtttggaccgatattgacgccatcaattcgcaagcgcaggagcgactaggttatccgacgcagaaaccgctatcactacttgagcgcattatccgcgcatcatcgaatcccggcgatgttgttttggaccctttctgtggttgcggggccactgttgaggccgctgagagacttggccgtcaatggatcggcatcgatgtgacccactacgccatcaccctgattgaggcgcggcttcgcgcgaagcacgctgaagcaaaatttaaggtgtttggtcgacccgaggatttggcgggtgctcgcgatcttgcccgacgtgataagcatcaattccagtggtgggcagcttggcgcgtcggcgcgcaaacctaccgcgaagaaaagatgggcgccgaccgcggaattgatgggaacatactattcaagaatggcccttatggtgacgggcgcatcatcatctccgttaagggcggggaaaatgttggagttcaaatggtccgcgacctccgtggcgtaatcgaacgggaggaagccgaaatgggtatttttgtctgcttggcagaaccaaccgcagcaatgctcaaagaagctcgcgattccgggtatgtggcgaagtccgtgcatgggcgccttccgcgcatacagattttgacagttgaaaacatgctcgcggggcacatgccgaaaatgccaccgctgcctgtgcctgaaagaaagctcacgccttccctcaagcgcaaggacaaggatcagcttgaactgctgttgcccttcgccggcgagaagattgtcccggcaaaaggcgtcattgttgatcctcgatttgttggattagcgggctagtctttcccgccatcaattactcggaagctacgcacagttcgcactggcttgttgggctccagcggcagcaccgcgtcaatcagatccccgatcgtccagacccgatccgcaacgccaatggcaaccgctggtgtggtccgcaggactcgtggacgcggcacagattgtaatgagccacgtacaggctgacggctgactgccgcagcgtgattggtgagcttctatgaaaacccgttggtgagccgggcaagccgtttctgcgtcatgcgcagcgttaggttttggcgctcaacgtagctggtcgagattttgaccgggaagcctcttactacgtcacgctctactgcaattacctctgccgggctgtagcggcgcgcagcgtcttttacagacaggttacgctgtaggtctttacgatcacgccatggtgggccttgccccggaaggcatcgcggatggcgttctggtacggcaggaagccatcggtgctgatctccggctcgccaagcacgcgctcgcgcaagtcctgcgtaaacaggtccgtattctcgctgtcgcgcttgccagtgcggtagctggaatggcacgactggcgcggagccaagcgcaacgaacgtgtactgatcgcccttgtggccgatctcgtgacgctcgacggcttctgcttcttgccgacgtagccccaaatctcgtcaagctcgatgctgccgacgcggcgccgctccagcgtgcgtcggatgttcgggttgaggtcgggatgccgtcggcgcagttcgtccagcacgccgatcacgcagatgccgggcgcagccttcaggatcgggatgatctcagcgtcccagtagggcgcgagcggatctgaccgtcgccggcccctcggcgccttcttctgagatggcaggcgcaaatcgccctcgatccgatacgcgcttgctttcgagaaccccgccttggccgcagccgcctcgggggataatgtcagtcggtagttcatgtacagcctcatctggtggtcggtgacgtgaaggccgggcaaggcatcgattccctcttggagacgaatcaacagcttgcaccggccgcacccagccgccagacgggtccgaaaagcgcgacgccgatggggacggtacgccctcccttcggtccgtccccatcggcgcagtctcatcctgattgtcgctgactgattgtcgctgaggtctcaccttgatcgccgcgccgcaaagatcgcatacgagttcttcgcatccctctcggaggccggtttcgaggtgggagccggagagctcggcgagaatatcaccatttgcgggcctgaacggatgccgctcgggacgctcagcgagttggcccacggccatcaatcgaggtgaccggcccgcggagccctgtgtcctgatcgaccgcgtcagggccgaccttaagcgacaggtgctctcgtcggcagaagcggggcccgcattcagatgtgatgtgctgggcgtggtggggctcgaagggaaggtcgtggccggcgataccgcgcgggttcggctcccgtccgcgtcccttcgggcctaccggcctgaaagagcccggtgcacaactccgccatttggcccgccgaatcggaaagcggtctgtagatctgcgggcatggccgcaagaaaaagtacgcttggggctggggaggcaatcgacggtcggggcaaaccaagccgcagggcttcgctggcgctattttcctactaggaggcgtttgccctggctcgttcgcgggcctcgcgacgacgttcgcagcgctctctccggcgcttggcgcggtcggagggttgccgcaggagaggaaccggcgtttgttcggcaaccggcagggtggtctcgttggctgcagccacctggattgtctccggcgacggccgggcttccatgaactcgagcacctcccgacccttggaagtcagcctccacccgccgcttatgcgctcaactagcccttgtgaccagatgtcgagacccgggacccgcgccgcgaggcgtctggtccggtccgcccagtcgcgtccgctggtcgccaggatggccatgtccctcttcaggtctgcaatgacggcgaagccatcggggtaggccaccaggatcttcaggaccgtaacctggaagttcatgccccgctccggatcagatcagcgccacatcgtgggcgcgtgggacagggcctcccggccaagctgccgaagctgttcgggagacacctcgcctctggtggcagcctcgagaatcttcgaagccacctgcgtgcgcgcgccgatctcgcgggccgagacactttcgcatacttcatcgaggaccgcgcgcaaaagcgcggaagttgccgtgtcgaacatgagatgcccccagcagggaaaatctcattgtagccgattttgccgacttgggattcaggcatgttaagattcgggtctccagagacggcccaacatgccaccccttgtcgcgatgcttcgcgttgcggtataggcgggcagccccgtgagtctcactcgaatggttggacgtggccctctcaaggctgaaacagggggtcgattcccctacggagcgccaagttacgagcacggttttgggggcatttgccagagccggaaaaaccgctcgcgcaagttcagatttgactagccgaatttcactttcggcgggccaatatcctggccttgcgccacaatcccgtcatgcgccgaccccgcttcatagccgaacaggcaaggaatgctcgaggactcttgggtcgactaatcgcgttcatcatggctcgcgaaaccggacggcaaaatctgcgcgtgatggatgcgctcagtatcgagcaaggcgaccgcatcctcgatgtcggttgtggacacggacgcagcctgaccgaattggccagccgcgcggcgaccggacgcatcgttggcgtgggtccctccgagctgatgggggagatcgcagcgcggcgtaactgcgcgcacgtggaggccgatcgtgtcagtgtagtccttgcgagcgtggagtccctgccgttccccgacgattccttcgacaaggtgctctgcgtccacgtgcgctacttctggaaggatctcgataggtgcctgagggagaccgctcgcgtcttaaagccaggcggctgtttgggattgtcgttccggaccaacgctgacttggccgctgttgcgtcgtttccgcccgagatctaccgctttccggcgctcgccgaagtcgcggcagctctcgaacgggcggatctcgatctcgccgcggcgagcgattccacgaacgagcctgtcctgctgctggcggagaaacgacgcgttcaagtcgccaaatgatctgcctccgccgagcgatcaggctgatacgatttcagccagacgcgtgaccacatggtcgatctcgtccgatgtggtggtccttcccaagctgaaacggatcgctcccctgccgatcctctccggcacgcccatcgcggcgagaacgggcgagagctcgatccgtcccgagtggcacgccgaccccgtcgatgccgcgacgtcgccgagctgtgccaggatatccgcgccgatcttgccgacgaatgacacgttgagggtgttggccaaacgatgcgcatggccattgagcacgacgcgatcgccgaaacgatcctgcagcgcctgccagaatgcatcacggagagcctggacatgctccatcggagcaaggtcttgcgcctacgcggccgctgccccgagcccaacggcgagcaacgcgctctccgtcccggcacggcggcccagctcatgaccggcgccgtggatcaacggctccaattccaggccgccacgcacgtagagcgcgccgacgcctttcggggcgtaaagcttgtgaccagcgatcgacaagaggtcgacgccgagttcggttaccttggtagagatcttgccgaccgactgcgctgcgtcggtatggaaagggatgccgtgctcccgcgcgatctcgccgatctcctggatcggttggatggtgccaatctcgttgttggcatgcatgatgctgatcagtgtcgtctgcggagtgatagcgcgacgcacgttgtccggatcgacgcggcccgtccggtccaccgggacatgggtagtcgaggcgccgaaccgctcgagaaatcggcagggagcgagaacagccggatgctcgatggccgaggtgacgatgtgcgccccttggcggttcggcgcgaagaacgtgcccttgattgcgaggttgttcgcttcgctgccgccgctggtgaacacgatctcgccagatgcagcgccgatcagcgcggcgatctggccgagcgcgctccagggcggccttggctggcgtgctcgcccaatgcccgctcgacgggttgccgttggcttgatccaagaatggccgcatcgccgccgcgactgccggatccacaggcgtgcttgcgttgtagtcgagatagatcggcggcatgccagctgctcctctgcgacggttcaaaagaccaacaccttgtcggcggaaacggtcgccgtcgcgagttcggccatggtgctgcgtctcatgccactgagtatctcggcatcagtgagcccgcgggcgtccatgcaggtgccgcaaagcaggacttgtcctttacccgcgagaacgcccttcagcatgcgctctacattgtagtagccgtccggcgtcttctggcccgacttcgcggccacgaccgcgtcggccatcaagaacaccgttacggtgatctctggatcgctcttggcgagagcgagagccaggcgcaagccgttgtaggtgcgctcggtgccgtacggcgcatcattcagtatcagcagaatctgcacaggcgtcttcccttccgattaagcgagcctgaggcagcgcgccgagtcactcgccgagaacgcgccgccgatcctcgaattccgccttgtcgatctcaccgcgtgcaaagcgctccttgaggatatcgagcggtgtacgggcgggtggcaattggtgtggcggatatatccctggccacggcccgcccagccagcgagcgaggctaaccgcgagggcaaccaggaccgcgagaaacaggatcatgaacaacggaccgaagatcatgggataccatcctccgccccaacccatcatgtgcggaccccagccgtagtagcgttcggcatctgacggcggttgcgcctgtgcccatactgcgctgggcaggagggagagagcggcggccgtctggatcaaggctttctgcatcggcttgctccgtcattgatgaaaaccagcctactccgccggtcggcccgctttttgcgcgaggtcaaccgagcccgccctttcccgcatgaacaccgctacgacagcgccggaaatgaacgtcagggcggcgatcgctccgatcgcccaggacatgccgaacaggtcggcgatgatgccggccgacagcgccccgatcgcatagccgaggtcgcgccagaagcgatagacgctgagcgagcgcgcgcgccagctcggatgcgaggcatcggacacggcggcgatcaggcttggatacaccatggccgtgccaagtccgagcaacaggctgccggcgagccaccattcgaaatgactagttgccccggtcaggaacaagcccgcggcctgcacccacatgccgccgacgatcaggcccttgcggccccagcggtcggacaggggaccggtggcgacctggaggatgccccacgtcgccggatagaccgccttcaatatgccgatccgatcgacggccagaccgaacgaggcgaagaacagcgggaagatgccccagctcatgccgtcgttgaggttgttcaccagccccgcctgcgatgcggcaaacaggttgcgatccctgaacgatgtgagaacgaagatctcccgaaaactgagcggagatgcttgacgagcatgcgccgcggtctccagccggacgtgctcgcgggtgtcgcgtaccaacaggatcgagagcgcggcgccgaggacggcataggccacaccgaggtagatcggcgccggccgtagcccgtactccgacgcaagatatccggtgagataggcggtcacgccgactgcgaggtagccggcgaactcgttcagacctaccgccaggccgcgcgatttcggtccgaccagatcgatcttcatgatcacggtcatcgaccaggcaaggccctgattgatgccgaggagggcgttggcggcgatcacccattcccagctcggcgcccaaatgatcatgaacggcactggcaggccaacgagccagccgaggaccagaacagacttgcgtccccaggcgtcggctagctggccggacacgagattggcgcacgccttcacgacgccgaagctgacgatgaacgagacgacaagcgtcgtcgagcccatcttgaattcctccgcgccgatcagcggcacgacggttcgctcgatcccgaccattccgcccacgaaggcgttgatcaggacgagcagagcgaattccggccagttttccctcagccccaatctgaccgaaggcgagccttgtggagcggatgccgcttcgctcatgacatcaggccgcagcggccgtgatgcctgaattggcggctctgatcttcgcggcttccggcggtgccggcggaatctcggcgaccatgaaccggacaaactcgacttcatcctcgatcatgaaggcctggttgtgccgtttctcgaagccgatcgtggaccagggcttgccgctcagccggcggccgcagaccgaacccgcataggcgccgggcagcacttcgacatagtccggcaggtccttcagcttactcacgctgcgaaacagttgtttggcgccttcttcggcgctggcggcgagttcggtgcggccgagatctccgaccatcagagtgtggccggtcaacacgaaccatggctcgtcggcgcgtgtccggtccgtcaccagaatgcagatatgctcgggcgtgtgacccggtgtatggagaaccgttgccgtgatgttgccgagcggcagggcgtcgccgtcgccaaccgccttgaacggaaacgacacactcgcgttcgaagagagcacgtaggacgcccccgcagcgtccgcgagcgcccgtcccgccgagaggtggtcggcatgaacatgcgtgtcgatgacgaagtgaatgcgcatgccggcgttgtcggcagcttggagatagggctggatatcgccgacggggtcgaccactgcacaggtggccttgccaccacaaccgaacaggtaggagatgccgacgggatcgctatgcaagaactggcgaaggatcatggccttgcactcctctctgagagcggatagataacgttcaatcaatctgctgaatgatatattcaggagctgccgtgtcaagtaccggaccgaaacacgcgatctatgagaaccttgccgaggtggcgcaggcgctgggccacgcgcatcggcttgagctgttggagcacctcgcccaaggggtgcgcagcgtcgaggagctgtcggcccgtgctcatctgacgttcgccaacacatcccgccatctgcagatcctcaggcgcgcgcgtctcgtcgagacggagcggcggggtaaacacgttctctatcgcttggccggcgaagcggaagtggtcgcgctgacgaaggcgctgggtcgggtcggcgagcggaatatcgctgagatcggccgagtcgtgaccgactacttccacgcccgcgatgcgctcgaacctgtctcgcgagatgatctggtcgcgagactgcacgacgatctcgtcacggtgctcgatgtccgccccggagacgagttcgctcttggccatctgccgggcgcgctcaacatcccgcttgccgaactggaacgacgcctcggcgaacttccgaaaggccgtgaggtgatcgcttactgccgtggtccctactgcgttttatctttcgaagcggttgcagcgctccggacgcgaggctattgcgtccgccggctcgaggacggctatcccgaatggaaagccgccggcctcccggtcgaatccctcgcgtgaagacaagccgatcaggtgcatcatggatgacaagcctcaccgcgcggaatccgcgtgaccgattctcggcgtcaaggaccacgaagcgccctcggtgttccggcccgaagcgctgctgagggaggcccgccggcagaggcagttgccgctcgtcgcggtccccgaaatctgcgtgctcgatccggacggtgatgtcgtccgtcacctcaagcggaacggcgccgggcgcatccatgaaggatgggcctgctatcacacggagcttcttgctttcgatctcgacggcatcggcgaggtcggcatggtgggctgcgccgtcggcgcaccgttcgccgtgctggtcgccgagcaacttttcgcatccggctgccgcctgctcgttagcgtcacgtccgccggacaaatcaccccaaccggcccgacgccgtacttcgtcctgatcgaccgcgcgctgcgcgacgaggggacgagctatcattacctaccgggctcgatcttcgccgaagcacccgacgcgccgctgctcgcgcgggtcgagcaggcgggacgggctctgccaggcattacgctgcaccggggcgcaacgtggacgaccgatgcgccttaccgagaaaccgaggccgccatatcgcgtgcgcgggatctgggcacgcttgccgtcgagatggaagccgccgctctctatgccttcagcgcggcgagcggccgaccgatcgtctgcttcgcgcacgtcacgaatgctatggcacagacggaaggcgacttcgagaaaggcgaggccgacggcgcggaagcgacacttgctgtcgtcgccgccgctgcccgcggctggcggaagtagcgcagaaattctggcgatcgaggctgctggcgctcgcggtcaaggtcagaaccgcgtgcgaatccgtcacccctattcaggtctttcatagctctttgagatcttccggagcgccgaaaggaaacctggatcggcaaccgcatggccatcgatggtgtgaacgccgtgggggtatttcaatacagcgttcgagctgatctatctgaaagggtttggtgagaagcgggcggtcatgaaatccgcccggcattccatcagccactagccactcgcaaaggcgaacgggatcttgcgttctgtgaccgccgcgaccggttcgctgctggtgcggccgagcaagacaccgaccacagcgaattaaaattggtgttgttggcgagctccagggcgggggccagatcactggcttcggccacatccggtgtggcccagctctgcgagcttgtcggctaccatcatctggatgagtgcttcatcctcaataagcagcaccgaagccacaagccgtctccaacgctttctattgtcgagtgatctttgctgcgctggggaatgcacgcagcgctgcggcccgcagctcatccaaggtggtgtgcccagcctcggcagctgcaagaagctgttcagcaatgaccttccggatctcatggtcaccgccgtttggaagttcccggcacgtctcttccaacacgacttccatagtcgacttcacgcgatccgacagcgtcatccggcttctcaagggctcgacaaaccattttcgacaatatggaactgaagagccggcgccgtcaacggagactcatctgctctagcggggagcgcccaccagccctacaacgcctgtcacggaacgcaatggcgctgtcttgatcgccgctaccgggatgagcgggagcctgctatcgcggaccgcatggattccgctcctgccgggcactctgctcggctccatactggataccggaactcttgcgtcgggagggaacgatgacgctcgatattatggagcctttgctcaagcggctgcggctcacggctaacagttcggaccaggatgaacaggcgatcttgcggcttccgataaccgttaagcgggtggccggcgggcagacggtggttgcaaccggagataggccttctgtttgttgcctgatcattgacgggtttatgcaacgatcaaaaatcgttggagatgcaaggcgacaaatcctctcctttcatcagcccggcgacatccccgatctgcaaagtctgcaccttcacgttctcgatcacgaactcaccatcttggaggactgcatcctcgggttcattcctcatgatgcgctccgctcgttaacccggagcagcccccgggttgctgaagcgctgtggcgggacacgctgatcgattctgcgatattccgggagtggatatgcaacgtgggacaacgcgacgccataagtcggttggctcacctcatcctggaaatatacacgaggctcacaacaatcggccgtgttacagacgtgtccttcaggttcccagtcacccaggtcattcttggggaggcaataggaacgagcatcgtccatacgaatagagtgatcaaagaacttcgatcgaagggtctgctggaaatcgaacgaggagaaatcagcattctcgatctggaaggcctccggcaagtcgcggacttcaatccactctaccttcatttagacccagcactttgatgcgctacttcttcgacattcgcgatgacttttatgccgctgacgacgatcatggagaggagtttgcatcttttgatgctgcgcaccttgcagcgctcagaccgccacatctatcgccagcgacgtcttcattgcaaagggctctgcgatctcagtcagggtaagagacgaggaacggcccctctttgagatcagtgacagtgtcacgatgaagcattagcgttaaagacggcaaattgcgctgcggcggcgcagccaacgaaacagagtttcatatgccccttgtccctgattcgtcaggcgagttcgaggcggcatagcctgaagcggtttcgccatgttcaatggcgttgaccgcatcgtctgccgagtggaatggccccccttgcgggatcttgccgcagcggaaggcgctgatccgaatgacatagtcgggacgttcagaaggcaacgctttagaatcgagcagatcgcaagcgatcagcatgatgcaggcaaggagaggccggttgtccgagccgagcatcttgcgcgggcgaccgagcgtccatgagcaggttcgaagggacccagggctaagaccaactgcatgcccgcttctggcccgaggctgcctagctcaatgctcggccaagcgtcccctgtcgagcgaagaccggaagcggctcgcagtggtgtcgacccgcgattttgaccttaagcggcccacgtcgcattccgcgagcgttgatcaatcagcgcaggtcgattaacggttgcagcagtgaacggcattgtgcctgataagtcattcgcgccgatatccgtgaaaaggaagcccgccggcgtcttagtgaagaggaagatgagctggccgcagaagactgagtaatagtcattgttctcttgatcgcggtcgtaaaggccttgccgcgctggatacacgcgcgttttttcgccgtgaacgaggtctgataggttttggcacgggattgcgcggtgtcgcgaattgcgctgtcattcataaacggcaattttgtcataccggcaacggcggcggaatcgtttgcctcagtgccgcgcgaaacttctcgatgaagccatcgaattccttctgtagggcaggagaagcgacggcgctctacggcgcggcgcgacggctggaccaacgttcaggataacggttgcaagcataattctcagcaaaaacttcacggatcgactccgtccgtctaccaatcaaaggtgttcatggtgttctgtcgcgtcaaggaccttccggttcaccagcgcaccgttgaccccgctcaggcggatggatcgcctgcaccgtgcagcgacgcgcgcagacgtgacattcggcggcgcattcgcggtagcgcttgagcgattcgaacatccgcatgcgggggggaatcgcgagcgccgccccgagcaggcacagattgcggcagtagaagcgctcacgaagaggccggcgcgcagcagcaatcccgcatagaggtcgaacggccattcccgcaggaacttcatgtttcgtgccggaggcctgcacgatcgccctccaggggcacggctcgaagcgcaatccggcgtcgcgccaggcaaccgagcaggtcgcgcgaacgatcgagcaaagcgccgccgttgcgaaggtcgcggcggcgttcctggaggagccgccgtttcttgaggagactgcggcggcgatcgtcgggccgaccgtcgtcctaggcctgttctccggcgaaagcctgcacggcgccaaggatgcgcccatgctcgtcgcagggcccgcggcgagatcgtgtttgccggcatcatgggcagcggacccggcatcgaggacctcatcgcgcgcgacgtggcggcggcgtcagggacgcgccgcctgtcccgtccatgcctgcgccggcgccgacacgcccggcaggtccagaagattgatcgcgcggcaggcgatctgatcgacggcctcggcaagcgatgccggcttgagatagaaggccggcagcggcggcgccacgatcgcaccgatctccgtcacctgcgtcatcgcgcgaagatgcccgagatgcagcgggctttcgcgcaccaagagcaccagccgacgccgctccttgagctgcacgtcggcggcgcggacgaggagattgtcgagctgcccacaggcgatggccgagagcgtgcggattgagcagggcgccacgatcatgccgcgaaccggacacgagccgctggcgatcgaggctccgatctcgtcatgcggatagcagcgaaaggcgaggctgcgaagatgggccagagcttcggtgcccacctcctcggcgagcgttctttcggccgccggcgagaccacgaggtggacagcgcagcgcgtattgtccgctagacgttcgacgatgcgcatgccgatcgcagcgcctgaggcgccactgatgccgacgacaacgccctcccgctcgctcatgcgggctcccgtgccggcgcagcgagcccgaggtgctcccacatcgcgtcgatccgtgcgatcacggacggatccatcgcgagcggctccccccagagtcgatccgtctccggcgggatttttgtcgtcgcatcgatgccgagcttgccgccgaggccgggctttggcgaggcaaagtcgagatagtcgatcggcgtgtcgctgatcgtcaccaggtcgtgcgaggaatcgctgcgagtcgaaacggcccacatcactgcgcgccagtccctgatatcaatgtcgtcgtcgaccatgatcaggagttttgtgtaactgaattgcggcagcatcgaccacaggccgagcatcagtcgccgcgcttggccgggatagcgctttttgatcgatgcgatcgcgatccggtaggagcaggcctccggcggcaaatagcagtcgatgatctcggggaattgctgccggaccagcggcacgaacagctggttcagcgcctcgccgattcgcgagggctcgtccggcggccggcccgtgaaggtcgaaagatagagcggctgctgccgggtcgttagcgcggtgacacgcatcaccggaaacgcctcgacggaattgtagtagccggtgtgatcgccatagggcccttcgggcgcggtctcggttgccgacacgaatccctcgatcacgatttcggccgcggccggaacggcgatcggcaccgtcaggcagggcgtcaggcgcggccgctcgccgcgcaaaatgccggcaaagcgcagctcggacatcgtctccggcagcggcagaaccgcagccagaatggtcgcgggatcggcgccgatcactacggcaaccggcatgtcgcggcctgccgctttccattgctgatgatgacgcgccccgccgcgatgggcgagccagcggatgatggcccggtcgcgcccgagcacctgcatccggtagacgccgacattctcctcctggtcggcggccacggagttcggcggcacggtgatgaccagcggccaggtgatcagtggtgccggctctccgggccagcagatctggaccggcaatttgccgagatcgatatcggcgcccatggcggcgcgttcttgaaccgccgcggctccgcgtgtgcgagggcgcgtcgcgagcgccgcccgcgccagcgggatcttgtcgaaggcatcccgcaatccccgtggcgggcgcggcgcgcgcagctcggccatcagcgcgccgagctcgttgaggcggtgaggtgcgattcccatgccccaagcaacgcgctcgaccgtgccgaacaggttggtgatgagcggaatgtccgaaggcgtgccgtcggccttgaccggctgttcgaacaatagtgcagggccattcgcgctgagcacgcggcgatggatctcggtgatctcgtggaccaccgagattttctcccgaatgcgtcgcaactgccccctcgcttcgatgaagcgcaggaaatcggacaggtcccgaaagcgcggcaggtcacgctgcaagtgaactcctccaaaagaacgacaaatgcccgggatgatcttcatgatcattgttccggctcaaatacttaggcgcgtaatccgtccagatgtggtcgcatgaaagatccgtccgcggcttccggcccgttgccagctatccccccgatcctggccaacgcgatgcggccgctaccgctcaagccattgcagctcgcactcgccggcttcctgcaacgcatcctgcggcgcaacccggccatgttcgaccggctcggcgcgcacacgcacgcgcgtttcggcatcaagcccaccgatctgccgtttgccttcgtggtcgaagcgaggccaggcggcctgacggtcgtgcgcgacctgccacgggatcttgacgcacgtatctccgctacgctcgctaatctcttggccctgcttgagggcagggtcgacggcgatgcgctgatgttctcgcgcggcctcgtcattgagggcgatgttgaggctgttctcgcgctgcgcaacgcgattgacgacgcgcagctggacctcgtgaccgagctctcggctctgttcggaccgctcggcgcgccggcacgacgcgccctcgaaatggcgcgcggcggactattgcgtggatcccggaggcctgtccgataatggagctgatctgtcccgcgggcacaccggccgccttgaagagcgccatcgaggctggcgccgatgcggtctattgcgggttcaacgacgaaaccaatgcacgcaattttccgggcctgaatttcagccgcgatgagctgcgcaagggcatcgcgctcgcccacgggagcggcgccaggatactggtcgccatcaacaccttcccgcgcgctggaagcgtcgagctgtggcatggcgccgtggatgacgcggtgagcgcgggcgccgatgcgctgatcctcgccgatatcggcctgatggactacacggcgaggcgccatccgaaccagcgcctgcatgtctcggtgcaggcggcagccgcaaatccggacgcgatcgcatattacgtcgaaacctttggcgcgcggcgcgtggtgctgccgcgcgtattaagcgtgccggagatcggcgagattacccgcgcaagcccttgcgagaccgaggtcttcgtgttcggcgggctttgcgtcatggcggaaggacgctgctcgctctcgtcatatgccacgggcaattcgccgaacatgcaaggcgtctgctcgccgcccagccacgtcgcctacgaacagggcccgcaaggaacgacgtcgcggctgggcgggtttaccatcaaccggttcgaacctaccgagcccatcggctatccgacgctttgcaagggacgcttcacgaccgagcacggcaccggctatatctttgaggatccggtcagcctcgatgcgacggcgctgcttaagggtctgcgcgatgccggcgtcaccgcgctcaagatcgaggggcggcagcgcgggcgcgcctatgtcgaaagcgtcgtgcgccatttccgcgccgcgctcgaagcgctggaaagcggccgggaggccgagatcgccggcctcaaaccgttcaccgaaggccaggcgtcgacggtcggggcctatcgcaagacttggcgttagtgccgtacgtcagcagtgagggaattccgatgcaactcagcctcggcccggtgttgtacaattgggcgcccaaccgctggcgcgacttctacttccgcatcgcagatgaagcgccggtggatgtcgtctccgtcggcgagatcgtctgctcgaagcgggcgccgttcttcgacgaccaccttccggccgtgatcgggcggctgcgtcgtgccggcaagcaggtgctgctcggatcgcttattctggtgtcgcagcgtcgtgagcgccgccagaccgaggagctcgccggaacggaagagggccttgtcgaggtgaacgatctgacctgcctgaaggcactgggcggccgagcgcatgcgatcgggcccttcgtcaacatctacaacgaggcgaccgcaagcttccatgctgcccagggcgcgacgcgcatctgtctgccgtcggaattgccactaccatctatcggcacgatcgcggcggcactgccggacgtcgccatcgaggtgtttgcattcggccgtgcaccgctggcgatctccgcgcgctgctatcacgcccgcatgcacaagcttgccaaggacaattgccgcttcgtctgcgagagggatccggacggccttgcactgaaaacgctggagcagcaggatttcctgaccgtgaacggggtccagacgctgtcttacacctgcacgaatctgcttggcgatatcggcgcgttgcgcactgctgccgtgagctcgctacgcctgtcgcctcagcactgcgacatgattgcggtcgcgcggacatttcgcgacgttgtggagggccgggacgacgcggaaaggggaacccggcgcctggccgaactctatccgaacgttcccttctccaatggtttcctccacggcgcggctggcgtttcgtatcagccgcactcagcatcagaagcgcgctttgtcaccgggacgtgacctgaaagcctgcacaaagtttgctctcgtacaatgagtcgggtgctccgccgcccctatcctgatgtgtaagaactccatgaggaggaccgccgatgtggccgtaccgtggtgaggccttccgggctcgggaggacgtcagatgatgatgggcggcaacgtctcggaatagaccatgagctgcttcgcggttgcgaccgcgtggctgtttgcggccgaggcgctgatggttgctggttttgggtttccggccgtcgatatcgccgcgcctgatacgctcgtcctcgtccaaatcatcgccatcggctggctcagcctgtgcgtctgtggcgccctcacgcaattcatgccggtgctggtaggcaaacccgtatacagcgaagcggcgacgctgccggtgctctgtctgcttgtcgcaggccgctgctgctcggcttcctggcgctcggcggccggttgccgccgtggctctggctgcttccgttcggggcgacgttgctcgtctcgggcttcggcctgctggccccagacctgatccttaccatttggcgcgcccgcccgctgtctgggccggcgcggttcgtgctcgccggcctcgcaccccttggcgccacggcggcgcttggcacctcctttgcctggggactggcggggctccggcagcgccgctcggcgtcctgcttggcgccagcattccgttgcacgcgatcgcggggctcggcggctggctgacactgacaacgatgggcgtaagctatcgtccctcgcgatgttcatgctgtcgccggacgtcgatccacgacgaagccgcgcaaccctctacgccagtgccggcacgcttggtcttgcgctggccggtggattggctgccatcgcggtgcaggcgcggctcgagggcgtgctgtcgctggcgggcgtctcttgtgtcgcgaccgtcgcgttgtacggccgcgatgtcgtcgctctctaccgcaaccgcaagcggcgcacgctggagctgaacacgaccatggcgctctatgcgctgggcggtctcgccggctcggtcccggacttgcgcctgcactgaacggctcttttgccgctaacctcgacgcgttcgccttcctgatcacgttcggctggctctctgggctaatgctcgcaaaactctacaagatcgtcgcattcctcacctggctcgaaacctacgggccggtgacgggccgcgtgccgacccagcgagtgcaggatctcgtggtcggagcccgtgcggcgcgatactttgtcggctacttcgtctgggtctgggttgctacggtactcctgctcgcgggccgaacacagccgtatcgcatcgcgccgctcggcatgatggcggccacgatgggtatcgtgcacgagctgctgcgtgtgcgccggcttgctgacgtgacgaagagtgtgcggctgccgcagggcgcaaggctgccgaggctgctgcattcgtgaagcctgtgtctggagagaattgatgaccgaatatctcgaggtagacgtgcgaccgatcctgcgcacgggcggagaacccttccacgatcatggcagcggtcgcgagcgtacggccggtgcagggcacccgtctctacgcgccattcaagctcgtgccgttgttcgatgttatggcgagcaagggctttgcgcattcggcaagtgaaatcggcggaggcgactggcaggttctgttcacgcccctgactcgccagcagctgcggggccgttcagcgacaaatggcctaggtcgaaggtccggctcgacaccagggagcttgatccgcctgagcccatggtccggatcttggccgcggccgaacaacttggccccggcgaaacgctcacggcattgatcggccgcgagcccgtgttcctgtttccgcagcttgagaagcgcggctacaactggcttggcaggcttcctgcctgatggggcgacctatgggctcacagtgagggcgcggccatgaacagcggtctcatcgagcatgttcgcgagcccctccgcgtcgtgatcgatcccgagctcggcgcccaacatcgttgatctcggcttcgtctatgacatcaccatcgacgatggtgccgcgcacatcaccatgaccgcgaccaccccccgctgccccgcctctggctccctgaggatggggtcgcgcgcagtgcggcggttcgagccgccctgggatccatcgatgatgacggacgaaatcaagtctcggcatcgcgcccgtacattgatcgcgttggagggtggaatgatcagtcccggcgagagcggcgcggcgcgtatcggcatcctggtcgcgtccgatcgcgccagccgcggcgagtacgaagactagggtccggactcaattgatccaccaag

SEQ ID NO: 175 - DNA, 1646 bp, Bradyrhizobium colbertium
aatgctgggcgacatcgagcggaatccgcaaacacagcaccagcaccggaagttacccagcttaaggtcaacgaaaagaagtggaccgccaccttgatgaaggccgggtggacggtcctgccgaacgtcatctttgaacgccagcgtgccctggggctggatgcgatcgacatcaacatcatcctgcacatcgcgtcctattggtggacggcagaaggcaagccgtttccgtccaagcgaaccatcgcagcggccatggacatcgaaccgcggaccgttcagcgcaggattgctgccatggaagcggctagactaatcaggcgggaagaacggcgcagctcagcaaacggtagccagaccaatgtctaccacctggacggcctgatcgcggccgccaagccatatgcgctcgaaaaaatccaggagcgtgatgaaaagattcaggcaaaggccgcaagggcaagcaggaagggcaagcccaagctttcggttgtgaagggaggggcctaaccagcttcgcgccgtagctcaaccggatagagccctgccgttctttgaaatcctagctgacacttggagagtaggggcaggaggttgcaggttcaagccctgccggcgcgtccatacccccggtttttagttcactttgaatcgtgcaatcgtatttgcgattgcacggtcgtcctacaccgtgagtttgtcggtcgtgaccaagtctttcagcttctttgctgacggcgggattccaggcccaacgaccggcttgccatcggcttcagccgaggcgacagcttcgttcagctccagcagtgcttccaacacatcggccttcttggacatgccgtaagcgtcgcgtacggcgtcgtccagcgctttatgtgctttcttcagggcgtgttctccgggcccttcgatcgcccgatatagctctcgtagtgaaagctcatgcttcgcccgcagatgtgatcgcaagcgccgcacctcgaccgcccgcttggcgacgaggcgaaccgcctcggttgtcggctgctgaggccaggggaagctgtcgaagacggtatccgacgtatagcgaaagtctgccttcagcgttgagcagcgattgatgaaccactcccaatggatgcccgactggaggataccgaaagagtagtcatcttccagcgcgaacacgctcagtgcatcattcggatgaatggccgtcgaaacaaattcgaagatcggccggtgtgtgacccgtgcacatacgatgtatcgcgacagcggggcgagggtccgcatcaggtcttcgcgcgggtaggacatcagccaccagcgctttaaaaagttttcgtggtgcttgttgaccttcgcctcgggatcgtcgtccaaggcttccttatttcgtgcacgctccttctttgccgcttccttccgtgcggggagcaccgtctgctccagatgctcaaacggttgcttgaatgccttggccttcaaaagatcgcgcggctgaaagtcgatgacgtatctgcattcgagtttgtctacagcgccgaggaagtcgtcggcgatcaagaacgggaagagcacctgcgcgttcgccttgttggccttcatcatcgctttcgcttcggtcggctctagcagtctgctgaaaaactatcgtt

SEQ ID NO: 176 - DNA, 57077 bp, Bradyrhizobium colbertium
cggggcaggacgcgtgcgcggcggggccgcagccgggctgccctcagcggcacgggtgctggcgcgtcggaaggcatctccactgccgccggagcgcgggccgccgccgccggggcgcgaggcctctcgggcacgttgggcagcctccgattcgaccttgcgaacggcctcttccagcgacagccgctcgcgcgtgatctcggactcggacagcggcggctgcacactgcgcagctgcgcgatcagggccgtgcgagcccgctcatagagcgcgcgacggctctcgccgggagcattcgggtccagggcggcaatagcgcgggcgatcagcggatagtaatcagccatttctactcaactatacgcgcgtcccggtaagagatcgttaagcctcaaacggattttgcaccaggatagtatcctcgcgttccgggctggtggaaagcagcgcgacggggcatcccaccaattcctcgatccggcggacatatttgatggcctgggccggcaggtcggcccaggaccgcgcgctggcggtcggctccttccagccctcgatggtctcgtagatcggctcgacccggctttgggcgccctcgccggccgggaaatggtcgatctccttgccatcgagcttgtagccggtgcagacctcgatcgtgtcgaagccgtcgagaatgtccagcttggtcagcgccagaccgttgatgccgcaggtccggaccgcctgacgcaccagcacggcatcgaaccagccgcagcggcgcggacggccggtattggtgccgaactcgcggccccgctcgccgatcttgcggccgatctcgttgtcctgttcggtcgggaacgggccctggccgacacgggtcgtgtaggccttgcacaggccgagcacatagccgaccgcgcccggcccgaggccggcaccggtcgcggcctgcgccgccaccgtgttggacgaggtgacgtaaggataagtgccgtggtcgacgtcgagcagcgcgccttgcgcgccctcgaacaacatgcgcttgccttcgcgccgcttgatgtcgagcagccgccacaccgtctcggcgtagggcaacagctgcggcgccagcgcggtcaattccttcaggatctcctttccgtcgaattccggcagattgaggccacggcggagcgcattgtggtgcgccaggaggcggtcgatcttgtgcggaagcgtgtcgagatcggcaaggtccatcagacggatggcacggcggccgaccttgtcttcataggcaggtccgatgccgcggcgggtggtgccgatcgcggtcgcggcgctcgcggattcgcggtgagcatcgagctcgcggtgcagcggcaggatgagcgtgacgttctcggcgacgcgcaaattgtccggagagaccgcgacgccctgggccctgagcttggtgacctcgtcgaggaaggcggtgggatcgaacaccacgccgttgccgatcaccgacagcttctggtcgcgcaacacgccggagggcagcagcgcgagcttgtacgtcttgccgttgatcaccagcgtgtggccggcgttgtgaccgccctggaagcggacgacgatatccgcctgctccgacaaccagtcgacgatcttgcccttcccttcgtcgccccactgggcgccgacgacgacaacattggccattctcgggtaatccttcgaagattttagatgcgccacccaagctgacggccgggagccgctcgcacgcaaggcagccaaccggataaaggaagcagcccctctaggcaagcaagaacggggcattttccgggcccgagagacactttaagcctttgatatcccccgaaaatcctgaaggctgccggatcagatcggcaagcctcgaccaaagcgggagaccgatcccggccgctgcatggtcgcgatgcatcccgcccccgttgatgcaaccacgatttccgtgtctttgggtctttgccgggctgtcagccggcccgaccttgccgggccggggccccggcgcgcatgacgcggagccaaaacaatcagaatgtccgccaccggccagagcacgggctccgaatcatcaggccatcactggatcgccaaccagccttacctgctgctcagcatcacagccctgtgctgggccggcaacgccatcgtcgggcggctcgccgccggccacattccgccggtcacgctatcctttttgcgctggttcttcgccttcctgctggtgctgccgtttgcctggaagcacctcgtgcaggactggccggccatccgcggcaagctcggcctgatggtcacgctctcgatcaccggaatcggcgccttcaacacgctgcaatattgggcgctggagcatacccaggcgctgaatacgctgctgctccagtcggccgcgccgctgctcgtggcgctgtggtcgctggccatcctcggcatccgcctcaccgcggcgcaggctttcggcgtgctgctgtcgatgtgcggcgtgctgacgatcctgctgcacggcgacttcaccacgctgtcgaacatcgagttcaacaagggcgacctcatcttcatcgtcgcgctcgtcatcttcgcactttactcggtgctgaccctgaagcggccgccgatgcacggactgtcgttcctcgccttcacgttcggggtcggtgccgcctgcctgattccgctggagatttgggaactgtccgcgcggcccgtgatgaagctcgacgggccgaacctgttgacgctgttctacgtcgccgtctttccgtcggcgctcgcctatctctgcttcaatcgcggcgtgcgcctgatcggggccaaccgcgctgcgccgttcttccacgtcgtgccggtgttcggctcggtcatggcgatggtgttcctcggcgagcacccgcagatcttccatttcgtcggcttcgcgctggtgttggcgggcgtgttcgtggcatcgcggaagcagacgacgtaggcgccaagcacaggcgcattttgcgcgagctggcgcgtgcgctcgctatttcaccttgaacttgctgtaggcctcgctcgtcgcgatgatcacgtgctcggcgcagccgttgacgcgatgcggatcggcttcacgctcgtaggcttccgacgtcatcatgtcgagaaaggccgagacggacggataatggaccagcgcaacgaaatcccacgcgttgcccgcgtgcggaccgagggcgaccgttttggcttcgccggtccagagcaacgtgccgccgcgcgccctgatcatcggcacggtgatcgcactgtagcgcagatacgcgtcccagccggagccattgccatcgcgcgaacgcgcgtggaagcgcatcaggttcagcatcaccaccggcgcactcggatcgagccgctccaggccttcgatgttcaacatattgaccgccaatggcacctcctcagctcatgcctgcattgtagcattgcggcgctgtgacttgtgtcacggcggcgatccggcgcaagctcgcatccaacgccaatgacgaccgcttcgcccgcgccaccggcctcgaatccggccaactggctcaacaaccagccctatctgctgctcagcctaacctcgctgttctgggccggcaacatcgtgctcgctcgccatgtcggcgcgcatgtgccgccgctgacggtgaccacgatccgctggtacggcgtgttcctgatcctgttgccgttcgcctggcagcatctgaagcgcgactggcctgccttgcgcaagagcctccccttgatgctgttcctgtcgctggtcggctttgccttcaacaacgcgatctcctactgggcaatgcagtacacggaggcgctgaacgcgctgctgatccagtcggcgggtcccctgttcgtggcgctgtggtcgctggtgctgttcggcgtgcggctgaccggggcgcagcttggcggcatcgcgatctcgctcttcggtgtgctgatcatcatcctgcgtggcgaccttgccgcgcttgcgagcatcagcttcaacaggggcgacatcatgttcgcctcctcgctggtggcgttcggcatctactccgccttcattccgcggcggccgaagattcatcagctctccttcctgtccttcaccacctgctgcggcgcgacgatgctgctgccgacggcgatctgggagacagcaagcggccacgtgctgcacttcgacgggaagacgctggcgacgctgggctacatcctgatctttccctccaccctcgcctaccttttcttcaataggggcgtggcgctgatcgggccgaaccgggcggcgccgttcttccatctggtgccggtgttcggctctgcgatggcgatcctgctgctgggtgaaaagctccagccgttccatctgatcggctacgcgctggtgctcgcgggcgtcgtgcttgcatcgcgccaaggctcggcgcggtgacgtaattccgcgcgacggacgcattaacgacctccgaccatctttcgaatccttttcggacgagctaggttccgcgccaaccaaaaaagggaacgaccaaagatgatttcaacgttgattcgaaacctgcggacggtcggtgtggccgcactctgcctcgcagcggcatccacggcccaggccgacaattatcccagccggaatatcacgctggtcttgccgttcgcggccggcagcggcacggacacaacgacacggctgatctcgcagcacctgtcgcaagcgctcggcgtcggcatcgtcatcgagaacaaggcgggcgccaacggcatgcttgccgccacctatgtcgcgaaggccgcacccgacggctacacgctgctggtgacgaccaacaccacgcattcggccaatccctatctgctcaagagcctcacttacgatccggtcaaggatttcaccccgatcgcccgcaccggcgatttacccttcatgctggtcatcaatccggaagtgccggccaagaccgtcggtgagctggtggcctatggcaaggccaatccgggcaagctgagctacgcctcgggctcatcgtcggcgatcgtgtcgggcgcgaccttcgcgcacaatgcgggcctcgacctcctgcacgtcccctacaagagctcgccgccggcgctcaacgacgtcatgggcggccgcgtctcgatgatgttcgtggacatcctgaccggtctgccgcacgtcaacggcaacgccttgcgcgcgcttgccgtcaccaccaaggaccgctcgccgctggcgccgcacctgccctcgatgcaggaagctggcgtgccggatttcgacatctcgtcctggcagggctatttcggccctgccggcatgccgaaggagatcgtgacgcggctcaacaccgagatccggaagatcatcgagaacccggagatcaaggccaagctcgctacgctcggcatggacgccttctccggcacgccggagcagcttgaagcgttcgtgaaggatcaactcgtgctttgggagaagctgatcacgaacgcgaagatcgagaagcagtagcccagtcattccggggcgcgcgtagcgtgaccccggactcccgcgattccgggttcgatgctgcgcatcgccccggaatgactgcccgagatgagcttgcgcggcgagttacgccgcccgcaccttggcgaggaagttgtcaaccgccgagcgcagcgcgccggactggttgtccagttcgcgggcgtttgagagcacgtcgctagcagcgctcccggtcgcttccgcggccgaggtcacgctgccgatatgggcattgatctcgctcgagccggccgcgaccgactggatgttgcgggcgatctcgcgggtcgcctccccctgctgttcgatcgatgcggaaatgcccgcggtgatctcgctcatctcggcaatggtctgggtgatgccgccgatcgcggcgacggcatcgctggtcgaggtctgcatcgcagcaacttgcgcagaaatctcctcggtcgtcttcgcggtctggttggcaagcgccttgacctcggaggcgacgacggcgaagccgcggccggactcgccggcacgggccgcctcgatggtggcgttgagcgcgagcagattggtctgcgccgcgatcgagtgaatgagcttgaccacctcgccgatcttctcggcgccagtggagagctcctgcaccgtggcgttggtgcgctccgcatcgttgacggctcggctcgcaacttcggtcgaacgcgtgacctggcgggagatttccgcaaccgagctcgacagctcttcggcggccgccgcgacggtgccgacgttgccggaagccttttgcgaggccgcaccgaccgtcgccgcacgcgacgaggcgtcgctggcggtcgcggtcatcgactgtgccgtcgtctgcatgccggccgcggccgaggagaccgagcggacgatgccgttgacgctgcgctcgaagtcgttggcgatctcttccatcgccttgcggcgttccgccgcggcgcgttcctgggcatcggcctcggtcttctcgaggtcgcggatccgaaccgcattgtccttgaagatctggacggtggccgccatcgcgccgacttcatcgccgcggccgacgccggggatgtcaccgtcgagcttgccgtcagcgaggtccttcatgcgggcgccgagcattgcgagcggccggctgatgctgcgcccgagcagccaggcgacgctgccagcaacgatcatgatgccgagcatggcaaagccgagaagccagtagaccgggcccatcttggcgtcgatatcgtcgagataggcgccggtgccgatatacatgtcgaagccaggcaccgcgaccgcgtagccgatcttgcggatcagcgttttctggccgggcttgacgtagtcgtagtacagcaggatcgagccgttggccttgacgccgttcatcagttccatggacagcttgcgcccgttggtcacgacatccatgcggttcatgccgatctgcttcgggtctggcgcaagctgcgtgatgccgtcataggacgtgccgaacagatagccggagccattgtcgtaggtcatcgcgttgccgtagcggcgaaggtcggcgagcgcggcatccttggtcagttccccggcatcaacccgcttcttcagcgccatcgcgtaattgcgacccatgtcgacgatcgacttggcctggtcgatgcgtgcgttcaccatttcctgtttcatcaggtagccggcgagaacaccggagacgcagaggccgaacaaggtgacgccgacaagaatgccgagcttcggggcgatcttcagattgctcaatttcacggatggctccagcaatatcggggtaagcggcacgcacgatcgatcaaaatcgaatcgattcttagggggagagcccttagcaagttacttacgggcctccgtagaagcccggacgccaccgtcagaaccggcaatttatctcggcggcaacaacctggaattgtacgcgagcgccccgatttcgcgtaaaagacgcacaggcctgcccgcgaaggcgggtcacaacaagaaccgacaaccaaatcgggagcagaaaatgccgaaatacagggtggtgacgccgaagggtgcgagcttcaccgtcgcgggcagcgattattcctacgagcgcgaggcgctcgatccgatcgatgccgagatcgttgaggcgcccgccgacgaggccgggttcatcgccgccgcgaaaaatgccgacgccatctacgccaagggcatcccgatcaccaagtcgatcatcgacgcgctcgaaagctgcaaggtcatcacgctcggctcggtcggcgtcgacagtgtggacgtcaaggccgccaccgcgcgcggcattcccgtcaccaacatcccggacaccttcatcgaggaggtcgccgaccacgccatgatgctgctgcttgcaggcttccgacgcctagtcgagcaggacaggatggtgcgtgacggccgttgggccgaaggccggccggcgctgctcaagatcccgaggctgatgggccagacgctcggcttcatctcgttcggccgcgtcgcgcgtgcggtcgcgaagcgtgccgcgccgttcggcctgcgcatgatggcctacgatcccttcatccaggaaacgctgatgtatgaccacggcgtcatcccggcgacgctgaacgaggtgctgtcgcaatccgactttgtctcgatgcacgcgcccgcgaggcccgaagtgcaccacatgctgaccgaaaagcacttccggcagatgaagaaaggctcgatcttcatcaacaccggacggggcgccaccgtggacgaggagagcctgatcaaggccctgcaagaggggtggatcgcccacgccgccctcgatgtgctggagaaggaaccgccttcgcacaacaaccccctgctcggcatggagaacgtgaccctgaccgcccacgtggcctcggcctcggcacggtttgacgaggcgcgcaagcgccgcgtgggctacgaattgtcactggtgcttcagggcatgtggccggtaagctgcgtcaatccgtcggtgctgcaaaacaccgcgctccgccgctggcaacctgtcagcatggaccgcggcccgaacagctaggcggccggcgcgaacgcgcaacgaccgaaacggcccttcaccggcgaccaacgccgggaagggagacatcaagggaggaactgatgaggaacgacatcacccgtcgtgatgctctggcgctgggcctgtccgctgcaacgctcgcggccaccggtgctgcagcgcaaccagcgcaatcgacgatcaaggccgcggacgttgcggcaccgaagcgagagatcgagaaaggtgccaccctgcgcatgctgcgcccggtgcgcttcgtccaggccgacgaggacgtgttccgcgccaacgccgcaaaattcaccaaggagaccggcgtcgaggtcaaggtcgacttcgtcggctgggaagacatcaaccagcagaccgcggtgaccgccaattccggcgccggccccgacatcatcatcggtttctccgatgcaccgcacatctatatcgacaagctgatcgagctgaccgatgtcgccgactatgtcggcaagaagtatggaggctggctgccgctggcgcagcgctatggcaagaagaacaagagcaacgcctggatcggactgccgttcggcgccaccgcggggcccctgatctaccgcaagtcgatcctgcaatcggtcggcttcgacaaggtgccggaggaccatgccggaatcctcgatttgtgccagaagctgcacaaggccggcaaaccggccggcttcgcactgggtaacgccaagggcgacggcaacggcttcgcgaactgggcgctgtggtcgcacaacggctccctgctcgacgaggaaggcaacgtcgtcatcaacagcaaggagacgattgccgcgctgaactgggtcaagaagctgtacccgaccttcatcgccggaactccctcctggaatgacgtcagcaacaatcgcgcctattcctcgcaggagatctcgctgaccgccaatggcgtctcgctgtacttctcgctgaagaacgatccggcgaccaaggcgatcgccgacgacagcgagcatcagttgctgcccaagggccttgcgaagatctcgcccatggcaggtctgacgctgaacgccatggtgttcaagcacagccaatatcccaacgcggcgaaggccttcctgcaatacatgctggagaaggaccagtacgagccgtggctcaacgccaactccggctactggtcccagccgttggccgcctatgccgaggccgccgtgtggtcgcaggatcccaaggtgaaactgttcaaggacacgatgaacagcccctactacgacggctacaagggcccgatctcgacggcgacgggcgccgtcagcgcagactacgtgctgatccagatgttctcggccgttgccaccggcaccgccacgccggaggccgcggccgcagaagccgagcaacgctgcaagcggtacttccggcggcagaaccgttaggcggctgacctgacgtcattccgggatggtgcgcaagcaaagcccggaatctcgagattccggggttggtgctgcgcatcgccccggaatgaccttggagccctgaaaagacaaaggtccgatgtccataaccgctctttcaacgcatggcgtagcggcccggcagccgaactggctggtgcgattgttcgactacaagccgttcctgatcgtgatgtgcctcgcgcccgcgatcggattgctgacggtgttcctgacctatccgctcggtctcggcatctggctcgccttcaccgacaccacgatcggccgcagcggcatctatgtggggatcgaaaacttccaatacctgctcaccgactccctgtggtggaacgcggtgttctacagcgttctctacacggcggtcgcgacgttcgggaagttcgcgctcggcttctggctggcgctgctgctcaacaaccattttccgttcaagagcatcctgcgcgcgatcatcctgctgccctggatcgtgccgaccgtgctctcggcgctggcgttctggtggatctacgatccgcagttctcgatcatctcctacctgcttgtcgacgtgctgcattggcgcgacagcaacgtcgacttcctcggttcgccctggccggcgcgcttctcgctgatcgccgccaatatctggcgcggcattcccttcgtcgcgatctcgctgctggcaggactgcagaccatctcgccctcgctgtacgaggcggcgatgctcgacggcgccagcgcctggcagcgcttccgctacattacgtttccgatgatgatgccgatcctcgccatcgtcatgacgttctcgatcatcttcaccttcaccgacttccagctggtctatgccatcacgcgcggcggccccggcaactcgactcacctgctcgcaacactggctttccagcggggcatcgccggcggcgagctcggcgaaggtgcagcgatcgcggtgtccatgataccgttcctggtattcgcgacgctgttctcatatttcggcctcgcgcgccgcaaatggcagcagggagaaagcaatgactgatagtgccgtccaaccggccgtcgcggacgcgaaggcggcgcccgataccatggcctgggattccgggctgcggcggctgatgatgatttatctgccgctcggctgcttcgtgttgattcttctgttcccgttctactggatggcgatcacgtcgttcaaaccgaacgcggagctgatgaactacaaggatcacaacccgttctggatctcctcgccgacgctggcgcacatcaagcatctgctgttcaacaccgcctatcctcactggctgtggacgacgatgctggtggcgatcggatcgaccacgctgtcgctggtcgcgagcacgctcgcggcctatgccattgaacgcttgcgcttccgcggcagtccctatgtcggcctcggcatctacctcgcctatctcgtgccgccgtcgatcctgttcatcccgcttgcgaccgtggtggtgcagttcggcttgttcgacagcccgatggctctgatcctggtctatccgaccttcctggtgccgttctgcacctggctcctgatcggctacttcaagtcgatcccctacgagctcgaggaatgcgcgctggtcgacggcgccacacggctgcagattctgcggcggatcacgctgccgctcgccgtgcccggattgatctcggccggcatcttctccttcacgctgtcctggaacgagttcatctatgcgctcgcgttcatccagagcggcgccaacaagaccgtgccggtcgcgatcctgaccgagctcgtcaccggcgacgtctaccaatggggcgcgctgatggcgggctcgctgctcggctcgctgccggtcgcgatcttctactcgctcttcgtggattactacgtgtcctcgctgaccggcgcggtgaaggagtagctcgcgactcgctcgcccccctctccacgtccttgcggggagagggggagtgcgctgcggcgtttggcccggcttcacaatactgcaacacgcgaaccgcataaggcgtgcgtccgccaacaggagacgcacatgcgcgcgacctttctcagcaccgtcgcaacgatcattctcaccgccagctccgcgctggcgcagagcgaaggcgaattcccggccaagctcgccggccacgtggtgatgccggccgaaacgttcatcgatgcaccggctgacgcacccgccgaccttaaatccgcaggcaaatacaccagcggcaagcgggtcgaagcgctcggcaccgtgatgggcaagtcctatgagcggccgaccggcgtctcgctgcctttcaagggccagccgttgcagggccactccggcatcaagaccatgcccgacggcacgttctgggtgatcaccgacaacggcatgggcgcccgcgccaactcgccggattcgatgctctacctgaaccgctacaagatggattgggcgagcggcaagatcgagcggctggagaccatcttcctgcacgatcccgacaagaaggttccgttccgcatcctgcatgaggacacccagaagcgctatctcaccggctccgatttcgacaccgagggtttccagatcctcggcgataccttctggatcggcgacgagttcggtccgtacatcctgaaggcggacaagaccggcaagatcctcggcgtgttcgatacggttgccgacggcaagccggtgcgctcgccggacaattgggcggttggaacgccggccgcgccgggcgcgacctacaccaacgtcaatctccgtcgctccaagggctatgagggctttgcgtcctccaaggacggaaaattcctctacggcctgctcgaaggaccgctgtgggacggcgataaaaaggactgggagaaggtcgacggcagggaagcggcccgcattctcgaattcgacgtcgccgcccagaaattcactggtcgccattggcagtatgtgttcgagcagaacggcaacgccatcggcgacttcaacatgatcgatcaggcctccggcctcatcatcgaacgcgacaacggcgagggcacgtccgacaaggcctgcccgcaaggcaagcgcggcgagaattgctttcccgacctggccaagttcaagcgcatctacaagatcgagctcaccgacgccaatatcggcaagccggtgcgcaagatcggctatatcgacctgatgaagatcaaggatcccgacaagaaggcgaggaagccgctcaacgacggggtctacaccttcccgttcttcaccatcgagaacgtcgatcgcgtcgacggtacccacatcatcgtcggcaacgacaacaacctgccgttctcttccagccgcgaccccaacaaggccgacgacaacgagttcgtactgctcgaggtcgcggatttcctgaaggcgaagtaaagcccgtctccttcaactgtcatcgcccggcttgaccgggcgtgacagcgggggactacctcaccgtaaattccaccggaatcgcaaagctcatcgagccgttcctgatctcatccggaaacggcgggaacggcgcggcatggcgtagcatggacatggcctgagcatcgaaggccgcgacgcccgatgagccgccaaggcggctcgaagtcacctgcccgctgcggctgatggtgaagctgagccttgcgacaccgcgctggccgcctccggccgacggatattgatggaagcgcatcagatgcgcacggactcgttgattataggatgcgatcgcggaggccgtcgcacccgcactcatggcggaagccatcggcgcctcgcgctcggcgcgcggtggtgcgctggtacgcggcgccggagttgcgttggacggcttcttggcctcgcggcggatcactttaggcttctcgagcgcaggtttttcgacaggcacgattcttgcgggctcaggctttgctggggtcggctccagcttctgctcgggtggggcgaccacctccggcgcttcctgcggcggcgtcggcgcgatggtctcctcgacagcctgctgcttcacggcttcgggcggcgatgcatctgcctcctgcatcaccggccccggcgcgacgtcatccagcgtcggctgcggagccgaagtcaccggcgacatgtcgatcatgatcgcgggcaggctgacgccctgctcgggctgcgacttgagccagctcatggcgagcagcgcggctgccacatgcagcacgacgatcacgaccgccgagcccccccagcgcgtgccctcgcgctcgccaagcggctcgtgcaggacgaaggcgctcgcggccatcagcttcgtccgtcgaggccgacgagagcgaccttgagatagccggcattgcgcaggctgttcatcacctccatcaggtcgccataggagacggccttgtcggcgcgcagatagatgcgctcgtccttgcggcccttggtggcggcatcgagtgaagcactgagcgtgtcgcgccccacgaaatcctcacccacggcgatcgaaaggtccggcttgacggtgacgaagaccggcttgtccggccgcggcgcgggctgggcggcggtcgccggcaggtcgacgccgatatcgacggtcgcgagcggtgcggccaccatgaagatgatcagcagcaccaacatcacgtcgatgaacggcgtgacgttgatctcgtggctgaggtcgagatcgctcctgtccccgcgcgagccgagcttcgatgccccgagctttacggccatggccctactccgccgcccgcgccagacggaaatggccgtggtcgcgctggcggctcaccagaagcatgagctgcgccgaggcgtccgcgagcagggcacggtaattggcaatgccgcggacgaggtgattgtagatcacgaccgccgggatcgcggcgacaagcccgagcgcggtggcaagcagcgcctccgcaatgccgggcgcgacgaccgcaaggctggtggtgtggctctcggagatgccgatgaaggcgttcatgatgccccagacggtgccgaacaggccaacgaacggcgcgacggcgccgatggtcgcgagcacaccggtgccgcgcgcaatctgcctcgacatggctgcctccacccgctcgagccgcagtgccacacgctcctggaggccgtcgtcaaggatgccaccggagagctccgcttccctggcgcaggaccggatcaactgggcgaccgcgtcgcgcgcgtcgccggcccgcgcggacgcctcggccaacgtcatgttgccttcgagcgcgcgcgtccgctgcaaggcgagcgagcccttgcggcgcagctcgatggtcttcgccagccaaaccgtccatgtcgccagcgaggcgatggcgagcccgaccatcacgaccttcacgacgatgtcggcaccgacgaacatgccccaaggcgacagattgcgcggcaagagcgcctcgtcgatggcgaaggcaggtgccggcgcgagcgccagcacgatggttaggatcacgtgccgaagcctgagaatgctctgcatcctgatctcccgacaggttgaagcagttcacgcggcgggcgctgccgcgatttggtccgcaagctggcgaaaccgcaccaattgatccgcccgcagcgcccgggtctcatcgcgtccgacgaagaccttgaacatgatgccaccgtccgcgttcacgaacgccacgaatgccgacgtcttgcccatgaacggccgctcgacgaaggctacggccgcgcagcgctcgtggcgcagatggccgtgcaggcccttgggctgcatcaggttgaaatagccgcggccgatctcacccgccggaattccacctgtgaactcgaagatcgcatcgtccgtgtgaacgatcagcgtgacctcgccccattgtgcgatgtcctgcatgacggcggcgaaatgttcgccgcctcccatgcgcaccatggagggcggcagcgcttcgatcaccgcgcgcggggtgacgctgcgctcgcgcgcgacatcctcgatcaccgcaccgggattgtcggccatatacgccttgaggtcggcgagatcggtgctcagcatgtctggctctcctcaaccagccgtctcaggcagccgcgctcgccttgcgctcggtcatgatgaccttgaacccctcgaacttggggtggccgagatagaggctttcgccggtcttgttgtcggcgcgcgcatgggcgcggcggaattcctccgagcgcgtccaggcctcgaaagccgccttgtcgacccacaccgtgtgcgaggaatagagcgtgtggtcctcggcgaccggccccttgagcagatgaaattcgacgaagcccgccatgccgccgagataggactcccgggtccgccagacggtctcgaaagcggcttcctggccgggcttcacctgaaagcgattcattgcgatgaacatgcaggtctctccttgctatcaagtcgaaaacgcgccgaagccgcactggagcatcagcgcggcccggcggaggttgtggtgctgcggcgccttcaggcttacgcacctccaaagtggatcttcattccggccttgtagactctgcccggtcccgggcttgaccacagcacgtcgttctgcgacgtgccgtcggtcgagctgcccggaatggcgtaaggccggtagtactggttcaagagattgtcgatcgaggccgtaaacacgatgtccctggtcgcgttgtaggtcaggtacaggttgaccagttcgtatcccgttgaaggcagatagccggccggcacatcgttgttggcgccgaacgaagcccactgcgccgtcaggatcagcgtgcgatcgagcaggcgtacgccgccggtcgtaacgaccttgcgcggagtgatggtggccaggccgatattggtggcgacgttcttgccctggatatagtgaccggcaacaccaatgaaccagcttccggcatcatacatggtctccgcctcgaagccctggatgcgggcgttggcgatgttctggtactggtagtactggctgaacgagccgaacggcggcaccggcgtcggcgccgaagcgacgagatcgatgtagtcgctgacgtcgttgcggaacagattgatcttgccgcggaacgagtcgttggcgctgaagatgttgtcgaacttcaggttgaagccgacctccttgttcttgcccacctccggacgcaggttcgggttgggcaggaagcagaacaggccgacggtgccatcgggacatgggaagaaggcaggtccgccaccggtcgcatgcgcgccggagatcaccgtctcggtgatcgacggagcacgatagccctcggcgtagctcacatagggctggaagcccggaaccggcgtcacgccgagggtaatcttcggcgagaagcggtcaccaccggcgtgcgtattgccggagtccaggtcatagcggtcgtagcggaccgcgctcaccgcttcgaaccagttgctgtagttctgcttcaactgcatgaaaccgccggacacggtacggatgccgctcggcgtggtgatgttggaatttccgcggctgtcggtcgtgatcacgtcgtcctgaaaggcatcgacaccccaagtgaccgcattgcgccagtcgcccacgttgaagcgcgtggtattgttgacgtcgatgccgtaggtgttgagcacatagccgcgcgtgtcgccgacacagcccgagatgttgttgccgaaatttccggcgccgcaataggccgcgcccgaggtcgagtagtgataggtcttggtctggtcgttgtcgacgcgattgccgtagagcgacatgtgccagtcgaacagattgtcgctgggcagcgaatagttccacgtaacagtgccggtgtagttcttcgtgtcggaagcatagactgacgagccctgatagagggcgcgctgtgccgccgttgcgaccgggccgcgattgaactggccgacatcgtactgaaagtcctggaagacggcgccgaacttcacctcatggccgagggcgggccgcacggtgagcttcatcaacccggattcgacctgattgccggtgttgccgatctcggtgccgttgccgtccttgtagttgccttgggtccgatagaccgcgccaccgaagatgtcgacgtccggcgttgcgcgcacgccgccgaacacggagcccaggccgcgattgttgtttgatccgtaagagcccgagagatcgacgccccagcgctcgccgggacgcagcacgtcattgatgtccttggtacggaacgagaccaagccgccgatcgcacccgagccatagatgttggcggtcgggccgcgcaccacatcgacgccgccgatcagttcaggatcgaggaagaaggagccgttggcattatggccggtgcgctggtagttctgccgcgcgccgtcgacgacgaccgcgacgcggccgaagtcctgcaagccgcggatgttgacgacggtcgcgggatcgtcaccgcgctcctggaacgacacgcctggcacggcatagaagatgcccgacagccggttcggctggatgccctgaatctggtcgagcgaaatcgagctgaccggcgccagcgcgtcgattgcgcgctccttggtcttggtcgcggcaaccgtgatggtgtcgagcacctgaacgggcgcagcggcgcccacctgagcgcgggcgttcatcacctcgggcgttgcctgctgcgccacttgcggcttgcgcttggcctgcttcggcctttccgacgacccgtcttccgctggccgagaggcagtctgcgcgagactgccctccgccatcaccgccgcaattgaaaccaccgacgcgccgaaaatcagggcgcgcgaatacctagccccgccagccatatcagccccagcctgcacttcactttagttttggagtctttggctggcgtgcgttcgcaacgcgaacgactggctggctgaaagccgcgggtaagttacccgctgccgcaactggtaacttggcaacactctgacggtcaatgacgtcgcgttgcagtttatatcgattgtaaattgccgccgttggaatgcgcctcgcgccgcttgtacaaagcagcacgcatctgaaaatttcgaaagcgcatcacagcacaatgtcagcaacatcgggagacagcagcggcgtcgcggcagggccggcgggaagcccttctgcgacaacgagaaccctcacgatgcgagggagccggatcgacagccgtgagctgtttgcggccgaacgcgagatcatcatcgcgcatggcgacgacagctatcgcctgcgcctcacgtcgcagaacaagctgatcctgacgaagtaaactgcaatggcattttgtcgcacccttgcaagcgtcgcactttcctgcacgttcgcgctcgtgtccggtgcgcatgccgccggtatcatcgtgcatgatgcgcgcaatcgcgacatcgccgtcaacgacttcgcgcgcacggtctcgatcggtggcgccatcaccgagatcctctatgcgctcggattggagaaccggctggtcggtgtcgacaccacgagcctctatccgccggcggcgctgcacgacaaaccgaacgtcggctacatgcgccagatctccgcggagggcgtgctggggctcaaccccacgctgatcctggcaatccagggatcgggcccgcgcgagaccatggagatcctggaggcggcaaaggtgcctctggtgctggtgcccgagactttctccgaggacggcctgatcgagaagatcaagctggtcggccatgccatgggcgtcgacgagcgagccgaatgcctgagcgccgcggtcgcggccgatcttgcgcaactccgcgcgctgcgcgccaaggtgacgaagccggtccgcgtgatgttcgtgatgtcgctccagaacgggcgggcgatggttgccggccacaagactgcggccgacgagattatccagctcgccggcgctgccaacgccgtcgacgattacgacggttacaagatcatcggcgacgaggccatcgtggccgcaaagcccgacgtcgtgctgtcgatcgagcgcggcaaggattcgctccaggccgaagcaatctatgcccatcccggattcgcactgacgccggttgcggccaacaagagcttcgtcagcatggacgggctctatctgctcggcttcgggccgcggacggcagccgcggcacgcgatctctcggtcaaactctacccggcgttggcagaccggggcaccttcacgtcggctctgtcagccgcgaactgccgccaatgagcgtggctgtcgggatcgcacaacggagcccgcgacgaagcggcggacggcggtctgcttcgttcgcgatctcccttctgctcgtggtgctgttgctcgccgcaatcgtcgcgctgacggtcggtgccgccggcatccccctctcccgcctgcctgccgcgctcgggattgccggcgagaacactgccatgaccgcccgcgaccagctcgtgctgtggtcgatccgcatcccccggatcgccgcgaccgcgatgatcggcggtctgctcgcggcggccggcgcgatcatgcaggggctgtttcgcaacccgcttgccgatccggccctggtcggcgtttccagcggcggcgcgctcgcggccgcaagcgcgatcgtcttcaccgattcgcgcttcggcgaggcggtgcgctttcttcagaccgagctgttgccgctcgcggccttcgcaggctcgctggcgaccaccgcaattctctacggcatctccagccgctcggggcggacctcgatcgcagtattcctgctcgccggcgtcgccatcaccgccatcgccaatgccggcatcggcctgctcgtcttcatcgccgacgatcgtcagctccgcgacatcacgttctggatgctcggctcgatgagcggcgcgacgtggaccaaggccgccgtgctcgcgccggtcctcgtcatcggactcgcagcttgcgccctcatcgcgcgcggtctcgatctgctggtgctcggcgaggccgacgcctttcacggcggggtcgacgtcgagcgtctgaagcggatctcgatcgtcatggtttccgccatgaccggcgttgccgtgtcgatcagcggcgtcatcggcttcgtcggcatcgtcgtgccgcacctgctccgcctcgtgatcgggccggcgcatcggctgctgctgccggcctcggtgctgctcggcgcggtcctcatggtcggcgccgacacgctggcgcgcaccatcgtggccccggccgagatgccgatcggtatcctgaccgcggccgtcggcgcgcccgtctttctcttcatcctgctgcgccagcgcgggctcaccgcgctatgaccgtcgtaatcgaggcgcgacacctgagcaagcgcgccggccgggcgacgctgctcgatggcgccagcctgacggtggcagagggtgaaatggtcgccatcatcggcccgaacggggccggcaagtcgacgctgctgcggctgctttccggcgatctccgcccgagcgcaggcgaggtgcgcctgatgcagcgcgacatcggcagcttcacgccgcgcgagcttgccgcgcgacgcgcgatgctctctcaacacatcaacgtcaccttcccgttcacggtcgaggaggtcgtgctgatgggagcaggcgagcgcagccttcgtgatgctgcgccgctcgtcgacgccgcactggacgaagtcggcctcgcacatttccgcgaacggcaattgccgacgctgtcgggcggcgagcagcagcgcgcccatttcgcccgcgtgctggtgcaactcgcctgcggcgaggccgagcatgggcctgggctgctgctgctggacgagccgacctcaagcctcgatctgcgtcaccagatcgacctcgtcgaagcggcgcgccgccgcgcagccgccggcaccgccgtgatcgcgatcctgcacgatctcaatctcgcgatccgcttcgccgaccgcctcgtcgtgctggccggcggcaagctcgccgccgacgggccgcgcgcggagattgtcacacgcgagaccatccgggatatcttcgagatcgatgccgtcgtgcatcaggacggcggcggagtgcctttcgtgctgccgcaatcgatgcgggcggcgcctcacctctccctccgggagaggtgaggacacaacgacctaacctgccggcacgatgaccacgctcttgtctttcggccagcggatgcgccaagcgaagttgatgtccttgatctcgccgggcttggcgtcgaacgaccattccagcacaccgcgcttgtcgcggatgttggttgcggtgggctgagtgctcgagggcagcatctcgaccacgatgtcctcgttctcgctgaccggcaactgatcctcgatcgccaccttgatcgggaagtcatggccattgcggatcgtggtcctgaacgagcgctcgtcggtcttcgacgtcgtcaccaggagacctgccgagccttcgtttcgcttgagcacggcccgctggattttgaccttctcgtcggcgccgaagccgaggcgcacgatgtcgtccctggcggacgccgtgatcttgccgcggccgacgaagatgccgtcgcggtagatcgcgaccttgccgggcagcagggtcgtgtcatcggtctgcttgaagctggcttcgaggaaggcggtcgggtcgagcaccggtgccgcgcgcactgcgagatcggcgggaacattcatcgaggcgatacggaggctcttggcgccctcggcggcgccgaggctgacgcggcccggaattttgaaggtggcctggaaatcgccgatctcggcgacggcctgttgctcgtcggcgcgctcgcgcgactcggccgcctcggcgatcttggccatcgacggcgattgcgcctggcgcgtcatcggagccggccgcgccagatcggacgccgtgccgagcgccagcggcttggggacttgcggatattgcgcaaccagcgagttcagctccggagcactgccgccgcggctgatgcggaccgtggagacgccaagtgtcacgttggaccagtcctcaccggtcgactgcgtgacctccgcacggcgcaccagttcgagctgcggcttacggtccttggctccggtgtcgagccgggcatcgtaaagcggcgtccagcgtgcgctgcgcaccgtgtaggtcacgcgcagcgtcgccttggtcggggcggccgaggcgacatcgattcgcacttccagcttgtttggcggcttggccgagcgctcggcctccagctgcgcgatctgacgatcgagttcgcgctgttttcgcgtggcctcgcggatggtggtgtccgcgatcgcgacctcctccccgaccgccgcaaaggcggcgcgccactcggtgatcggcctcgcctcgcccttgtcgccaagtccggcgggagaggtttcggcgaaatgctgcgcgaatttgcgtcgcgctgcggccgattcgattgcgccttgcaggtccgcgcgctggtccttcagcgcttcgatacgcttgtcgagttcgggcagattgaccggcggcgccgccttcggcggccgcgcatcgatcgtgccgatggtgagcttggcacccgcctcgccttcgacgcggagggacgacggatctagcgagagcggaaaatcccttacgaccagcgtcgagtcaccggagacgagatccaaggaaatgacgcgggtgacggtggccccgtcgggatagacggtgaccgtgtcgatcgccgaattggtatccacgttcgccgcccacgatccagatgcgacggcaaaggtcacgaggaccaagctcgtggttgccaaccattttgcggtgatgcgcataaagtccctcctgccagtaccaccgcgcttccagccgggcgcgcgcgatgaaatgcctcgccatcgtgattggacgcggcagggaaggaactggttcgattgaggcttcggtgggacgccgctaaggcggccccgtgaccgctgaacgctttgcccggcggccttcaaggccaggggcgagacgcggtgaaaccggctgaaatccccgcggcgtcggtagcatgggctcagcgtgccggcgacggcacgcccatgacggccagagcgcgccggggacgaccggccagcaacggaccgaaggcaatcgcgaagccaaggaacgcaacgatccagccgcaggcagcgatttgcagcagcgcatcgccgtgcgcaggccacatcacggcagcgacccgggtcagagccgcgatcacgatcgcagcatagattccctggattgccggcgaagccgtcaaggcctgtccggtatggccgaggctcgcgcgggtcatcaccgcgagcgtcatggttcccgccgcacccgccatccaggcgtggatgccggcgcttggcggcagctcaccgaaaccggcgatggcattgaggacaaagcccaacggcacgaaggaatagccgacatgcaggatcacgagcagccgctcgcgggaggtgcgatcaccggcccagcgcgcaagccgcaccacatgcagtccgccgacgagtgccatcaggatgcccgtgacggcattcaatggcgccacgatccacgtgatgagcgcgagcgcactgcatccgatcactgctccgtcgaagcgtccgaacggcacgggcaggcggccgggattgaacttgaccagccagttgcgggtgaagctcggaatgatgcggccgccgatcaacgcgatcaacagaacgaccacgctgatgccgacgcggatgctgacgtcggccgctcccgcgtaatgcgcttcgacatgaaaggcgatgttgcctgcgagcagagcgagcaccagccccactaccggcaggttgcgccaattgccgcccgcgatgatctcgcgcgtcgcggcggcgacgaccaatgcgaggaaggcggcatcgacgagcagcgcaaatgtccagcctgtattcgccgacaccgtcacaacgacacgcccggcgagccagaccgccagcagcacgcccaatggcgtaccctggatcggcagccgccctgtccagttcgggatggccgtgaacagaaatccggtgatcacggcgggcaggaagccataaagcatctcgtggatgtgccagtcgcgcggcgcgaatgcggaactcaccgacaattcgccatagaacatcggcagccaggccaggatcgacagcgctgcctggatggcggcaagcaggaaaaagggcctaaagctgttcgcaaacagcggccagcccgcaaaattgcgggatcgagcgccagccatgggtcaactccagtagattcagatcgttgattggaaaaataccgccatccggtcggcccgttttgcgctaacgcaaactacctgacggttgcaggtgccatcacactcccgagcgccaaggagacagaatggccaaggtcgacacatcgctggttgcgcatttgccgctgtttgccggagtgacgccggacgccctcgatgagatcctgcgtgaggcccgctcggcacgctatcccaagaacaccgccatcttcgagcagggcgccgacgcacagtccttcttcctgctgctgcacggccatgtccgtgcggccaagaccacgccgaccggcgagcagatcgtggtccgctatgtcgggcccggcgaaacgttcgggctcgcgatggcaatcggagccgcgcgttacccggcaacggcgatggcggtcgatgacagcgtggtgctgatctggccgacctcggcctggccgcgcctggtcgagcggtttccggcgctcgccgccaacacactccagaccgtcggtgcgcgcctgcaggaaagccacacccgcatcctggaaatgtcgaccaagcaggtcgagcaacgcgtcgcgcacgcgctgctccgtctcgccaagcaatccggcaagaaactcgaccatggcatcgagatcgactttccgatcagccgccaggacattgcgcagatgaccggcaccacgctgcacaccgtcagccgcatcctgagtggctgggagagccagggcctcgtcgaaagcgggcgtcagcgcatcatcctgcgcgagccgcacaagatcgtcgtgctggcggagcggagcgccgacagcggcgcggcctgagagccgaagcatcccctccccaagccttggtgaggggcgcttccgcgtacggcgaaagcgcttcctcatccgggaacccgcgcgcgcccgcacgaattccagaccggctcacgccggcacgcaatcgctcaatgcggcgaggaatttttcgcggtcgatgccatgctcgcggcaggcgtcatccacggtgtggaaggtcgcgatcggacagccgacacaagccatcctgaaggcgagaaacacgcgaatcgtgtgcggcgccgtttgcatgatgtcatcgaccagatcgtcaaatccgaaggacatggacaactccgttcccggctgacgatagcggcgtgggcggaagtctctttgttgaagcgcaagctggcttgtcattccggggtgcgcgaagcgcgaacccggaatgcaccgtgctgtggatgacgtggaacaatggactacgggctcgcaccaagggtgcgcagggaatgacgggcgagagaccctacaccgcgcggctatgcagctgctttcccggatccagatgcgcgtcgaatgcagcagcgacgctgcgcaccaggaagcgcgaatccttggcgacagcgagcctgtcgccgtccagcctcaccacgccgtcggagatcagcggcttcagacgcgccgccgatttcagcatcgcgcctggctccgcgccatggcgcgcgcagatgtcgccgagatcggcactgaactcgcacatgatgcgttcgatgatgtcggcgcgcaaccggtcgtcgtcggtgagcccgtagcccttcgcggtggcgaggcggccagcggcgatgctctgcgcataggcgccgatctgcacctcgttctggacatagccctgcggcagatgtccgatcgcgctcgcgccaaagccgagcagagtttcgctcgtgtcggtggtgtagccctgaaaatttcgccgcagcgtccgctgctcgtacgccaccgccatggaatcaccgggacgcgcgaaatgatcgagcccgatctgcacgtagccggcctccttcagcgcattcgcgatcgcgcaggcctggtcgtggcgcgcaaggccgtcgggcagcacggccgcgttgatcatgcgctggtgcttcttgaaatcaggcacgtgagcatagccgaacacagagaagcggtcgggcgcgagcgcgaggctgcgccgcaccgtatccagacacgaagctaccgtctggtgcggcaacccgtagatcaagtcgaaattgattccctcgatgccggcgcggcggagcatctcgaccacggcagccgtctgctcgaagctctgcacccggttgattgcccgctgcacgacgggatcgaagctctggacgcccaggctcgcacggttgacgcccgagagccgcatggcctcgaccatgtccgccgtcaaggtacgcggatcgatctcgaccgcgatttcggccgaaggcagcacgaagaatttctggcgcatcaccgccatcagttcggcgaaggcctccggtgccatgatcgtcggcgtgccgccgccgaaatgaatgtgctcgaccttgatgcgacggccgatggtctcggcggcaagcccgatctcgcgaagcagcgtccgctgatagccgacgatgagctcgtcacgacggacgatctgggtatgacagccgcagtaccagcacatctcccggcagaacggcacgtgcaggtaaagtgacgcgctggcccccgccggcagctccgccaaccaccgggcgtacgtctccggaccgatcgccgacgtaaagtgcggtgcggtcgggtagctcgtgtagcgcgggagacgttcctcgccgtagatcgccgcaagatcagctctcatatcttacccattcgtaaattcccgccgcgagcatagatcgcggcaaatcacggaatgagttcaattaacccggatgcgcggaagcgactttgcggtggcgcaaagcggaacggccggttcccggggatgattggggccattctgcgcagccatccggagcgtctgccatgaggctttttgcactcgaactcattctctccctgctcgacgtccgcggtcatatcccgcgtttcgacgacttccgtccggctccggccacaccggccactgccggcatcgtgcgcgcgctggccgccgcgattgccgtcttcgccgtgttgtcgctggcgatctggggaacggtctggcttgccgtgcagctcatctaataagttgcgctacgacggtcggtcgcatggaccacgcaccgcaacggtcgcaggccagtgtcggccgcctctgcgaagagacgacagccaacgtcatcgcctcgccggtcgggtcgaaatgcccaccccacttgaagatgcgaacgagtcgccgctgagcacagacgcggtggcggtcacgcccggcaatcctgcacaccgcatggcaactggtaaccgcgacgcccgaggcgtcggcaacgatcagtcgcatgtcagcatgtcagaatgtcgacaccgctgtccggctgctgtttgctgagcctcgacgtccgcatcacggcgccggaatcgatcaacgcggtatcggcgatactacttcaccgcgacgcctaagtaccgttgcggaggtgaatcacggcgaaagcttgtcgcagcgcaaacacgcttgccgcgatcggcgcacactgcatccgtcatcaaatcttttcacatgaaggatgcttccgatgttcacccgcagagccgcattgatcagcgccgccgccaccgccctgatgttggcggccccggctttcgccgcaagcgatctcaagttgccgcgccagaaggtcgagctggtcgctccgccgttcgtgcacgcgcacgagcaggccacgacgcagggtcccaagatcgtcgagttcaagatgacggtcgaggagaagaaggtcgtcatcgacgagaagggcaccaccttccaggccatgacgttcaacggctcgatgccgggaccgctgatggtcgtgcacgagggtgactacgtcgagctgacgctggtcaatcccgcgaccaacagcatgccgcacaacatcgacttccattccgcgaccggagcgctcggtggcggcgagctcacgctcatcaatcccggcgagcaggtcgtgctgcgctggaaggcgaccaagaccggcgtgttcgtctatcactgcgcaccgggcggcccgatgatcccctggcacgtcgtctccggcatgaacggtgccgtgatggtgctgccgcgcgacgggctgaacgacggcaagggccgagcgctgaaatacgacaaggtctactatatcggcgagcaggacatgtacgtgccgcgcgacgagaagggcaatttcaagtcctacgactcgccgggcgaagccttcaccgagaccgaagaggtgatgaagaagctgatcccgacccatgtcgtgttcaacggcaaggttggcgcgctcaccggcaagaatgcgctcaccgccaaggtcggcgagaacgtgctgatcgtgcattcgcaggccaatcgcgacagccgtccgcatctgatcggcggccatggcgattatgtctgggagaccggcaagttcggcaatgcacccgaggtcgggctcgagacctggttcatccgcggcggttcggcgggagctgcgctgtacaagttccagcagcccggcatctacgcctatgtcacgcataatctgatcgaggcggccgatctcggcgccaccgcgcacttcaaggtcgaaggcaagtggaacgacgatctgatgacccaggtgaaggcgccggcggagatcccgccgcagacacaaggcgccctgcagaccggtcgcaagatcaactgaccaggcgagaggggccggcagacagccggcccctctttcggaggaccatcatgctgatcgcattcaagctgaagctggtgcttgcctgcgcggccgggcttgcagggccgctcgccgttgcgcctctcatgtcggagatgaagacacacgccgcgcaagaagagccggcgattgtcgaggtcgccgcgggcagcttcctgtatcgcgaggccggcgacttcacgcgcggcgggcagcaggcagaagcgccgctgcgcacactccggttcgaccggccgctgcacatcatgcgcgagcaggtctcgtccgccgactttcagctctgcgtgcgggatggcgcatgccgcgctttgggccgcgacgtcgtcatcgcgccggatcgtcctgcggtccaggtgaactggtatgacgccgaagcctatgcgggctggttgtcgcgcaagaccggcaagcattatcgacttcccagcgacgaggaatgggcattcggcgccggcagccgcttcaaggacgacggcgtgccggtcgatgcaagcgatccgtcaaagcgctggatcagccgctacgagcgcgagtccgagcgcgacgcttccgacaccgccgcccatccgttcggcaagttcggcctgaacgagcacggcctcgaaggcgtctccggcaacgtctgggaatggacgtcgacctgcttcgtgcgctcgcgcgtcgacgaggccggcaacgcgatccgcccgaccgtgaactgcggggttcgtgtcgccgagggcgcccaccgcgcctatgtcaccgacttcgttcgcgatgcccgcgccggcggctgcgcccagggcgtgccgcccgccaatctcggcttccgcctggtccgcgagcagacgtcgtggctggtcagcgtgtcgaagcgcctgagcaaggcgtggccggcaagatcatagctgcccgccgtttccccacgatagtcgccgcctcttagaacgagtctaaactattattggaatcactctaagtcatgtctcttcgcgacatcgcgtcgctgactttgccgcactgtctgcgctactcagtgaggcgttcaattgcccgcctgggagcccttatgatcaatcttcgtgtcctcgccgcgtccgcggcggtgctgagcctgacctcggccttcgtgtcgaaagcagccgccgacaatggcgcggtcaacgtctatacctatcgcgagaccaagctgatccagccgctgttcgatgccttcagcaaggatacgggcatcaaggtcaatgtcgtctccgcaagctccggtctggagcagcgcatgaaggcggaaggcgccaacagtccggccgacgtgctgctgacggtggatatcggccgcatcgacgaggccgtccaggccggcgtcacccagccgatcaagtcggaagtggtcgataaggtcgtgccggcgcagtatcgtgatccggacggacactgggccggcatctccatgcgcgcgcgcgtgatctatgcctcgaaggatcgcgtcaagcaggacaagatcacctatgaggagcttgccgaccccaagtggaagggcaagatctgcatccgctcgggccagcacatctacaacaacgcgctgttcgcggcctacacggcaaagcacggcgaggccaagaccgaggaatggctgcggggcgtgaaagccaatctcgcgcaaaagccgtcgggcggcgatcgtgaagccgcgcgtgacgtcgccgcaggcaagtgcgatatcggcatcggcaacacctattactgggcgctgatgatgaacaacgatcccgagaagaagccgtgggcggaagcgacgcgcgtcattctgccgaccttcgaaggcggcggcacccacgtcaacctctcgggcgtgctgctcgccaagcacgcgcccaacaaggccaacgccatcaagctgatcgagtggctcgtcagcgagcaggcgcagcagatgtatgccgaccagaactacgaatatccggtccgcgccggcgtcgccgtcaactccaccatcgcgggctacggcaagctcggccccgatccgttgccgatcgcaaagatcgccgccaaccgcaaggctgcggcctcgctggtggacaaggtcggctttgacaactgatctctggcagccctcgtctgtcaaactggtagaagcaacgagcacacggcctcgctcgagaggccgtgtgcacgccgcaaccgcaaccgccatcgcagtcgcagccgcgatcctggtcgcggcgcccgtgatctcgatcgtttcgctggctttgcagccggcgtccgatgtgtggcacgacctgatcaactacgtgttgccggccgccctcctcgacactgcccttctgctcatcggggtcggcgcgctcacacttctgatcggcgccggcactgcgtgggtgatgtcgcgccacgattttcccggccggggcatgctcctgtggctgatgccgctgccgctggcgattccgacgtatcttgcggcgtacgtctatgccgatctgttcgagccgctcggcctggtgcatcgcaccctggcgatctggctgccgctgggcgatgcgctcggccttctgcccaacctccgctcgctgccgggcgccatcttcgtgatcgggctcgtgctctacccttacgtctatctctcggcgcgtgcgacgttccaggttcagtcagccgaattcgcggaagcggcgacgacgctcggcgccggccgatggaccatcttgtggcgcgtttcactgcccatggcgcggccggcgctggcggtcggcgtggcgctggtcgcgctggaaacgctcaacgacatcggcgcgagcgaatatctcggcatccgcaccctgacggtctcgatcttcaccacctggctcaaccgcggcagccttgccggtgctgcgcaactcgcctgcctgatgcttgcgatcgtcgccggcctgatcgcgatggagcgctacggccgccgcaacgccaacatcgaattctcggccgaaagcccccatgtgaggcagcggaccccgctttcgggcgcaagagcgtggactgcgttcgcggtctgcctgctgccggcgctgatcggcttcatcgtgccgctgctctatctggcgcatcaggctcttggccgcggactgcttgcaaatttcgatccgctcctgtggcgccacaccttccattcgtttgcctttgcagcgctcgcgacggccatggcgctgatacttgcgctcgccacgaccattgcgcaccgctttcggccggatcctctgcgatatgtggcgatgagcatcgcgcagaccggatacgcgctgccgggcctcgtgattgccctcggcctgctgacccccgtactcgcggtcgataacgcgctgagcgcggtcgccacctggaccggattttcgctgcccgggctgttgctggtcggctcggggacggccgtcgtcatcgcctatacgatccgttttctggccgtcccggtcggcatgatcaaggccgggttcgacagcattccgcgcgactatgacgagagcgcgcgcacggtcggcgcaggccaggcggtcatgttgagacagatctatctgccgctgctccggcccgcgatgctcggcgccatcatcatcatgttcgtcgactgcctgaaggagctgccggcaacgctgctcttgcggcccctcaacgtcgaaacgctgtcgacgtcgatctaccagttcgcaagccgaggcaatttcgaggacggcgcgctggcggccctcctgatcatcgcggccagcatcggcccggttgcctggctgacccggttctccgaagtgccgagcggccccgcttgaaggcatggggacattgtcattcgtggcgcctcgacccgttaagtggtcatcgcccaacctgatggcgcgatacggcacttcggggagttcgtgattgatcgaacggccgccacggccggccttcacgggatggctgcactgaatcagaatcgtgaggacgcgcagacagtttgtgaatgcgcgacccagcgttttccgcttacgtgttcttcagcgcgacgcggaattcggcttcggtcttggccttgacctcgtcgagcgaaacgccgtcggcgagctcgatcagcgccatgccgccgctgccgtgcttgtcgatggtgaagacggcgagatcggtcacgaccatgtcgaccacgcgctcgcccgtcagcggcaggttgcactgcttcagcagcttcggaccgtccttggccgaatgttccatcaccacgatgacgcgcttgacgccggcgacgagatccatcgcgccacccatgcccttgaccatcttgccagggatcatccaattggcgagatcgccgttctgggccacctgcatcgcgccaaggatggagagatccatgtggccgccgcggatcatgccgaaggaatcggcgctggagaaataggaagtcgagggcagctcgctgacggtctgcttgcccgcgttgatcagatcaggatcctcttcgccctcataggggaatggacccatgccgagcatgccgttctcgctctgcaaggaaacgtccatgccgtcgggaatgtagttcgagaccagcgtcgggatgccgatgccgagattgacgtagtagccatcgcgcaattcctttgcggcgcgcgcggccatctgttcacgggtccaggccatcagatttcaactccagtgccagccgccggcgccgtcgtcggacgcgggcgcgtgttgcggaattcgatgcgcttcttggccgtaccgacctcgacgatgcgcttcacgaagatgcccggcgtgtgaatgtggtcgggattgagttcgccggccggaaccagatgctcgacctcggccacggtgatcttcgcggccgtcgccatcatcgggttaaagttgcgcgcggtcttgcggtagatgaggttgccggcggtgtcgcccttccaggcgtgcacgatggcaaggtcggcgaacaggccgcgctccatcaggtacttctcgccgtcgaattccttcacttccttgccttcggcgatcagcgtgcctacgccggtcttggtgtagaaagccgggatgccggcgccgcctgcgcggatgcgctcggccagcgtgccctgcggattgaattcgagttccagctcgccggccaggaattgctgggcgaacagcttgttctcgcccacgtaggacgagatcatcttcttgatctggcgggtttcgagaaggcggctgaggccgatgccgtcgactccggcattgttggagaccaccgtcaggcccttgacaccggattcgcggatcgcgtccgacagctcctcggcaatgccgcagaggccgaaaccgcccgacatgatcatcatgttgtctttgagaatgccctcaagagccgacttggcgtcgggatagaccttgttcatgcaaaaaacctcgactgaaccttcggctcgcaggcctcgcgcctaattggcggcgattattaggcgaaatcgtccgaagccgtcaatgatacggggttctccgcttcgcccctgggtgatagaagctgcccgcgtcgtgggcatagccgtgccgcggccttgaaagcgtcaagaaaacccatcaagttgcgggggttgggtgtgggcgcgcaggttcaccggccagcccttctaacgccagcgaccaacccgatcaggacatgccattgaccatggcccaaggaatgaagcgcctggggacgccgatcgcggcgctgctcggcatggcgctgatcgccctgatcgcgacctcctggctcatcaaccgcgacgcgctgcgcaaggcggtcgaagcgcagatccgcaacgtcaccgggctggagctcagcgtcgcaggcaccatcgacatctcggtgcttccggcaagctacatctccttccgtgacgtcggtctcaagggcggcggcaccagcacgccggcgcttcaggtcgacgtgctcaccgcaaacctgcggctgttgccgctattgctgcagcggttcgagatcgccgacctgacgctgttgcggccgcgcatccatgtcagcctcaagccggacggcgagagcaactggacgcccttcatccagaccatcgcgcgcaccatgaagcccggcgcggagaatcaggtctcgttctccgaaatccggattcaggacggcgtgctcgattacgtggacgtcgccacgcaagccaccgacaagctcgaggacatcgacctttcgttggcctggccctcgatctcgcgctcctttgctgcgaccgggcagttcgactggcgcggcgagcgcgtcgacggctcgatcagcttttccgatttcgtcgccgccctttccggcgaccggtccggcctgaaggcgcggatcgccagcccgccgctcaagctcgcctttgacggcagcgtcgccaatcgcaccagcccgatgatggaaggcacgctcaccgtcgacagcccttccctgcgcaacgcgctgcgctggaccggacagccgcaacccggcagcggcggcttcggccggttcgcgctgaaggcgcgcgccaatgtggtcggcccctcgatcgcgctcaccaacgtcaacgtcgagctcgacggcaatgccgccgagggcgtcatgacctacgccaataacggccggcagacgctgcaggcgacgctcgccgccgacgcgctcgacttcacgccttatatctccacgttccgcctgctcgcgagcggcgcacgcgactggaacaggcagctattcgatctcaacgggctctcgaccaccgacctcgacatgcgcctgtccgcggcaaagctgacggtcggaccgacgaagctcggccgcaccgcgatcggcgcgaatttgcgcaatggcacattggcgctctcggtcggcgaggcccaggtctatggcgggatcgccaaaggctcgttcggcatcgcgcggtccgatacggtcgccgacatcaaggcgcaattccagttcaccgacgtcgacctccaggcttgcgccaccgaactgttcggcctcaacaagctgtccggccgcgggaacatcaacgtctcgctcctcgcctccggctcgagcccattcggcctcgtgcagtcgctcgacggcagcgctaccatcaccggacatgatggcgcgatcgcgggcttcaacgccgaacagctcctgaagcggctggaacggcggcctctgtcgggcggcggcaatttccgcaacggctcgacgccttataacaatctcaccatcgcggtgaaattttccgacggtatcgccaccgccgaggacatccgcgtggaagggccggcgaccaggatcacgctcaccggcaccgcatcggtgccgacgcgcgaatacgacatgaagggcgtggccagcctcaacagcgcgtcggggttcgaactgcccttcgttgtgcagggtccttgggacgatccgctgattttccccgatccggaaagcctgatccgccgctcgccagcctccgcgccgctgctcgacatgctgaaggagcgcaaggcgggagacgccgtgcgctccgcaatcgagcgcatcaccggcagcggaaagcgccccgcgccagcggaatcgccaacggccgagaattccaaagagaacgccaagtccaactaggctgacgcaggtgagtttcaactgaagcggagcctctccggcgtcggccggacatcgcgagttgatctggccgaattgatgcggcgattggatcgatgcgcgcgtcaagcaactgccctggcccgacacctcaagatctgggtctgacaagatgcgttgattgcgctaccatcctacgctagtgttttatacgaccggttaaaaacaccggccgtttgagggagaaaaacgtgagatccagggttattggcgcagtatcattggcggtcgctgcggtcgggctttttgccgccaccgcacccgcctttgcgcagcagaagacgatcacggtctggtggggcaagggtttctatcggtccgaagacgacgcgctgatcgaaacgatcaaaaagttcgaagccaagaccggaatcaaggtggaactgtcacagtacgcgatccaggacatgattccgaagacggtcgctgcgctcgacgccggtaccgtgcccgatgtcgcctattccgactcctatgacgttcaggcgcagggcaagtgggcctacgagggcaagctcgaggacctcacggacatcatggagccgatcaagggccggttcgtgcagaacacgctggacgcgtcgatcctctacaacgacgtcgccaagaagaaggcctattacggcttcccgctgaagcagcagagcatgcacgtccagatctggaacgacatgctggagaaggccggcttcaagcagagcgacatcccgaacgactgggcgggctactggacgttctggtgcgacaaggtgcagccggcgatccgcaaggccacgggccagcgcgtctacgccgtcggccagccgatgggcgtggaatccaccgactccttccagtcgttctacaccttcatggacgcctatcacgtcaagctggtcgacgacgacggcaagctgctggtcgacgacccgaaggtccgcgacggcctgatcaaggcgatgaaggactataccgacacctacatcaagggctgcacgccgccgtcctcgaccacatggaaggacccggacaacaacgtcgcgttccacaacaagaccatcgtgatgacccacaacttcacgatctccatcgcggctaaatggttcgaggactcgcagaaccaggcccttacccaggaacagcgcgacgccggcaagaaggcctatgagcaggacatcatcacggcgtccttcccgaaggcgcccgatggttcgaccatcaagtaccgctccgacgtcaagaccggactggtgttcaccgcggccaagaacaaggccgaggccaagcagttcatcagcttcctgctccaggaagagaacgtccgtccgtacatcgaaggcgcgctcggccgctggttcccggtgaccaaggaaagccaggaaagcccgttctggcaggccgacaagcaccgcaaggccgtctacgcgcagttcaagggcggcaccgcggcgttcgacttcaccaagaactggaagttcacgatcctcaacaatgagaacgtgtgggcgaaggcgatgaaccgcgtcgtcagcgagaaggttccggtcgacaaggcggtcgacgaactgattgcccgcatcaagcaggtcgcgggttaagtcgcccgcccctttccccgcatcacggagagagggtgcaagaacaacaccggccgcgtctcgcggccggcttctctttgaagagtccgaaagaatggcgatcacgctctccggcgatcaggcaatgcccggcccgcccttgtcgtcgcggctgaccccggcgcaggtttggggcatcatccttctcgcgccctatctgctcgtcttccttgctttcgtcgtctatcccgtctgctacgggttgtggctggcgcgggccccttcgaattatgtggcgctctacaacgatccgatcttcgcgcgcgccgcggtcaacacgctgatcttcctggtcatcggcatcaacatcaagatgttgatcgcactgttcctgtccggcttcttcgcccagcagcgcacctggatcaaatggctctcggtgatcttcatcctgccctgggcggtgccgtcgatcccgaccatcctgtcggtgcgcttcatgctcaatcccgaatggggcatgatcaaccactacatcttctccttgaccggcgatgacggcccgaactggctgaacgatccgaccgtggcgctgaccatggcaatcgccgtgcatatctggaagtcgctgccgttctggacgctgatcctgatcaccggccggctcgcgatctcgcacgatctgttcgaggccgccgaggtggatggcgcgagctggtggcagaaattccgctatatcacctggccctcgatgcagacgctctacatcacctgcacgctgctctcgatgatctggacgctaggggatttcaacagcgtctatctgctcaccggcgggggacctgccgacctcacgcacgtgctggcgacgctcggcatccggtatctcaggctcgaccagctctcgctggcaatggcgtccatcgtctgcgcgatgccgttcgtcctgccgctcgtgtacttcatgatgaaacggttgtcgcgatgaagctccccggcgtaagcgaattttcctggcgcgacgtcgcgaccgaagcgcggctgctgctgatcggaattcccgtcttcctgtggacgatgatcccgatctatcacatgttcctgttcgcgatctccccgaaggaggatgcgttctcgggcaagctgtggccggatcacccgacgctgcacaatttccagatcgtgttcaagcagcagcactacttcctgcgcgacttctacatccagttctggaattcgacggtgatcgccgtctccgtcggcgtgctgacgctggtgatcgcgacctcggcggcgttcgcgatctcgcgattgaaggtgccgggcggacgcaccgtgctgaaccttgcgctcttcacctatttcatccccgcggcgttcctcgccgtcccgatgtaccgcaccatgggcaattacggcctgctcaacaatcactggtcgctgatcctggcgatggtgacgatcgcgagcccctatgcgatctgggtgctgaaacaggcgtccgacaagctgccggtcgagcttgacgaggccgccgtgatggacggcgcgacgacgctgcagatcttccgcctggtctatttgccgctgatgatgccctcgctggtcgcgatcggcacctacgcggtgctgctggcgtggaacgagtacctctatgcgttcctgctgctctcgaacgaccgcgagatcaccctccccgtcgcgctcggcaactttctcgccgccgacgattcgccgtgggagctgctcatgaccaccggcttcatttacgcgctgccgccggccgcggtctactacgccttccgccgctacatggtgggcggcctcacggcaggcgcggtgaagtcgtaggcatccttcgccattgcgagcgcagcgaggcaaatccaggccagctcggcagagacagactggattgcttcgtcgcaagagcttccccgcaatgaccgcagcgcctacagcggcgccgcgctctcgccacgcgaactcgacaatttggaagcgagcgaagccaacacgatcaccaccgcgatcagggcgatcgccagcgtgcagatcgcgttgatctcgggcttcacccccagccgcacctccgaatagatccggatcggcaaggtggccgagcccggccccgtggtgaagctcgcgatcacgagatcatccagcgacagcgtgaacgccagcatccagccggcgacgatggcgggcgcgatcagcggcagcgtcacggataggaccgcgcgcaccgggtcgcagccgaggtccatcgccgcctcctccagcgagcgatcgagcgagccgaggcgggactgcacgaccacggtgacgaagcacatcgtcaacgtggtatgggcgatcgtcacggtccagaagccgcgctcggcgttcagcgcgacgaacagcagcagcagcgaaagtccggtgatcacctccggcatcaccagcggcgcgtagagcattccggagaacagcgtgcggccgcggaagcgctcgccgcgcgacagcgcgacggcagcgagcgtgccgagtagtgtggcaatcgtcgctgaggagaccgcgacccgcaggctcatccacgccgcctcgatcatcgcgcgatcattgaagaactcgtgataccagcgcagcgaccagccgccccacaccgtcaccagacgcgagtcgttgaaggaatagatgacgaggatgaggatcggcagatagaggaatgccagacccaacgccagcgaggcgatgttgaagcgggagagacgaggggccttgcgcatcgcctcagcgcccctgttcgagctgctgcttctgcagccgctcgtacagcaacagcggcaccagcagcatcaccagcaacacgatcgcggcagcagaggcgaccggccagtccttgttggtgaagaattcgagccaaagggtctgaccgatcatcagcgcgttggagccggcgaggagatccgggatgacgaattcgccgacgatggggatgacgcatagcagcacgccggctccgacaccgggcagcgacagcgggaaggtgacaagccagaacacctgccagggcggcgcgccgagatcggcggctgcctcctccagcgccggctccatcttggcgagcgtggcgtagagcggcaggatcatgaacggcagataggaatagacgatgccgatatacatcgcggtatcggtggagagccacaccacgggctgactgaccagatgcaatgccagcaggatctggttgagcaggccgtcgtgctggaggatgttgatccaggcatagatgcggatcaggaacgaggtccagaacggcacgatcaccagcaccatcgccacggcctgccagcgcttcggcaatcgcgccatgccataggcgatgggatagccgatcagcagcaacgctgcggtcgcaatgatggcgacggtgaggctgcgcacataggcgaacacgtagatgtcgtcggagatgagcagcttgaaattgtcgatcgaaagtgcggcaaaggcgctggtgagcgcgtcccatcctgccgtcaggtcgaaaaccggctcgtagggcggctgcgcaatcgccgtctgcgacaggctgatcttcagcacgaaggcgaacggcaccaggaagaacagcaccatccagacgtacggcgcaattgcggcaaagcgcgccggccgcgcgaagatgcgacgcgagctcatgaggtcagcaccatgcaatcgtcggggccgaaccaggcgacgacatgctggttcaggctgtaggcatcgacgtcgaggcgcgcgttgttggcaacggaagcctgcagcaccccgccgctgtcgagcttcaccttgtaggtggtggtgccgccgagatagcagatgtcggcaatgacgccgtcaagccggttgatcgccaattgatgaccggcctcgctcgcggggccccggcgcgagagcttgaccttctcggggcggatcgcgaccgccaattttcccgcgccgaccggctcgcgcggctcggcgaccaccagcgcacccgcatcacgcgtgccaatcaccaggcgatgaccgtcgcgcaatttcgactcgccgtcgaacaggttgatgtcgccgacgaactccgcgatccagcgcgagcgcggcacctcgtagagttcgcggggtttcgcgacctggacgagcttgccggccttcatcacgccgatccggctcgccatcgtcatcgcctcctcctggtcgtgcgtgacgacgatgaaggtcatgccgagccgccgctgcagctccatcagctcggcttgcgtgttctcccgcagcttcttgtcgagcgccgcgagcggctcgtcgagcagcaggagctgcggccggcgcgccagggcgcgggcgagcgccacgcgctggcgctgaccgccggagagctggtcgggcttgcgcttctcgagcccctcgagcttcaccagcgcgaccatctcggcgacgcgggtcgcgatgtcggcgcgcgccatgccggcgcgcttcaggccgaaggcgatgttgtcgcgcaccgacagatgcgggaacaacgcatagttctggaacatcatgttgaccgggcgttcgtgcggcagcgcctgtgcgatgtccttgcccccgagaaggatgcgcccctcgtccggcgtctcgaacccggcgagcatacggagcagcgtggtcttgccgcatccgctcggaccgagcagcgcgaagaactcgccggccttgatgtcgagcgagacaccatcgacggcgcggaacgtgccgaacgtcttggccacgccctcgatgcgcagcagcccttgctccgccgcgggaaatgcatccgcgccagccgcttcagccgcaatgttcgttccggacaactcttccgccataatccctgccaaccccgattccgccgcacgctagcggccgatcgcgatttgctcaaccggttcgggatgaatcgttccccgccatgaatgcggccagcgcgtcacggtctgccgcggtcattgtcaggccgagcttggaacgacgccacagaatgtcctcagggaagcgcgcccattcgcgggtcatgagatagcgcacctcggcgccggtcagttcagggccgaagttcggccccagttcgtcgcgtgtccttgcctcgcccagcaccgccgacaatcgcgagccataggcggcaacgaggcgctgggcctgcggctccgacagaaagcgccagcggtcacgggcgaactcgacctcggtgtcgaagcgatcccaggcgaaatctccgcccggtagcgcagcgccggcggtccagggcggggacatcggatagaatggcgtcagcctggtcaccgcctcctccgcccgcaagcgcgaagtggtgacgtcgccgccgaacatcgtgagcagcggcgccttgcgccggcgcgcgtggaacagcgtcgtgccgtcacctcggctcgcggacaccggcctcatgttgacgcccgaaaccgtccgaaccacgtcggccggggcgatgtgcgcgcggaagtagcggctggcggcttcgcagagatagccgatttcggcccgggacaccgcaacgattgcgggatcgccggtgaaatcatgcgtgaccgtaccgatcagcgtgaactcccgctcgtacgagcttgcgaagatcagtcggccatcaccgttctggaagacgtagacgttgtctgaatcgaacagcctgggcacgatgatctggctcatctgcatggccgtcgcggcgggctgcggctggcgcaggaccatctccgcgaccatcgacgtccagccgccggtggtgttggccagcgcccgggtcgtgatggtgcggcgatgtccgcgatcgaccacggcgagccgccagatgtcggcacaatcggcacgcacgcagcgcgctccggcccggatcgtcgcgccacgctcggcggcgtccagcgccgtgagcacgacaaggcgggaatcgtcgacgacgcagtccgaatattcgaaggccgtgccaaatgggcgcttcagcgcgttgccgaccggatgatgcgtgatgtcgagggtcgccgatccgggcaggccgccccggccggcgaggctgtcatagaggaacaggccggcgcgcagcagccaaggcggacgctggtccgaatgcgcaggtatgacgaaacgcatcggccggaccagatgcggcgcgattcggagccaggtccgccgctcggccagcgcccggtgcacccgccagaagccgcgccgctccagcaccgagaggtcgccgtggatcagccgcggtgttgccgacgatgccgcgccgccgagatcgccttgctcgaacaggataacccgcaggccgcggccggccgcatcgcgcgcgaggccgacaccgttcaggccgccgccgatgatcgcgagatcgtagtctgccatgaagccgtcaaatgggagcgaagcgcagcgctctcatcactagagccatttccgttgcgatgaaatcggaacaaggcttatttcagacgagtcttcttgacgcgaaccgggatccactccgctcgaaagcgctctagccggtcttgagcgcgagctccaccgcgtcggcgcgaccgacgagcccggcatattttccgatcggcagcggtttgccgagcagatagccctgcacgccgtcgcagccctccctggcgaggaaggcgagctgatcgacggtctcgacgccttcggcgatgatcgacatgtcgaggccgtggccgagatcgatcacggcgcgcacgatcgccgccgattgcgggttgcggccgagattgatgatgaaggcgcggtcgatcttgattttgtcgaacgggaacgcctgaaggtagctcagcgacgagtagccgctgccgaaatcgtccatggagatgcgtacgccaagcgccttcaggcggcgcagcagcgcgaggcctcgatcgaaatcctcgatcagcaccccctcggtgatctcgagctcgagccggccgggcgcaagtccggtctcgagcaggatcgaatggacgaggccaaccacgtcaccgtgcatgaactgcgccggggacaaattaaccgcgacctggagcggcttcggccaggacgccgcctcgcggcaggcctcgcgcaggatccattcgcccatctcgacgatgaggccgctctcctcggcgatcgggatgaattcggcgggcgaaacctggccgcgcaccgggtgctgccagcgtgccagcgcctcgaagcccatgatctcgctctcgccgacgctgtggcccgcggccccctgcggctggaaggcgagcgagagctcgccgttcttgactgccatcgagaggtcctggtgcagcacgcggcgatcacggatctgctggtccatctccggctggtagagactgatcgtgccgcgcgacttctgcttggcgcggaacagcgccgcgccggcgttggcgagcagcgaggcgccatcggtgccgttgtgcgggaagaccgagatgccggtggtgatgccggcgcggaccggccggccgtcgatttggaagtccttggcgacggcttcgccaatctgctgcgccagtgcgaggcccgcctcgggctgcttgccgtcgatgatcaggccgaactcgtcgcctgacaggcgcgccaccaggccgccgcgcgcggagtcctcgagccgccgggcgacctcgatcaggagcttgtcgccgagcgcatggccgaagacgtcgttgacctccttgaggccatcgaggtcgacgcagaggacggcgaactcctcgccggtaccctcgcaggcctcgatcatctgcatcagcgcctgcaggaaggcggcacgattcggcagatcggtgaggccgtcgtgataggccatgtgcgccatgcgcgactcggtctgccggcggtcggtgacgtcctcgtgggtcttgatcagatattgcggctcgcctgcatcgctgagcacggtggcgcggcgggtcaggaacaggcgcaggccgtccttggtcgagatcggatgctcctcggtgatcatcccgcgcttcttgatcgcggcctcgtcgcgcgcgatgatcagcttggcttccttcgcattgaaaatgtcggacgccgtcaggccggttgcttcctcgcgcctgcggttgaggatcgtctccgcgctgcggttggcgagcagatagcggccatccttgacctgttccacgatcagcgcaaccgggatgttgtccaccacgagttcgaggaacttcttggtgctctccagttcctgagagagcgatcggcggtcggtgatgtcctcaaacaccagcagcaggaatcccggcctgttgccttcgttgcgaaccgcgatccggatggaggcgaccatgcgccgctccccgccccgctcgacctcgaactcgttgcggaactgcccgtccggcgagttgagcgccgcccggtcggccgcatcgatgctgtccgccgagaccggcgcgaacagctcgcgcgccttcttgccgacgacgtggtcccgtgaaaaaccccagaaccgctcataggcggtattggcgaagatgtagcggccgtcctcgatgttcttggctgccacgcaagccggcacatggtccagcaccgattccaggaactgcgtggtagaggcgagctgccgggatagcttgcgctgttcactgacgtcgagatgcgtcgccacggagccgccgttcggcagcacgaagaacttcaccaggatggcgcgcccgtccggcagttcggtgatcaagccgttggcgctggctgccttctcgtagaactcgtcgtcggaggcggcatccagcaccccgcgcctgcgacgcagttcgagcaggtcgtggccgttcatgttaggccggatatcggaccgcgtcagaccgtagatctcgagatagcggtcgttgcagaaaatgatgcggcgctgcgcatccgtcatcaccacgccctggttgagattgttcatggcggaggagatgaaggcgttgcgccgcagctgcagacgcctgctccggcgcagcgaggaaaggatccacagcccgatcgcggcgagaaacgagcacacgacgatggctgcgatcagcgcttcccagatcacgttgggctcgagcttggcgaaatcgctcggagcgggaaagctgtcggatagcgcaaaggcacgtgcaggtgcgaccgcgccggccaggcaagtaagggcctgcacagcaatcggaagcgtgctgcccacctgccagttcttctcagccatcagccacccgcgatttcaacgtcggattgtctggcctcgcgggtttggatcgggtaaacgcctgtacccgcaacagaaaaatgtgacgtgcgatacggcaattgccctgacatgataaatgctttcttaacggaaaatccccccgcgcggccgttccgggacctgatgccgccggcggctccagcggagatcatgcacaaccatggatagggtggactgtgtcgtcgtcggagccggcgtggtcggtctcgcggtggctcgaaagctcgcccagtccgggcgcgaggtgatcgtgctcgaggaagccgaggccatcggcaccatcacctcctcgcgcaacagtgaggtgatccatgccggcatctactaccgcgccgggagctggatggcgcgcatgtgcgtcgcgggcaagcacgcgctctaccgctactgcgccgagcgcggcatcccgcacagaaattgcggcaagctgattgtcgcgaccagccaaaaggaaaccgagaagctccaatcgatcaaggcgcatgccgaagccaacggtgtgctcgacatgcaactgctcacgggcgaggtcgcacgcgcgctggagccggcgctcgcctgcgacgctgcgctgctgtcgccgtcgaccggcatcatcgacagccacgcctacatgctctcgctgcgtggcgaagccgaggacgccggcgcggccttcgcgtttcacacgccgctgatccgcgccaaggctgccggcggcatcatcgaaatcgaggccggcggcgatgcgccgatgacgctccaatgcgaccttctcgtcaacgccgcaggactctcggcgacaacggtcgcacgcaacatcgacggcatgccgatggaccggatcccgccggcctatcttgccaagggaaactacttcagctgcaacgccaaggcgccgttctcgcgcctgatctatccggtgcccgaacccggcgggttaggggtgcacctgacgctggacatggccggccaggcgcgcttcgggcccgacgtcgaatggatcgaaacgatcaattacgaggtcgatccgtcccgcgccgagcgcttctatccggcgatccgcaagtactggcctactctgcccgatggggcgctgatgccgagctattcagggatccgaccaaagatcgtgccgcccgctgtggccagccaggacttcttgatgcagggcccgcccgatcacggtgtcgcaggcctgatcaatctgttcggcatcgaatcgccaggactgacgtcgtcgctcgcgatcgccgaccacgtcgccgaactcgcaaccgtctagagagctttcgagcgtggtcgatcacagatcgttgtcgagaaaacgcgcccaagcaaaacatcatccccgcgcaaggatcgtgcgcagtttgtatcttgcagcagggatgagcacgtggctctcatccctgcaagaaggatgcgatcaactctacgctgttatgggggtgctagtggagcgtatcgctgtgcttcagacgctcgatctggtccttgaccatcaacttccggcgcttcaactcaacaatttgcaggtcgtccgttgaaaggtgcacgagagcttcgtgcaattcgttttcgagcagtttgtgcttccgttccaattcaacgagatgtgcctgaattgtcattcgaaacctcctcggtagggttgaacctcaggattcgatccggacaagcaagtctacatcaccgattcgtcctgtcgatgggtatccgtcgtcacagtgtcatttttgaaagttcatatgtaacgaagcgtgactaaagggaaccacgcgggaaaaatccgtgatatcaatgcggctgcgcaacttccgcggctccttgcagaaatatcttgcgggagaccggcggacgaagccgcagatcgcttgcgatcacgctgcgcaaggacgataatttccacagggcatccacagcccggatctcacgcctatcggttttcggccaccgcagacatgaccaacgaagatgagcgtgagctcgaagccgagctcacccggttgcagcaggaacaccgagatctcgatgcggcgatcgatgcattgcatcaatcgcccgcccccgacctgttgcggttacagcggttgaagaagcgcaaactgttgttgcgcgaccgcatcgcgttcattgaagaccagatcacgcccgacatcatcgcctgatccgtcgacgggtcgtcccgcggctcaccaatgaatccgcttgactcgatcggaacaaaagatgaacattcagggcccgcagctcagcagatgcctaaacacaggacacgaggacaacgcgatgtcggcaacgccccttctcgacaacactcattacgaacaggcctgcgatcaggcgatcgcgatgtgcgacggcaatctacgcagcaccatcaaggcgctgatcatggccaatgaatatctggaaaccgagctggaggagttgcaggcggctgttgccgccggctgcattccggaaacctcgcgcagcaagatgcggagcaagagcagcgccgcttgagttcaacactggagcaacgccatgtcggatgtgacctattacgttgcaatgccctttttgatcgatgacgacggatcacccgtcgctggcgcggcggaagagtgtcagtcctcaacggcggcgctacgacgcgccgagattttggcgcgcggccccggccatatcggcgcaatcgcgttcagccgcagcggcgatcccatgaccggcgaatttggcgacgcgacgctgctgcgcaaattcggcaacgtgcccgaagatctcgcaaccctctaaagctcgctaccgacaagcctgatacgcggctcatgccggcgtcgcgccttgcgcacgtacatcgcggcatcggcctcttccagggcgcggcctgcgtcggcgtgcgggccgagcagcgcgacgccggcggaggcgcccgcggccaccgattgtccacgaaacacaaaggacaattcgtcgatcgcctgctcgaaggccgcggccttcgccttggcgtcagtttcgctgagattccagagcagcagcccgaactcgtcgccgccgagccggccaaccacgtcggaggcacgaatctgccgcgtcagggtcgcgacaatcgccttgagcacctcgtcgccggcggcatgcccgaaggagtcgttgatcggcttcagccgatcgacgtcgaggacgatcagcgccccgctggcgcggtagcgcttcatataggcgatggcgcgcgcgagctcgcgctcgaagccgcgccggttgggaatctcgagcaggaaatccgtatcggccgcagcttcgagttccgcgacccggcgctgtgcttccttgagcttggtccgcaggtcccggattgtcgccctgagattgtccttggctgcatcatccgccggggcgttgcgccgcgatggcttcaccgaccgcttggtcagccgcccggcggcgggcgtggatcggccggcgctggtcttccggcccgctttggccttcgcagcgctcgccctttttggtttcttcatgggcatcctgctcaatgaaggcttgcggggattcaccaagacaggatagtggattcccttctccttgccaccgccttgcgagccgccggccggaacccgctaatctggcctatctttctgttttccgggcacaattgacgtcatgaccgcgccgatcgccatcatcatgggaagccagtcggactgggacacgatgcggcatgccgccgacacgctcgaggcgctcggcatcgccgccgacacccgcgtcgtctcggcgcatcgcacccccgaccggctgtttgctttcgccaagggcgccaaggccgcaggctacaaggtcatcatcgccggcgccggcggcgcggcacatctgcccggcatggccgcggcgctaaccgaactgccggtcttcggcgtgccggtcgaatccaagacgctcaagggtctcgattcgctctactcgatcgtgcagatgcccgcaggaatccccgtcggcaccctcgccatcggcaaagccggtgcgatcaacgccgcactgctggcagccgccgtgctggcgttgtcagacccggccttgtccgatcgccttgccgcctggcgcaaggcgcagactgacgccgtcgcggagcgcccggaggacaaggcgtgactgagaccaggcacgtgaagctgaagcccggtgacaccgtcggtatccttggcggcggacaattggggcggatgctggccatggctgcggcgcggctcggcctgcgctgccaggtgttctcgcccgatccggactcgccggccttcgacgtcgtacttaacgcgacctgcgccgaatatgccgatgtcgaggcgctggagctgttcgcgagcgacgtcgacgtcatcacctacgagttcgagaacgtgccggccgcggccgcgatggtgctggacgcgcgccgcccggtgctgcccaaccgcaagatcctggagaccacccaggaccggctcgccgaaaaggattttgtcacgcacctcgggatcggaaccgcagcctatgccgacgttacctccgtctcctcgctgcgcgaggcgatcgccaggatcggccttcctgcggtgctgaaaacccgccggttcggctatgacggcaagggtcaggccatcatccgcgagggcgacgacatcgccaaggtgtggacgagcctcgccaccaaatcggcgattcttgaagccttcgtgccgtacgaacgcgagatctccgtgatcgctgcgcgttcggccacgggccaggtcgagtgcttcgacgtcaccgagaacgagcaccgcgaccacatcctgaagatatcgcgcgcgcccgcgccgatcccggatgcgctcgccgaggaggcgcgcagcatcgccggcaaaattgcaggcgcgctcgactatgtcggcgtgctcgctgtcgagatgttcgtgctcgccaatggcaccggaccgaaggtgctggtcaacgagatcgctccgcgcgtgcacaattccggacattggacgctggatggcgcctcagtctcgcagttcgagcagcacatccgcgccatcgccggctggccgctcggcaagcccgtgcgccatggcgacgtcgtcaccatgaccaacctgatcggcgacgagatcaacgattacgaaaaatggctgaccgtgccgggcgcgaccgtacacatctacggcaagggcgcgccgcgccccggccgcaagatgggccacgtcaccgaagtgcgtcccagcgcaagcaagtaacgggaccgcggctccgacctgcgatcccgccaggcgatcaggccgccttcactcccgcgacgatgccggtgggctcctcgctgagccagcgatagacaaccccgccgagcgcaccaccgatcaatggtgcaatccagaacagccagagctgcgacagagcccagccgccgacgaacagtgccgggccggtactgcgcgccgggttcactgaggtgttggtgacgggaatgctgacgagatggatcatcaccaacgcgagcccgatcgcgagcggcgcgaaacccgcgggtgcacggccatgggtggcgcccatgatgatgaacaggaacatcatcgtcatcaccacttccgtgaggaagcacacgaccatgctgtactggccgggcgaatgcgcgtcatagccgttggacgcgaagcccttgccgacatcgaatccgggcgccccgctcgcgatgacatagagcagccaggcggccacgatcgcgccggccacctgggcgatgacgtatggcaaaacctggcccgcgggaaaacggccaccggcagcgagaccgactgtgacggctgggttgagatgacagcccgagatgtggccgatggcataggccatggtcacgacgctcagcccgaaggccagcgacaccccgatcaggccgattccgacctgcgggaagccggcggcgatcaccgcgctgccgcagcccgcgaaagtgagccagaacgtgccgatgccctcggcagcatatttcttgatatccatgtggcgtctcccctggttctcggcgcaaagcgtccgggaacgacccctcatcggcgccaagtcacccaaatcagggccgcacaggggcattttcgccgcatttaatggccgaacttggcccgaaaacccgcttgcccggtggacatctgcggttttgtctgatacatccgcgcgctcaaggttaagggcttgcgcgtttcgccatcccctttgacttaccagaattcaaatccaatccacctaaagaggatgccgcgtgcaggttctcgttcgcgataacaatgtcgatcaagccctcaaggcgctgaagaagaagatgcagcgcgagggcattttccgcgagatgaagctccgcggccattacgagaagccctccgagaagaaggcccgcgaaaaggccgaagccgtgcgccgcgcgcgcaagctggcccgcaagaagctgcagcgcgaaggcctgctgccgatgaagccgaagccggtgttcggcgctggcccgggcggtgatcgcggcggtcgtagcggcccgggggcaggtccgcgcggaccgcgctgatttgccgaagctgtaagaactcagtttcgatgacgcgggcccttggcccgcgttattgtttgtgagcggtgcctttctgggacggggcactacagatgcggcaccagcgcgagcgaaccgtagatggtttcccctttccctcagcgcggcttggagcgacgacgccggatctggcggcagacgctcgtattggccttgatcgggagcacattgtgcggctgctccttcgatctgggatcgctgctcccggagaaggacaagccgcaggaggcgcccaagacggccgcgcccgccgagagcgcggtgagcgcgggcaacgtcgccgaagctcaggctcacaccgcaaaggcccaatccctggcgaagtcaggcgagaccgcggcagcgctcgatgagttcaatcgggcggtcgggctcgacccctacaacgcgcaggcattctacggccgcgccctgatctatcagggcaagaaccagcacgacttcgccatcgccgatttcagcgctgcaagcgggctcaacccgcagaaggccgagccgctgctcggccgcgccatcagttatctcgcgctcggcaaggtcaaggaggccgcagccgatctggacgaagcctccgaggccgatccgcacaacgcccaggtctggaccacgcgcggacaggtctatgagcggctgggcgacaaggccaaggcggcggcgtcctacgccaaggcggtcgcgctccgcccgcgcgatgatgccgcccgcagcggccttgcccgcgttggcggctgacggatggcgcagcgagcgcagtctcagtcgggggtggcgctcttcggcagaaccgcgttgaacatcgacttcatgcccgacagcatctcgtcggcgacattggtcttcttcggtcgcggcatggaggcccccgcatcggcacgcaagtcgagcggcggtgcgatgaccggcacgggaatatcagccggcggcgtcacccggttcggatcctcattgctgatcgaggccgtgtagggtggattggagccaccattgccgtagatctcaggtgagggtgtcgagactgtgatcggcggcggcagcggacggactgtggccggctccatgctaacgacccgcggggcctccggcgtgcggacggcttcccgcaccgcaggctccgccggtctctcggctggcttggtttcagacgttctggtctcaggggacttggcctcggacctgccctcaggcgacttgcgcaggcgctcgatcgcagcacgcacgagatcgttggcatcaggggttgcggccggagcggcagccgccggtgccgaattggcctcgaccatcggagcagcgggaaccgccggggcagatttggcaatcaccttttcacgggcggacggcttggcgcgcggcccggtctccgtcggcgccacgtccggtgccttctccgcagccttctcggcccccttgggctcggcggccggctgatgatcggcggccgccttgtccgtgacgctcttctcggagatgcccttggccttggcgccgggagcggggaggttggcggtatcagcaggcttgccgttgtggccggcgtcggcgggtgcaaccatcgccgcgggcgcatcagccgccggcttggcgttgatgtaatgattaacgatgtacgccccgatgatcgtcgcgagcaccgaggggaaaatatccatcgaaatcttggcgaggtatttcagcattccgaccactccccgcgggcctgatgcgggaactttggggcattgtgagggatcaactgcgacggatcaatggcaggcgggtaacgccagcttacggctttagctcaatttcaaggaacacgatctcagttgaggtttcgttaagtacgtcatgctggacgccagccttgcggaagtaggattttccggcggagagctgcgccttgccccgttcgccattgggcgacacgatcgtcatctcgccggcgacgacgggaacgatcacatagtccatgccgtgggtgtgatgtccggtc

SEQ ID NO: 177 - DNA, 13993 bp, Bradyrhizobium colbertium
  misc_feature (9855)..(9864): n is a, c, g, or t
cggtgggccgcgactgcgtcggtggcggcgctcgggagcgctgtggcgtcactcggtctttatctcgcttttcatcattttggctggaacatcttggctgagcgctaccccgagcttgccgggtcgcgggcctggttacaagccacggattggctggcaagatatgggcttctcgcgctgttcgggttgatggctgtaccacttcctattcccaaactgcccatgctcgctgtcgtcggaatctatcgcctgccggtaccggacgtctttgctgcgatcgttgccggaaagatcatcaaatacctggcttacgcgtacatcgccgttcgtttcccgaacgccattcgttccctcgccgaccacgccgttccatggagcaggttttccaccgctcgattgcagacctggctcgttgctggcaaggccacgattcgtagaatacgtgtctggacaacgacgacgacgcagaagcacggcatcagaaatggagaaggtaacattggctgacgagatcagtggccgttcgtccgcttggaccctgcaaattgcgccgcagcgggtttgggaagcaatcaccgtcaggtccgtgctgccaaagtcacaacgcgacgtccgtttggacctgtttcgcggcttggcaaactggttgatctttcttgggcatattccggattcggtgctggcctggttcacgacgcgaaattacggctttagcgatggcgccgatcttttcgtgctgatctccgggtataccgcgaccttcgtcttcggcaagatgatgatggagcgcggctttgtcatcggcgcgaccaggctgttgcggcgggtctggcagctctatgtcgctcatctgctgatcttcatcttctaccttactgcggttcattaccttgcgcataagttcgacgatccgcacttgatggatcaattcaacgtggcgccattaatgaacttcccggtcgagactctctcgcaaggcctgatgctcaagttcaagccgctcaatctcgacgttctgccgctctacatcgtgctgatggcggccttcccgatcgtcctgtggttcatgttgcgatggcgcaacgcggtcatgatcggatcgatcgggttgtatctggcggcgcgccattacggctggaatttcgcctcctatcctgcgggcgcttggtatttcaacccatttgcatggcagctgctctttgttctcggcgcttggttggcgctcgggggagccacggcaacccgggtcctcctgcattcccgacttcttttcgtgctgagtatctgcttcgtcctgttcgcgcttgccctctcgctgggcgagcgaattcccgaactgcggccgttcattcctgacgccattgcggggctattcattccgaacgacaagaccaaccttgctccctaccgtgtgattcacttggggagcctggtgttcattgtcgtctcgctcattccgatcgattggccaggactgaaatggccgatcttcagaccgctgatcaggtgcggtcagcagtcgctgccggtgttttgcgttggcttgttcctctcgttcatcgcgcatttcatgctggcgttcggttcggaaggggtgctggctcaactcctgatgggcgcggcaggtctgtggatcatgacgatcatcgcctattatcggacatggtcgaaggacgtcgataagagcctatcttctggcggaaagttggcgaaaagcgaagccggtcgaagccgcgagccccgtgccgaaggataaaatgagctattggttcagaggcatgtcgtggggcagggatgatcacttccgagctgacgttctccgaacaaacgcaagccgccattctgcatgggcttcattggacggcgtccgctattgagctgctcggagtggtggtgatcgtcggcggtgtagtcggtgcgacggtgtggtcgctgcgcgagatgcggcaccggcaatttgccgatgcgtttcgttcgtatcgtgctaacctcggccgcggcatcctgctcggtcttgagttcttgattgcggcggacatcatcggaatgatcgcgatcgtgccgtcgttcgatcggctcggcgtcctcgcgctgatcatcgtgatccgtacgttcctgagcttctcgcttcagatcgaaatcgagggccgcttaccgtggcagcggcacacgggtggggacgacgacgcggatcgcgccgggctctgacccttttaatcgggctctgacggcggtgggggctcgcttaggttctgggatgccgagctgtagaaagcctcaaacatcttttcgagggcttcgtcgcgattgacgcgtgtccgctcaatcagtgccgtgaccaggctgaaatacgttcgctcggcggtaaggattatcgtcggacagcggggtgcgcctgtcgcggagggatttggcagcaagctcagccagtccgcgcagcatggagaaaaagtcagcgaaagcagatagtggctggctcgcattggatgaagccatttcgccaatccttcaatccttctcgcgccaaaaagaagcagttttaattcgaggccgagcggcacagggtgggaatcacgatagcgaagaggtggcattgtatgggaaggcttggatatagagcttcaggcgtcacggaccgcagcgacgaagagctttctctgaactccgggcagcgcttgtgcttcacgacagcgcttgcgttcagcgtgatcctgccaagcttgcctgcaagggtcgctattcttgcgaatgcggtggatacgaagacgatttcccgacatactggaccgattacaggtatctatacgctttcagttttcatctcggcgccccttttcggcaagatgtcggatcggtgggagcgccgctctgtcttggcgatgggactgagtggcttcagcggaagtctggtcatctttgaatttgccgatagtctcctctcgatctatttggcccgaattctcggcgggttgggctcgggtgcagtcacgccggtcgccttggccctcataggtgattttgcgccggacgatggctggcgcgcacggcgcttcgcctggctgggggcggcgacgatgactggcttcatgacagggccattcttaggcggctcggtttttgccgccgcgggcagccctttctcgacggctcagtatgcgctgctttggccagcggggtttgctcttctgtccgccgttgttctagctcttgcgatcccgtgcgagcgtcgccttcgtccgtgctctgccagcgcaatgttttgccgggccaaattcgtcgtgcaatgacgctcaagctgctttggctggctgccgtcgtcgctggatgcgtggcggcctttgacgtcgtccttaccttgcgtggaagcttcgtcgcaagccagggcaccgcattcgtagcgcttgttcttgccgagtgtagcgcggtcatgctgctggctcaaacggctctcttctcgtcgtcccttgtgcagccacatgtgacgaaatggctgatcgccggcattaggcgcactggcaatcgggctggcgatcttccctgcgctaacccagacggcagcggtggtgctcggtgttggcctggtcgccgcggccgcgggcatcgcggcgccggcgatcacctactggacctcgatcgtggcaggtgagcaccagggcgagcaattgggccgatggaccgcggtcacgagcctcgcgcaagcgcttggttcggcagccgcgggactaatggtttcgcaaggctcggaccaaagcttttttgtgttttccgcgatcaccgcgctggtcggaacactgctcgcgctgccgctttccgggaggttgaccgcttcaaaaaccgactgaactgatgtcggaccaagcggatcgccgccagagcagcacatctgcgcttcggcatgcaatcctttgcgacagattgatagaatccagaagatgagcctcggagcttgcatcgtgacggcaaaccgttgctggtcgtcggctcattgagtgagccgctatgctggtcgcttttttcgcgagcttagggccgctgccacgatgaacagcggccccttcgtcttcgaattgacccaacttcacttcaggttcgtaattgcagtcaagtcagccgagagtttggcgatgccagtggcgccacaccagttggagccaaacccaccggggttgatgagcgaaacattggctggactggtcacgctcgctgtgaagtcgctggtgtaggcgttgcacgctcccttggagagattggtgtcggagtagcgcagatcgagggtaaaaaccttataggtgaagccaaccccgatgttccaggtgttgtagctcggctccggaataccaaactgatagatttgtcctggaatttgcgttccgtagaaccgatccgaggtgccgagccactgccgtccgaattcaccagagacgtacatgccgataccgctggtgccgaaggtcgagcttggagcggtccacttggcggtgatcgaggcgtagttgccccaggcgccgaggttcatcatattgggggtatagtagttgttggcgccgatctgaaactggtcattcagggtcacgttgactttggcataaccctcataaaaactggcgttccttttggcgaaattgccattgatcggaagtccgagggtgacagggtcggcgtttgctacgcaacccgcctctgagccaggaattcccgagcccggaaaggcgaaggcgttgtaacaagtgccaccgggataaagataaccccagacgccgaagtcaaaagcgaagatgccaaaagtgggacggatgccgccatagatatctatttcggctgcggcgcggttggggaacgagatgctcgcgccgccggcgccgatatacagttgcacatccttggtgacgttatagcgcggctcgaagtaggccgcgaccgatggcttgtgattggattgagtgatgccgcggaacacgtagtcgctcatgagtgcagcgccgaaggcgaaatcccacgcctcgaaggcgggcgggggcggcgccttggctgccttcacggacatgtccgccgcgacagccgaacctgcattgatcgcaagcaccgccgcgaccagacccactttcttcatgacaacccccatcacagttgcagcccctcgccgagcgccaagaagagtagggactcagctgttgctcgacacgtctttctaggatcaacctacccagcaaagcgcagaattgcgaagccacaaccgtgggcaattgctcaaaggctaggcaatttgacccatcctaagtgagttcttggcaggtgttgtattcagaccatagatttctgagaataagtgcaaagcgcgactcctcggaccgcccgccaaactgctctacgcgccaaaccggactgcctgcggctggcgctccggcaacatccctgttgagagcattgagcaacgacctattcggctgggctgccaacggaaggctgccatgaacggacgtgaactacgaatatggcgcaagctcctgggctacacgcaggaggatgcggccaatgagcttggggttacgcgagccaccattcagaattgggaacacgacgtcacgcctgttccggtcaccgtccatttggcgtcccggcagctcattcggcgctggaagcaacgcgccgagttcgggccggttaccctggtctacgcaagcgtcccactcccgtcgccaaatagcgtcgcggggccgccgacgctcacctgcaggcgctatccggataatcacaccgccttccgcaagatcttggagctcagaacgagcccaagcttttttaatcccctgattatcgacgagggcaatgtcatcatctggagtggtccccagctgattcaacaatgtgagaagctcagccagaacaaggataggccgtgagacatacacgagtcactttggatttgtgccgcagattctatgcctttgaacgcttcaaaaattagctgaggtgcggctttggattgctgggatctcaagaagtggcgaaaaaagcacgggttcaaccagtttgatgcggcggagcagcttggaataaaccgaggtagcttccagaattgggaacgagaagtcagacccattccgagagctgtcgagcttgcttgcgaagagatctcacaattgcggcgacagcgccctgacttcggtccagtaatccttgtatatgccgacgggccgattttgcagcagtctagtgagctctactccctcgctctgctgcgttgtgaccgttttccaaataacgaagcggccatggaagaggccactcggctgggttttgatccgttggttgttgatcctttcatcctggcggaagatggttcggttgtttgggatgcgcccgaacttttggaagaatgcaacaggcgaagacgtgcaaaaaactgcgcgaaggcctccgcctgatccaaattattgcggcgaagacgcctgatcgtatgaactggagatcgtgcgcgaccgctgacaaggaactccggcgtgatcaagtcgatgctactgccgatcaggcaaaagccttctccagcgaatggatcagaacaccgatcgacctgtcgtgacgcgtgatcggcgggatgggacgctcgatgccgagcagctgatagaccgccgtttgggctgcgcgcaccgaatgctcgaccgtgaagaccacctcgtccggaatttcgacgaactggctgatgaacgccaggttcttggaagtcggcggaacaggcagcggacgatcggacctgagccgcggcataaacatgctggtgatgtacggcattcggcagggaatgcaggtcgctcgtcgaaagaccgcatagtcgaagttcagatgaccacaaagctcgcgcaagatttccgctcctccacactccgacattggcttggctacgaaattgccgatccggtcggggtgcagggcatagccccagaataccgccacgtcgcttggttggccgacgaagtgcggttgatggtacaggacgatcgacatcagccaattggaatccttgaacgtgaccagcccccccgtgccggcggcgttgccggagaatgcctccatctgttggaaaaagctccggtcgcgacaggtcaccgtgaacgatgcccaataggactcgggaatcgaactgttgaacacggcagggttgccgaattccggccgcccggcggcgatcttctcccagaggacccatccttcgctgtcggctttcgtccgtggttcggcagggctcgtcatggagccgaggcttgatgcgtcggtcatcgaaccgttctgaaagaacacgaggtcgtgggcttcgaccgtcgcgacgagcttggcgcctttccggtcgatcgtaaggcctttcacccggacctttccgccttcgtccgcaacgtcgatgtcggtcacgcgcccgtcgctgacgaaccgaacgccgtgatccttcagccatgcttccacgggacgaacgatcgcgtcatactggttgtagatggttcgcttgacaccgccgagcgtctcgatgcgcggaaactcgttcatgaaccgatgcagatagcgtttgagctcgaccgcgctgtgccagggctgaaaggcgaacgtcgtttgccacatgtaccagaagtttgtctggaagaatgccggggacagccagtccgtgatgcggctgttgccgagctcgtcttccgaggccatcgccaggcgcaccagttcttcgcgatcgcgcatggtaaagcccatcgtcgacacgtcgaccttgaagcggttacggtcgaccagtcgtgccttggaatgggctctgtgcttgaggttgaatgcgaccgtctcgtcgcggacggtttggcccgggtgctcgagcgacggaatcgttgaaagcagatcccacgtgcattcgtagtggtcggtcgtcagcatgcggccgccgcgcaacgaatacgacccatctggaagctgagcgccatccagactgccgccaaaggtcgagaggttctcatagatcgtgatctcgctgcctgacattgcgccgtcgcggatcaggaaggcggcgccggcgagcgatccgattccgccgccgatgaagtaggctttcatgttaggctttcctggctgaaagggtgtctagcgcgataagctattgtgtgagaagccgcgggccttgagctaaatcaagttgttgtttcggcctgcaattgccccctaagttggggaacggcgtccaaaacttgaaagccgattaacacttttcgtctcaaaaatccgaactgggcgtgtcgtttgagctggcggatagcttagctcgagtggccgatcgcaaacgcgatcatcgcttccaaccggagcggttgtgacgatcccagccgcaccagctgcgtggcgcgcgagcgagatcggatcacggtttcctggctctaatgacggatatgcgtccaatccccacagactgcgacgattgccggcgtaggccgacaaagccggcgttaacaagagaacccgtccagcttccgttcagatgtggggttgcggcagccggcccagagatgcgctcggtgaacttgagtattctgtgctcattggaattggtcggcttatcgtagtctgccacatgtaaagtgccgccgcgccgcagaacccttcgtaattcgttggcaaggcgacacttttcatcgggcgagcgatcgtggaaactaagtacgctgacggccttgtcgaaagagccggcgccgaacgaaaatcgatcgccagtcgttgcggccaggacctgaacgttctcgatgtgacggcgcgtaatatcccgcaccgctttcgcgacgctgctcgggtcagggtccacggcgacaaaggtcgtggttggaaaacgcaatgccagcataatcgccatcgacccgctacctgcgccgaaatcaagaatgcggtcgtccgcccgaggcgcaagagaatcgataaccgcttcctgccaggatcgatcgctcatcatgacatcgaaaaagccttcgtagagaagtctggcaaaaccaagccgaattcggttggaaacacgcgccaatccgaccactgcctgcggcgtcgacatgttttgccgtccaatgcagatcaatcacaagctaagccgaaacacataatcggaaataaaggcagcaagttgagccagatcaacgatctgcgagattcttagggttacatggggagaaacgtgaggataccgccagtacgtacaacatgaatgggcgggtgagtaaaacgacgatgcgcctctctcgaaccatcctggccctggtgaccgcgctgtcggtggcaatgctaccgatggcgggagctgccaattccggctcgatggcgcacgaggtcgcatcgcaagaaatggcagttgtgagctccgacgtgccggaagccatggacgactgctgtgcggaccagatcaaggccaacccttgcgaccagccgagcgatcagtgctcgctggccttctgcgcgtcgcagtcgggtaccatcgctgatgtcaccagttttccgtttgatttcccgatcgtgacgggaaatccgctccccattccggtggagcaggtcgtcgctttgcatagcggcagtccgccgttccgtcctccgcgcgtctgatcttctctcgcgtgctgccgaccgtgagccgtttgcgctcgcgtgtggcgacaattccgcgcgccttcgattcggttccgaagccgtggagagaccagacctatgaggagaagatccaatgatttcgaagttcacgcgcgtcgtggcgctcgccaccgtgaccagtctttcaggctcggcggttttcgctgcggcgagcgattacgcgttcgagcccatcaatgcggagatgaagaagggcgacgacgnnnnnnnnnngacggtggcggtgcgcctgaccaacagggcgacgggaaagccggtgccggacgcggtcatcatccgcacccgcgtcgacatggcgcctgacgggatggccgagatggaatcgccggtcagcccgttgccggcaaaggagcctggcgtctacgccttcaagaccgatttgccgatggccggtcgctaccagctcagcgtcgccgccaaggtgcagggcgaggcggagactgtgatcggcaaagtggtgatcaaggcgagcaagtaaggggcattgtcggcgcttcgacccggagcgccgacgcactttttaatctagctcaaagtgcctttgggcacgcgccattaaggtgaatgatatgaacaagcttgtgatcacgctcgcagccagcgttgggctcggggctgccggcttttggctaagccaacagccgcacatgcgggcgcaaacctatgtagccagcgcaatcgcagccgagaggtccgtgctctactaccgcgacccgagcagcgctccattctggtcggctggtcccaaaaaggacagccagggccgcgattatctgccggtctacgacgacgaagagccgtcgttggaccagcccgcgccgaagccgcaagcggcacaggcggggcggaaaatcctctactaccgcaatcccatgggacttccggatacctcgccggtgccgaagaccgacccgatggggatggcctatgtcccggtctacgaaggcgacgacgtagatgacggcctggtaaaactctcgacgggcaagatccagcgaaccggcgtgaagtcagaaccagccgagcgtcgcgcgattcggaccctggtgagggcacccggcaccattcaactcgacgagcggcgtgtctccgtgatcgcgatgcgcgcggagagcttcctgcaaaaagtcgccgatgtgacgaccggcacccgcgtcgcgaagggagagcaccttatggaggtctacagtcccgccgtcgcatcggccgcggcgcagtatatttcgaccatcgattcccctgtcaccaacggcatcggatcgtacgggcgcggctcacggcagcggcttaccaacctcgacgttccagagcctgcaatcgtcgcgatggagaagagccgcacagttcctgtcaccatccaatggtcggctccgcgcgacggcatcctgctggagcgcaacgccatcgagggcatgcgcgcgcaaccgggcgacgtgctatttcgtattgcggatatttcggtcgtgtgggctctggctgatgttgcggagcgcgacctcggcagcatcacggtcggtcagcccgttgcggtgcgcgcccgcagcttccccgggcgggaattcggcggcaagatcagcgtcatctatccgcaagtgaaccgcgaaacgcgaaccgcgcgggtccggatcgagctggccaacgccgacctcgcgttgctaccggacatgtatgtcgacgccgagatcggcaccgccactgggacggcggccgtcgccgtcccagacagctccgtgctcgataccggaagccgccaggccgtgttcatcgacaagggcgagggccgcttcgagccgcgcaccgtcaagctcggccgccgcggcgacggctatgtcgaggtgaaggagggcgtgagcgagggcgaggcgatcgtgacctcggccaacttcctgatcgattccgaaagcaacctgaaggccgcgctgaagggctttgcggaagccgccacgccggaggcgaccggagcttcaagcggggcgaaacacgtgggagggcaccaatgatcgcccgagccatcgcctggtcggcacgcaatctgctgttagtgctgttcggcaccgcctttgcggctgccgccggcctttacgcgctggtgcatcttccgctcgacgccatccccgatctttccgatacccaagtggtcgtctacaccgaatatcccggtcaggcgccgcaggtgattgaagaccaggtcacttatcccttgaccacggcaatgctgacggtgccaaaatcgaaagtcgtgcgcggtttttcgtttttcggcgtgtcgttcgtctacgtcatcttcgaggacggcactgacatctactgggcgaggtcgcgcgtgctcgaattcctcaacagcgcaacttcgcggctgcccgcgggcgtggcccccaccatcggtcccgacgcgaccggcgttggttgggtctaccagtacgcggtaatttcaaaggaattgaatctcgccgagacccgaaccatccaggattggaacctgaagttcgcgcttgccaaggcggaaggcgtggccgaggtcgcgggtgtcggcggtttcgtcaagcagtacaacgtgatcctcgattcccaacgcatgcgcgatcgcggcatcaccatgcagaagatgcgcgaggcgatccgcgccagcaacgccgacgtcggcggccgcaccgtcgaactatcggaattcgaatacgtcatccgcggcaagggatacctcaaaagcattaacgacctcggcaatatcgtgctgaaggtgagcaacggcacgccggtgctgctgcgcgatgtcgcaagggtcgagctgggccccgacgaaaggcggggtatcaccgagcttaacggcgagggagaagtcgccagcggcatcgtgttgcagcgcttcggtgtcaacgcgcttaccgtcatcgagaacgtcaagaaacggttcaaggagatcgccaccagcctgcccaagtcggtcgagatcgtgccggtctatgaccgctccaacctgatctacgccgcgatcgacactctgaagcgtacgctggttgaagaaagcatcgtggttgctctggtcagcgtcgttttcctgttgcacgtccgcagcgcactggtggcaatcctgatgctaccggtcggggtattgatggcgttcggcgcgatgaagcttttgggcctgggctccaacatcatgagcctcggcggcatcgcgatcgcggtcggcgcgatggtcgatgcggccattgtcatgatcgagaacgcccacaagcatttggagcgggcgaggccaggccagacgcgcgttcagatcctgatcgacgcggcatcggaggtggggccggcgctgttcttcagtctcctgatcatcaccgtatcgttcatgccgatcttcaccctggaatcgcaggagggacggctgttcagcccgctggccttcaccaagaccttcgccatggccgccgccgcattgctgtcggtgacgctggtcccggcgctgatggtgatcttcgttcggggacggatcgttccggagcataagaacccgatcaaccgctacctgatctggatctaccgtccggtcatcaaggcggtgctgcgcgcgaaggtgctcgtgatcctgcttgcggtcggggtcctggcggtgacgatctggcccgcacgacagctcggcgcagaattcatgccgacgctgaacgaaggcacgctgctttacatgccgacgacgctgccgggcatctcggtgaccaaggccgccgaactgatgcagatgcaggaccggatcatccgctcgtttccggaagtcgcctcggtctacggcaaggcaggacgcgcgtcgaccgcgaccgatccggcaccgaccgaaatgttcgagactgtcgtcaatctcaagccgaaggaggagtggcgcacgggcctcaccattgacggcctgatcgccgagatgaaccaggcgctgcaattccctggcgtatccaatgcctggaccatgccgatcaaggctaggatcgacatgctgtcgaccggcattcgcaccccgatcggcgttaaggtgatgggcaccgatctcgtgcagattgataagctcgccaagcagatcgagcaggtcttgaaggccgtcccgggcacttcgtcggcttacgctgagcgttcgatcggcggctactacctcgagatcacgccggatcgcaatgcgctctcgcgttacggcctcatgatccaggacgttcaggacacgatcgcgaccgcgctcggcggccagacggtcacgaccacggtcgagggccggcagcgcttcagcgtcaatatgcgctacccccgcgatctccgggacaatcccaaagcgattgcaagcgatatcctcgttccgctgccggcc

SEQ ID NO: 178 - DNA, 107175 bp, Bradyrhizobium colbertium
  misc_feature (24730)..(24739): n is a, c, g, or t
  misc_feature (43808)..(43817): n is a, c, g, or t
  misc_feature (59065)..(59124): n is a, c, g, or t
gctcgtctcggtcgtgctccatcgccgcattgtcggggacgggcgccaccgtgccggaacgaaagtcttggaatgcgcggatgcggccgaggcggcctgagtccggccaccgaggctgcgcgctgacgcactctcgaccttggcgctgcgcgccgacgaaggccccgccctcgcgcagagcaacagtccttcacgcgcacggccgcccacccacagcagccgtggcgagcgccgagggcaaaagaaaacggttccgtcgcgccgcaccggaaggccccggcttggccggtcaccgcatccttgtataaccagcaatgatgcggtcgttggatacatcgcgacctgaaggcgtagcagaggaccgctgatgaaccgagagctcgatctcgctggctttgaattgcatccgcagcgtggtgcggtgctggccgaggtgcatgctcgtccattcacccggctggtggccccggttacggtgctgcgcttcgcctttctcaacgagggcgagggcgccgcagccgatcggcagaagttcgtcctattctgtacatcgcacgggcaggcgacgcctgatgccggggccaaacaccatcaggtgacaatcgacgggatccagctccgctgggagcagcactcggaattcagcaccttcacctggatcctgagcaaccctggtgcgtcccctcgcgggttcggcgagattggcgacgaggccgccgcattgatccgatcgctccctcagtccggtcagttgctggttgcagtcaagctcgaggtcgaaccgacctcggtggcgctggagcgtgcccagcagcttttcgagagaggcagcctcgccatagccgcggtccgcagcgggccggccgtcgttgcatccgacttccgtacggacgagcagggcttcgtccgcattctcgtgtgcaatgacggtctgtcgccgggccgtctcggcgccctggtgcagcgcgtgctggagatcgagacctatcgcacgcttgcgctgctgggcttgcccgctgcgctcgagcttgcaccctccgtcgatcatatcggcaggcggctcgtcgaagtgctcgaggagatgcagcgcgctgaaggtctcaagctcaacaaccacctcctgggcgaactcaccgctctggccgcgtcgctggagaggggagcggccggcagctcgtttcgttttggggccagccgggcctactacgatatcgtgcaggcccgtctcgccgtcatcgaaggcggcgaggttgcgggctatccgacctggtcctccttcctcgcccgccgcatggcaccggcgatgcgcacctgcgcgacgatggaggatcggcaggccgacttgtcgatcaagctcgcgcgggcggccgatttgttgcgcacgcgcgtcgacgtcgagctcgaggagcagaatcgcgatctgctgcgctcgatgaatgaacgcacccggctgcaattgcggcttcagagcacggttgaaggcttgtcggtggcggccatcggatattacgtcgtcagcctgttcggttatgtcgccaagggcgcgcatgatggcggcctccatgtcgaaccctcgctcgcgaccgccatcttcgttccggtggctgtcgccgtgatctggatcgtcacccgcaatatccgcaggcggcacttgaaacacgacgagatgccgggcgtccacgactgagcctttgaacgagcctcttgcgcttcgttggtgagcggttgaagctgggggcgagcgggagaaacgagatgcgcccatccgacggaatgaccaatgtgctctggctgcagggcgccagttgcggcggatgcaccatgtcgattctcgagagcggcgcctcgggctggttcgacgaactccggcagttcggcgtcaatctgctatggcatccgtccgttagcgaagagactggcgaggaagcgctcgaagtcctgcagtccgtgctcgacggcagggttcggctcgacctgcttcttctggaaggctcggtcgcccgcgggccgcatgataccggccgcttcaacatgctcgcgggcaccaatcgctccgtctacagctggatgctcgaccttgcgccgcgtgctgactatgtgatcgcagtcggaagctgcgcggcctatggcggggttccggccgcaggctcgaacccgaccgatgccgtcggcctgcagttcgagggatccgagagtggtggcgcgttgggcgcggcattccgctcgcggcttggtctgcccgtcatcaacgtcgcgggttgcgcgccgcacccgggctggatgatggaaaccatcttggcgctgaccaccaaggatcttgccgcaactgacctcgacggatatggacggccgaagttcatcgccaaccatctggcccatcatggctgttcgcggaacgagttctacgagttcaaggccagcgcggagacgatgtcggagcgcggctgcctgatggagcatctcggctgcaaggcgacgcaggcggtgggcgattgcaaccagcgctcctggaacgggggcggctcctgcaccaaaggcggctatgcctgcattgcctgcacatcgccgggtttcgaaggtgcacagaacttccttgagaccgccaagctcgcgggcattccggtcggactgcctaccgacatgccaaaggcttggtttgtcgcgctcgcggcattgtcgaaatcggcgacgccgcggcgggtaggttggaatgcgaccgccgatcacgtggtggtgccacccggcggctccgcggccaaacgatcatcatgacgcgcatcacgatcggcccattcaaccgtgtcgaaggcgacctcgaagtccgtctcgacgtcgagagcgggcgcgttgtgcgtgccgaggtgactgcaccgctttaccgtggtttcgagcagatcctcgaagggcggccgccgctcgatgcactggcgctggcgccgcggatctgcggcatttgctcggtttcgcaatcggtggccgcggcggcggccctgcgcgatgcgatggctatcgaggccgcgcccaatggactgcttgcgaccaatattgcgcatgctgcggagaacgcggccgaccacctgacccatttctatatcttcttcatgccggactttgcccgtgaggcctacgccgcgcatgattggcacgaggcgacgcgcgagcgcttcgccgccacccgcggcagcgcggcgcgcgacgctttgccggctcgggcgcgactgcttgagatcatgggcatcatcgccggaaaatggccgcatagcctcgcgttccagcctggcggaaccacgcgcgccatcgatctcggcgagcgcgtccggctgctgtccatcgcgacggccttccgtagctttctcgagcgtgtcgtgttcgcagatgcgctggagaatgtgctggcgattgcgaccgcggacgagctcgatcgctggcgcgacggccgtggcggcgattttgcccatttcctgcggcttgccgatcgtctcgcactcaccgggctcggcaagggcagcggcttgatgatgagctatggcgcctatcatggtcccgacggcgagctgtttccgcgcggcctgttcggcccgcgtgctgcgatcgagccgttgccattggcgcagatcaccgaagatgtctctcacgcgtggatgcgggaatcttccgccgatccggcccatagccgcacggtcccggacccggacaagccggcgggctacagctggtgcaaggcgccgcggctgtcgggacagcctatcgaggtcggcgccatcgcgcgccagaccgtggcggggcaggcgctgattaccgacctggtttcgatcagcggcaccaatgtgcgcaaccgcgtgatcgcgcggctgatcgagactgcgcggattgcgctcgcgatcgagcagtggacgcgcgcgctgcggctgtctgagccgttctgtcacggtgggcgggaagtcccgaacggcagctatgtcggcctcgtcgaggctgcgcgcggcagtcttgggcattggatggcggtacgcgacggcaagatcgagcgttaccagatcatcgcaccgacgacctggaatttttccccgcgcgattccttcgacattggtggtccgctggagcaggcgctggtcggcactgatgttggcgatgccggcgcgcgcgcggtcgcgatccagcatatcgtgcgttcgttcgatccctgcatggtgtgcactgcgcactgaccggaaacttccttttcgactgcaaatcgagttgtttccgtttctggtgttcttagcctcgcgctggaccgcccgcccacgcggctccatgcgcaaggttttggaatctcttcacttttgaatcgttccaagtcgttggcctgcttcttgctgtctttggcgtcatcgaaaagtcaaagccgaaggcgggaggattcatgggcgcggcgacggaaacgttttacagcgtgatcaggcggcaaggcatcacgcgtcggagctttcacaaattctgcagcctgacggcaaccagcctcggcctcggaccgctggcggcgagccgtatcgccaacgcgcttgagaccaagccgcgcgtgcccgtgatctggatgcacggcctcgaatgcacctgctgttcggagagcttcatccgctccgcgcatccgctggtcaaggatgcggtgctgtcgatgatctcgctcgactacgacgacaccatcatggcggctgctggccaccaggccgaagccatcctcgaggagacccgcgccaagcacaaaggccagtacattctcgcggtggaaggcaatccgccgctgaacgaaggcgggatgttctgcatcgacggcggcaagccgttcgtcgagaagctgaagatgatggccgaggacgcgatggcgatcatcgcctggggcgcctgcgcctcctggggctgcgtgcaggcggcaaagcccaatccgacgcaggcgacgccgatcgacaaggtgatcaccaacaagccgatcatcaaggtgccgggatgccccccgatcgccgaggtgatgaccggcgtcgtcaccttcattaccaccttcggcaagctgcccgagctcgaccgccagggccggccgaagatgttctactcgcagcgtattcatgacaagtgctaccggcgcccgcattttgacgcggggcagttcgtcgaggagtgggacgacgaggccgcgcgcaaggggtactgcctctacaagatgggctgcaaggggccgaccacctacaacgcgtgctcgaccgtgcgctggaacggcggtgtctcgttcccgatccagtcgggccatggatgcattggctgctccgaggacggcttctgggacaagggctcgttctacgaccgtctcaccagcatcaagcagttcggcatcgagaagaacgccgaccagatcggcatggtggcggccggcgccgtcggcgccgcggtggcggcgcatgcggctgtgaccgctgtcaagcggctcgcgaccaagcgcgaagacgccgaccacaacagctgatcgaaaagacacagcagggcaggacaatcatgggtatccagactcccaacggcttcaatctcgacaattccggaaagcgcatcgtcgtggacccggtgacgcgtatcgagggtcacatgcgggtcgaggtcaatgtcgacgccgataacgtcatccgcaatgcggtttcgaccggcacgatgtggcgcggcatcgaagtgatcctgaagaaccgcgacccgcgcgacgcctgggcgttcaccgagcggatttgcggagtctgcaccggcacccacgcgctgacatcggtgcgcgcggtcgagaacgcgctcgggatcaccattccggagaacgccaattcgatccgcaatttgatgcagctggcgctgcaggtgcacgaccacgtcgttcatttctatcaccttcatgcgctggattgggtcgacgtggtctccgcgctctcggccgatccgcgcgcgacctcgacgctggcgcagtcgatttcgagctggcccctgtcgtcgccgggctacttcaaggatctgcagacccggctgaagaagttcgtcgagtccgggcagctcggaccgttcaagaacggctattggggcagcaaggcctacaagctgccgcccgaggccaatctgatggcggtggcgcactatctggaggcgctcgatttccagaaggagatcgtcaagattcacactgtcttcggcggcaaaaacccgcatccgaactggttagtcggcggcgtgccctgtccgatcaatgtcgacggcaccggcgcggtgggtgccatcaacatggagcggttgaacctgatctcgtcgatcatcgatcaactgatccagttcaacgagcaggtctatctgcccgacgtggcggcgatcggctcgttctacaaggattggctctatggcggcggcctttcgggtcagagcgtgctctcctacggagacgtgcccgagcatgccaatgactactccgacaagagcctgaaactgccgcgcggggccatcatcaacggcaatctgtccgaggtgtttccggtcgatcacgccaacccgaacgagatccaggagttcgtggtccactcctggtataaatatcccgatgaaacgaagggactgcatccctgggacggcatcaccgagccgaactacgtgctgggagccaatgcgaagggcaccaagaccgcgatcgagcagctcgacgagggcggaaagtattcctggatcaaggcgccgcgctggaagggacacgccatggaggtgggacccctcgcgcgctgggtcgtcggttacgcgcagaacaaggcggagttcaaggacccagtggacaagttcctgaaggatcttaatctgccgacgtcggcgctgttctcgacgctcggccgcactgcggcgcgtgcgctcgaatcggtctgggccgggcgccagatgcggtacttccaggacaagctgatcgccaacatcaaagccggcgacagttcgaccgcaaacgtcgacaagtggaagccggagagctggcccaaggaggccaagggcgtcggcttcaccgaggccccgcgtggcgcgctcgcgcactggatcaagatcaaggacaccaagatcgacaactaccagtgcgtggtgccgaccacctggaacggctcgccgcgcgatcccaagggaaacatcggtgctttcgaagcatcactcctgaacacgccgatggtcaatcccgagcagcccttggaaatcctgcgcacgatccattcattcgatccgtgtctcgcctgttcgacgcacgtcatgagcccggacggccaggaactcgccaagatcaaggtcaggtaggaggtcgccatgatggatgcaattgctcctgcttcggacggcaggcccgacctcgcggcgatcgcggccgacgcttccggagaacgtgcggtggggcggcccaccgtctatgtttacgaagcaccggtgcggatctgccactgggtgaacgcgttctcgattctggtgctgatggtgaccggttatttcatcggctcgccgctgccgacggtcgcaggcgaggcgtcggatcatttcgtcatgggctacatccgcttcgcccatttcgccgcgggacaggtgctcgcggtgttctttctcacgcgtatcctatgggccttcgtcggcaatcaccactcgcggcaaatcttctacattccggttcatcgcaagcagttttggaaggaagtgcttcacgagatccgctggtacgcgtttctggagcgcgagccgaagatgtatgttggtcacaacccgctggcgcagaccgcgatgttcacgggtttcacgctgttcgtggccttcatgatcgtcaccggctttgcactctattcggaagggatgggcatcgacagctggcagtacaagctgttcggctgggtgtttgcgatctggccgaacagccaggacgtccacacctggcatcacctcggcatgtgggcgttggtcgtgttcgtgacggtgcacatctacgcggcgatccgcgaggacatcatgtcgcgccagagcatcatctcctcgatgatatcgggcgaacggcaattccgcgattgagacgggaacgctatcgatgccgacatcctcgcaagacaaccgcattctggtgctcggcatcggcaatatcctgtgggccgacgagggctttggcgtgcgtacggtggaggagtttcaccgtcgctacgacgtgcctgacaacgtcaccattctcgacggcggcacgcagggtctctacctcgtgaactatctggaagaggccgaccgcctgatcgtgttcgatgccatcgactacggcctcgcgccgggccaattgaagctggtacgcgacgacgaggtgccgcgcttcaccggcgccaagaagatgagcctgcaccaaaccggcttccaggaggtgatcagcgcagctgatctgctcggcagatgcccgaaacacctcgtgttgatcggctgccagccgctcgacctcgaagattggggtgggccgctgacggcgcccgtgcggggccagatcgcgcccgcgatcgatcttgcctgtcagatcttggccgagtgggggggggaggtgcggccgcgccgcgaaccattgccggcatccgagcggctgctcggcaacgacatcgatcatctcaattatgagatgcggccggcctgacggcgcggcccttttggagaaagcgcgatgtgcctcggcctgccgatgacgattgtcgagaccgatgggatgtcggcgctgtgcgaatttcgtggcgagcagcgccgcgtctcgctgctgctgctttccagtccgccggtcggggcccacgtgctggtctacatcgataccgcaatccggctgctcgatgaggaagaggcccgcctgatcggggctgcaattgacggccttggcgccgcactcgatggcgaggattgcgaccgctttttcgccgacctgattggtcgcgagccgcaactgcctgcacaccttcggtcggagtaagcccgcctctgcgtcggggttcattgtgccgcgcgccagatcggctcgcgacattgcgcgccagtggaaggtggctttctagatgcaaaggttgatttcacccaaggtggaaagtatcttgccatcaatggatgtatgcttccgcgcgaataaaaatatattatgtgaatcaattagctagatcgtcggatttgctggttcgtcctggcatgtgccttgctaatcctatgacgagcaaaatcaaaagcttgtcagggggggtgtgatggaattccaggtggggaagcaagatctggcgcggcacggcctgcctgaggtcgatgccgccacgatcgatccattcttgggtggagccgacggagccggtgcgatcgcagtgctgctgtcggcgggcgatcccaaccgtttcccggaggcgatcgacgtcgccgtggtgctgccggagttgatcggcgcgttcggcgatcggcttcgtggcgcggtcatcgcgcgcgatgccgagcgagcgctcggcgagcgtttcggcatacgcgtgcagcctacgctggtcttcgtcgccaagggcgagacgctggggctgatcgccaagatccaggactggtcggtctacatcgaccgcatcacgaaactgatagaccgcccgcgcgggcaaaacgccgccgtcgctgtcaccatcgttcctcagcaccgcgcacgaggtgtcacgctatgaaggtcggcttctgggatgcgcctgacggcgccgagcaaccggtcagcgtgtttccgatcggcgaagaaagtctcaacgcgtcgcacggcagcctgacggcagccggcgctcttgcaaaacttgcaacgctcgacagcgcggaacttgccaagagctgtccgaacgcggtcgcgctgctctcgaaaatcgcggcggccgtcgcggcccagaaggcggatgcgccaacccagctgtttcgtctcgccaacctcaacgaactcgagagcaagctcgtggcggacgtgctcggcgagggggaggtcggcggggtcgtcgcgctgccggacggatcgctggcgcagatccaggaatcggtcctggccggcatctggcgcgtgcggctcgagaccgacgcgacctccgaatacctggagatcggtgccattccggagatcgtcagacgcgcggccgccgatttgacctccgccgatttcgagatcgggcaggcgccggagggggcaatgaacgtgctgccggtgcttgcggagatccgcgaacgcgcgctggcctggcggcccggcattcgctcgcagatcatcaatttcacgctgttgccgatgagcccggtcgatatgagcttcctgcaggatacgatccggaacggaccgatccagctcgtctcgcgcggctacggcacctgtcgggtgctatcgaccggcatccgtaatgtctggtcggtgcagttcttcaacgccatggacaccatcattctcgatacgctggaagtcggcggtgtgccgactgtcgcacttgcagcggacgaggatttcgaggattccgccgagcggctgcaggagatcatcgaggcctacttcaaatgaccgctttcgagaattttggcgtgcgtcaggacgttgccgaagccacgcggctggaatgcggcatctgctggactgtctacgatccggccgacggcgacgaggtcgcgcagatcgcgcccggcacgccgtttgctgcgctgccggatgagtggcactgtccgaactgcgacgcgccgaagtcaaagttcatggcgatcgagtcatgacggcgagcgcgccaagacctgacgtcgacgccgtggcgtggggcgagcttctggccgaaagctatcgtgagatcggcgagcgcgcgatgcgagatctgccgatctacaacgaagcgctcggcgtcgaggcggtcgggtttcgtcgcttcaacggcacgatcgtcggcgtcatggtcacgccgtggttcatgaatgtggtgatgccgccgagcgcagtgcgggacggcccggctgcgacgatgcgcatccgcttccccgcaggcgatatcgaattcaccctgagcgaggtcggacaggttggccggatcgcaagctgttcgctgttctcgccgatgttccagttcgcggacatggcggcggcgcgggcgacggcaaaagccgcgctcgccgaactgatgttgccggcggacagcgaggaggcggttcgtcgccgcgagcccgcgacaaccccgatcgatcggcgcaacttcctgcgcggtgctttgacggagcggcgcggatgagccttgctttccgcaacgagatcgacatcacggtgtggcttgccggcgccgagatcgccgacgtggcgatccagccgcgcagcaggccgccgctgacgcggctgtttgcgggaaagccggcccagtccctgcttccggtgctgccgcggctgttctcgctgtgctcggtcgcccaccagatggcgttcctgtcggcggtcgaagcggcgcaggggcaggaggtgaccgaagcgaccgcgcgccgtcgcgtcactccggtcgttgtcgaacggctgaccgaattgctgcgggggctgtttgttggaccgtttgcgctcaatggcaccagcgcagccgccgttcgtgccgtgctgcaggcaagcacggtcctcggcagcgcgagcgaagccgtgtcggatcctttgcggggtgaggtgctggcacagatcaaggctgcgctcgctgctctggggatgaccggcgaaggccaggcactcgcgccgggcagcgcgctcgccgcctatgtcgaacgaggcgggggtgagggattgtcgccgccggcggtcgagcaatcgtttctcacagcggcggatgatctcgaggtcgtgacgcgtctgctcgcggacggggcaacctattccgacgcgccggaactctgcggcagaattccggagaccggtgtctgggcgcgccgggcgcggcgcgaacccgtcccgccggccgcgggcacggccgcgcggctcaaggcgcgcatcgccgagatatcgcggctgtgcgcctggctcgagggcgttgatcgggatgcaggcgacggtgccatcgcgagctatcggctcggcgcaggcaagggcgcagcggcggtcgaatgcgcgcgtggccggctctatcacgccgtctcgcttgacgacggggatcgcatcgtcaggttcgagttcctggcgccgaccgagtggaattttcacgcccgcggaccgttggttcggagcctcaagggggcgatgctgtcggctggccggagggggcaggatacggtgcgcgcactgatcgggtcgttcgacccctgcgtcggtttcaacctcagcttccgtgagacgggccatgcatgagatggcgctgtgcgagggcatcatcggcatcgtcgaggaggaggcgcgcaagcgttgctttgccaaggtgaatgtcgtttgcctggagatcggcgcgctcagccatgtcgccccggaggcgatgaaattctgcttcgaggccgtcgcggcgcaaaccatcgcacgaggcgcaaggctggagatcgtcgaaacaccgggaagggcctggtgcatggcctgttcgaagagcgtcgagatcaagcagcgctacgagccgtgcccctcttgcggcggctatcaattgcaggtgacgggcggcgaagagatgcgggtaagggaactggaggtcgactgatgtgtacggtctgcggctgcagcgacggcaaggcgtccatcgaacacgcgcatgatcatcatcatggccatgagcatgaccatggccacaaccatgatcatggccacggcggacaccaccatgatcataatggttatgggcgcggccacgatcatgtccaccatcatcaccatgatcagccccgcgatggggtgggattgctcgattgcggcgcgaatccggccggccaggagatcgcgggcatgagcagcgagcgcatcatccaggtcgaacgcgatattctcggcaagaacgaccggctcgccgccgagaaccgcgcgcgcttccgtgcggacgaagtgcttgtgttcaacctggtttccagccccggcgccgggaagacatcgcttctggtccgcgcggtctcggagttgaaggaaagcttcccgatcggtgtgatcgagggcgaccagcagacctccaacgatgccgaacgtatccgtgccaccggcgtgccggcgatccaggtcaacaccggaaagggctgtcatctcgatgccgccatggtcggccaggcctatgaccgtttgccgtggctgaacggcggcatcctgttcatcgagaatgtcggcaatctggtttgccccgcggcgttcgatctcggcgaggcctgcaagatcgtcgtgttttcgaccaccgagggcgaggacaagccgctgaaataccccgatatgttcgccgcggcctcattgatgctgatcaacaagatcgatctcgcgccggtgcttgatttcgaccttgccaagaccgtcgaatatgcgcgccgggtcaaccctgggatcgaggtgatgacggtatcggcgcgcacaggcgagggctttgcgacgttccatgcctggattcgcaagcgggctcgcgcgacgaagccggccgcaatgtcggcggcggagtgacggatgggtggcgaggtcacagcactgggcggccggcggctacgtctgcatgtgcgtggcgccgtgcaaggcgtcggatttcgcccctatgtctacggtctcgccgcgcgctatcgcctgggcggcttcgtcgccaatgatccccacggggtcgtcatagaggttgaaggcgagcgtgccgccgacttcgtcacggcgctaccgctcgaaaagcccccgctcgcccgaatcgacgaaatctcggtgcaccctgttggggcggtggcgagtacggagttctgtattcgcgcgagcgagcagggcagggtgtcgacgcgcatcgtcgccgatgccgctacctgcaaggaatgcctgcgcgagctgttcgacccgaccagccgcttctatcgttatccgttcatcaactgcacccattgcggcccgcgctataccatcgccgagcggctgccctatgaccgtccgaccacggccatgaagggctttgcgatgtgcagggcctgtgcggatgactacgtcgatcccaacagccgccgcttccatgccgaggcgattgcctgcgcgcagtgcggcccaaggctcagccatgagatcgcggacattgccgacgcaatcgctggcggcagtatcgtcgcgatcaaggggctcggcggctatcagcttctctgcgatgcccgcgacgaggacgtcgtacggcggctacggcagcgcaagcagcgcgaccggaagccctttgcggtcatggtcggatcggtggatgcggttgcggagatcgccgaggccgacattaccgagcttgcgttactgcagacgtcgccacggcccatcgtgctgatgacctcgcgccatcggctggcgccggcgatcgcgccgggcctgtcgcgtctcggcgttgtgctgccggtcgctccgctccatcacctgatcctcgatgcgctgaactcgacgcatccgcggaccggcgaggcgtgggcgatcgtcgccaccagcgccaatcccggcggcgagccgctcctgatcgacaatcgccaggccgaacggcgccttgccgacattgccgacctcatcgtcacccatgaccgcgacatcgtgagccgggccgacgattccgtggcggcggtggtcgcgggccggacgcaattcattcgccgtgcgcgcggctacgtccccgagccggttcgcctcgcctgttcggtgccggcgatcctcgcggtcggtggcgcattgaaatcgaccgtgacgatcacccgtggcaacgaggcgtttgtttcccagcacattggagacctcgacaccgcggaaggcatcggcttcttcgaggagacggtgcatcacctgctgtcgacgctggacgtcgagccggtggtcgtcgcccacgacctgcatccgaacatggcctcgactcgtttcgccgaggccatggggaagccgctgatcgcggtccagcaccaccacgctcatgcgggctccgtaatggcggaacatggcgtcgcagggccggcactggcgctggtgctcgatggcttcggtcgcggcagcgacgggggcagttggggcggcgagctccttgccagcgacggtgctcgcgtccggcggctcggacatctggcgccgatgaagatgccgggcggcgaccgcgccgcgcgcgaaccgtggcgcatgggcgccagcgcgctgcatggtctggggcgaggcgatgcgatcgcgacgaggttctgtgcacaacctcaggccgcgcgcctcagcgccatgctggaccagcctggggtgccgacgacgaccagcgccggccgcatgttcgacgcggcggcggggctgctgggcctctgcgagattcagagctatgagggcgaggctgcgatgaagctcgaggcgcatgtccgcacaccgcgcatcgccaaagacggctggatcatcgaaagcggcgtagtgtcgctgtctcccttgttcgcgcgcttggctgccgggacgatcgatcctgtcgaaggggccgagctgttccacggcacgcttgccgctgcctgcgtcgattggatcagccgtgcggcaggcgcgaccggcatcacgacggtcgccttgagcggcggctgcttcctcaacagggttctgtcggtggagatcgaacgcggctgcaaggcgatcggcctctcgccgctcctgccacgccagatgccgcccaatgacggggggctcagcctcggacaggcctggattgccgcgctaacattcctcgaacggcaaggcctggaaggaacagtctgatgtgtcttgcgatacccgcagaggtcacaaagatcctgcccgatgagatggcgatcgtctcgatcgacggcgtgagcaaggaaatatcggtcgcgttgatcgaagaccttgccgtcggcgactacgtgatcatccacgtcggctacgccttgaccaagatcgatccggacgaagcgcggcgcaccctcgaattgttgtgtgagctgagcgctgaggcacacggagccgcgtcatgaagtatgcggatgagtttcgcgacaaagcgatcgcattgggacttgcgaagacgattgaagcggagaccgatccgggaaggccgtaccgtttcatggagttctgtggcggccatacgcatgcgatctcgcgctacggtctggaagacctgctgccgaagaacgtgcggatgatccatggccccggatgcccggtctgcgtgctgccggcagggcgcatcgacatggcgattcgtctcgcggagcgtccggaggtcatcctgtgcgtctacggcgatctgatgcgcgtcccgggctcgcagggcgcctcgctcctgaaagcgaaagcgcgcggcgccgacatccgcatggtctattccaccattgatgctgtcaggatcgcggaggagaatgctggaagcgagatcgtgttcttcgcgatcggattcgagaccacgacgccgcccaccgcggtcatgatccggctggccgagaagaagcagctcgagaacttcagcgtgttctgcaaccacgtgctgacgccgccggcgatgcagaacattctggagagtcccgacatccgcaagatcggccgcatcgagatcgacggcttcgtcgggcccgctcatgtctcgaccatcatcggcaccgcgccttacgagtttttcgcggaagagttcggaaagccggtggtgatcgcgggcttcgaaccgctcgacatgatgcaggccatcctgatgctggtgcgccaggtcaatgagaacaggcatgaggtcgagaaccagtatagccgagcggtcacgcgcgacggcaatctgcgcgccaaggaggaggtctccgacattttcgagctgcgcgaccagttcgagtggcgcgggctcgggcaggttccctatagcgggctgaagctgaagcgcacttacgcgaaatacgacgccgaggtccgcttcggcatgagcgagcttcgcgtcgatgacaatccggcgtgcgagtgcggggccattttgcgcggggtgaagaaaccggtcgactgcaagctgttcggcaccgtgtgcacgccggagacgccgatgggatcctgcatggtctcctcggaaggcgcttgcgccgcgcattggacctatggccgcttccgcgaccatcagcagaggcgggcatcatgagggcctatcagcgcaagctcgatatcaagaacgggtgcgtcgacctgtcccatggatcgggcggccgcgccatggcgcagctgatttcggggctgttccacgaggcgtttggcaatgaatggctggcgcgaggtaatgaccagtcggcattcgatgtcggcgacgggcgcatggtcatgacgaccgatggctatgttgtctcgcccctgtttttccctggcggagatatcggttcgcttgcggtgcacggcacggtcaacgacatcgccatggccggcgcaagaccgctttatctctcggcgagcttcatcatcgaagagggcttccgcttctgcgacctcaagacgatcgcggaatcgatgggcgaggcggcgcgcgtcgccggcgtccacatcatcactggcgacaccaaggtggtcgagcgcggcaaggcggacggtctgttcatctcgaccgccggcgtcggcgtcgtgcctgatgggctcgatctctcggcggagaacgcgcgcgtcggcgatcgtgtcctgatctcgggcaccttgggcgaccacggtgttgccatcatgtcgaagcggcagaatctgaccttcgagaccgagatcgtgtcggattcggcgccactgaacgatctcgtcgccgaaatggtcgaagccggcgggcgcggtatccggctgatgcgcgaccccacgcgcggcgggctcgccgccaccttgaatgagatcgcccaccagtccggcctcggctttcacctcatcgaggaacagatcccggtcaagccgggcgtggcggcagcctgtgaactgctggggctcgatccgctccatgtcgccaacgagggcaagctggtcgcgatcgttgcgcccgacgtcgccggcgcggtgctcgcggccatgcgcggacatcggctcggccgcgatgccgccgacatcggcgaagctgtcgcggacgatcatcatttcgtgcagatggcgacgagctttggcggcggccgtatcgtggactggctgtccggcgagcaattgccgcggatctgctgaggctcacgatgcgcatcctgctcctgtcgcattcgttcaacagcctgacgcagcgacttcatgtcgagttgcgcgagcgcggccacgagatctcggtcgagctcgacatccatcccgacgtcacgcgcgagagcgtggcgctctaccagccggacctggtgatcgcgccgttcctcaagcgggcgattcccgaagacgtctggcgcaacgtgcgctgcctggtggtgcaccctgggccgcccggtgatcgcgggccggcggcgctcgactgggccattctcgaaggcgcgaccgaatggggcgtcacggtgctccaggcggatcgtgagtttgacgccggcccggtctggaccttccgcgggtttcccatgcgccgcgcgaccaagtccagcatctatcgcagggaggtgacgacaggcgccgtcgaggcggtgctggaggccatcgatgcgatcgaagcgggaaggccgacgccgcagccgatgcacgtgggcgatccgcgcattcgcgtgcgcgggccctgccgccggtcggaccgagcgatagactggcagcacgacacgactgagaccgtgctgcggaagatcaacagcgccgacggcacgccgggcctcgtcgatagcctgttcctccaggacgtgcggctcttcgatgcccatgaagcgcgagagatctccggcgttcccggcacggtcgttgcacaatgcgacggtgctttagcccgcgcgacggtcgacggagcaatctggatcggccatgtacggcagcttgcaccgaagagcctcaagcgatctgcggcaaaggtgttcgccgagcaagccgcgcaacttccgcggcgacccggttgcggctatgctcccattcagtatcgcgagcgtggcgaggtcggcgaactgcagttctctttctacaatggcgccatggcgaccggcgactgcgaggcactgctggacgcctaccgggccgcgttggcgcggccgacaagagccctccttctgaccggcggctgtgactattggtcgaacggcattcatctggccgagatcgaggccgcagacagtgccgccgatgaatcctggcgcaacatcaatgccattgacgatcttgcacgcgcgatcatcgagacgacggatcggctggtcatatcggtcattcgtggcaatgcgggtgcggggggcgtgttcttgagcctggctgccgacgaggtctgggccagtgatcaggtcgtcctaaatccgcactacaaggacatgggcaatctcttcggctccgaatactggacctatctgttgccgcgtcgcgcgggcgcagagaattcggagcgaatcacgcagtgccggctgccggtgggtgtcgccgaggcgcagcgcctcggcatcgtcgatcgtgtgctcgtgagcggcgggtgcggacgcgaaagcctcgaggagcttgctgctgcagcagcttcggatcgaggctttgcggcgcgtctggccgacaagaagcggcgccgtgcggcagatgaggccgagaagtcgctgcaggcctatcgtgacgatgagttgcggcggatgaggctgaatttctacggctttgatccgagctaccacgtcgcccgctacaatttcatccacaaggtgccgaagtcgcgcacgccgctgaccatcgccggtcaccggtcgcggcgcgcagccggacggcccagaggcatggctgtgccctcatgagcattcagggaaccattctcgtcgttgacgatgaggtccgttcgcaggaggcgctgcggcgcgtcctccgggatgatttcgaggtgctttgcgccggcaatgcggccgacgccgagaagctgctggagggtgagatcgtccacgccattctctgcgaccagcgcatgcctcatgaatcgggcgtgagcttcctgaagcgcgtgcgtgagctctggcccgatccggtgcggatgatcatctccggctattcggactccgaggacatcattgcgggcctcaacgaggccggcatctatcaatacattacgaagccgtggcagccggatcggctggtcgacatcgtgaaggaagccgttcagctctatcgtctgcagaaggagacggaaacggctggcgtcgacgtcaaggcgacacccgggcacatcaagaaggttgtctcggtcaaacgcggggtagccaagcagctctatgatttcgatcgcatcgtgcattcgcccgacagtcccatgcacaaggtcatcgagctgggaaaacgcgccgcggactacgacatatcagtgctgatcacgggcgagtccggcactggaaaggagctgctcgcgcgcgccattcactacggctccgcccgcgctggcaaggccttcgtggtcgagaactgcggcgcattgcctgacgaactcctcgaaagcgaattgttcggctgcaagaagggcgccttcaccggcgcctatcaggaccggatcgggctgtttgaggtcgccgacggcgggaccatcttcctcgacgagatcggcgaaacctcgccggcgttccaggtgaaactgctgcgcgtcctgcaggagagcgaaatccgcccgctcggcgcacagcgggtacggaaggtcgacgtccgcgtggtggcggcgaccaaccgggatctcgaggccgaggtggacgcgggccgcttccggcgcgatctttattatcgcctggcggcgtttccggtgcacatgccggccttgcgcgagcgaccgatggatattccattgatcgcgcagggggtgctgtcgtcggtgaagacgtccttcaaccggccgggcctgcgatttgcggccgcggcgctcgatgcattcgctagttaccactggcctggcaacgtccgcgagctgcagaacgagatccagcgtatggcggtgctggcggatgcggatgaattgcaggctccttcgctgctgggtcggcgtaacggccggcagccgggcgccgcaatccacggccgattgaatgggtcggcgaccctgaaggacaaggtggaggatctggagaagtcggttatcatcggctgcctggaacgttacgaaggcaatatcagccgggtcgcgagcgagcttgggctctcgcgcgtcggtctcagaaacaagctgtccaggtacgatttgagaaaaaatggcaaaggcgacgcatcctcctgacgccggcgaaaccgaaccactgctcaagctgatcgccggtcgcggtgcgatcgagctcgaccatgagcgcgagggcgcctggatcgaggtcattcgcaagatggacgaggtctattccgacctcttgcgctatgaagtcgatctcgagcacaagaatgcggaactcgaggaggcgcaggcgttcgtcacgaacgtcatcgaatccgtctcggacatcctcatcgtctgcgatgcaagagggttggtgcagcaggtcaattcggcgtttcagcacacgctcggctgcagcgccgcggacatcgtcggaaagaacatcgctgatgtcatcgatgccccggacaaggccaagctggtcccgctcctgaagccgcgtagcgcctccgacgtcgtcgacggcgagctgcgattttctggcgcaggcggccgctccgatctgtttgcgatcaacggatcaccccgtcatgatcatcgcggccgattcatcggcgtggtgttgacggggcgtccgatcggcgagcttcgccgcgcctatgaggagctgcacaaggcgcatcatgaactgcagcgggcccagcggcagctggtcgagcaggagaagatggcgagccttggtcgcctcgttgcgggggtcgcgcacgagctgaacaacccgatcagcttcgtctatggcaacgtccatactttgatgcgctaccgcacggcgatcgtcacctatctcgatgcggtccacggcaaatccggagagggcgatctttcggctcaaaggcgaagcctgcgcattgacgagatcttggaagatttcggcccgctgatcgaaggcaccatggaaggggcgatccgcatcagcgagatcgtcaagaacctacgccgactctccttcagcaagcttggcgaagtcgagcgcgtcgacatcgagcggctgatcaacaccgcggtgctgtgggccgtgcgcaccaagcaggtgcgcatcgatctgcagatcgagatcgaaccggggctctggatttccggcaatgaggggcagctgcaccaggtgatcgtcaatctcgtggagaatgcgatcgacgcgatgcgcggcaccgagtcgccgcggctggtcgtctcggcggcgcgccagggcgacgaaatcctgttccggatatcggacaacggtccgggaatcgaccaggatcacatcggccacatcttcgagccgttcttcaccaccaagcgggtgggcgaggggacagggcttggcctctggatcagctatggcatcgtgcgtgagcacggcggcgagctgctcgctgggcatgagccggggggcggcgcaacattctccttcgccttgccggctgcgtaggcgcgccgaccgtcacgattgttgggacatggtcaggcggtcgcgtgcagcatgacggatcttgcgttgggctatggctggcacaagtgcgggcgactccgccgcgatacgcagcgcaaagtaggcaatggtcgcttgaaggccgtccttcagagccacccgcgggcgccatccgaggatcttctctgcggtatcgatcacgggcttgcggcgcttgggatcgtccttgggcaaggcttcgaaccgtagcggggaggtcgattcggtgcattccagcactttgcgagcgatcgcctcgatggtgacctcgtggggatttccgagattgcatggacccgtaaccgaggcggggctctccatcaggagttgaaggcctcgcacgagatcatcgacgaagcagaagctgcgggtctgcgtaccctggccgtagattgtgatcggctctccgcgcaaggcctgcacgatgaagttggagacgacgcgcccgtcgttctcgagcatgcgcgggccgtaggtgttgaagatgcgcgcgaccttgatctcggtcccgtgctggcgatgatagtcgaacatcagcgtctcggctgcgcgcttgccctcatcgtagcaggcccgaggcccgatcgggttgacgttgccgaggtaggattccggttgcggatgcacttcggggtcgccgtagacctcgctggtggaggcctgaaggatcctggcgcccttctgccgcgcgagttcgagcaggttgatcgagccgagcacgcatgtcttcatcgtcccgactggatcggtctgatagtgccggggtgaggccgggcaggccaggctgtagatgcggtcgatatcgccctcgatctcgatggggtcgcgcacatcatgctcgatgaagcggaagttcgggtgattgagcagcggccggatgttgtcggtggtccccgtgaacaggttgtcgacgcagatgaccgtgttgccgcgttgcagaagtgcatcgcagagatgcgatccgatgaagccggcaccgccggcaaccagcgccgtcggcgaccggcgagaggcatggatgcgggtctggagcgtcatgatactgcctttcagagttgggcgacctgcatggggcgaacgaccgggagcggtgctgccttgcggcgccgccgcgcggatgcctcggcgtaataggtctccagttgccgggcgcgatgatcgggagtgtggtcggcgaggacccgccgccgtgcgttgcgagcgatcgtgcgccgttgctcctcgggcatgtcgcgcaagatctggacgacgtcgcgagggttggctgccagcaggatctccttcgacggcgcgaatatcgtctcgatcccggcccatcgatccgagatcacgggcgtgccgcaggcggcggcttcgaacagccggacgctcggcgagaagcccagcgctttcatgtccgcgcgggtggcgttcagcgtgaagcgttgcgcggcgtagaacgccggatgctgctttggcgagaggtgctcgatccgggagacgttggcgggccaggcgatattcgcgggatactgcgcgccggcgacgacgaattgctccgaggcgagcgtgcgcgccggcgcaagcagcaattcgtcgagaaccggctgccggtcctcgctgtaggtgccgagatagccgagtgcccattccggctgcgcctgcttcggcgtgtagacctccggatccgcgctgcagtaaaggacacgcgcgagcggactgccgtagctctgctcgatcatgccgggcaccggaccaccggtgaaggacagataaagatcgaagcgcggaatcatcgcgggggagagatagtcgaggccctgctcgagccttgccagcgtgactggcgtgtcgatatcgtagaatgcggtgacgcccctcgcgtgtgtcgtcacccattcggcaatcgcgatgccgnnnnnnnnnngcgggatgtccttcaagggttggtacagctcgaccgtccatgcagagggcttggtcaggtcgcggtgatccctgtaccaaggcacgtcccgctccagaaacgtgacgcggtgacctcgtcgcgccagggcttcgatcagggcgcggtaggtcgtggcgtgaccattgccccaggacgaagtgaccgaaagtccgatgacgacgatggagaggttcattctgctgcctcgattcgcgagctgcgggcgacgaagagatcgttgaattggtgggcgcgttgccggtaggtgtgctgactcaggatgcgcgcgcgggcgcggcgggcgatcgagcgggcccgctccggatcgagcgcggcgaggtgctctgcgaccgcggctccgtcagcggcaaccagcacctcgcgatcgggttcaaggaagtgatcgatgccggcccattgatcggtgatcaggcaagcgccggcgccaatcgcttcgaacacgcgcgtcggcggagaaaagccatagcgcgccatgctgtcgcggttgacgttgagggtcgcgagcccggagccgaagaacgcgttgtgatcggcggtgccgacatgaccgactttgcgcagattgccgggcgcgtccttgtcgtcccagccggaaccgccgagcacgaaggacctctcgggcaggcggcgcgcaacgtcgaggaagaaatgctccacgcgcttctcgcgatcaggcaggcgattggccagcaggctgagatcgcaggcgaagcgcggattggacggtgccggaaaatgcgtggctggatcaagcgcgttgtagatcggtacgcaatcccgcgcgcccatcgatcggtaggcggacacgaccccatcgcccccgccataagtcaggaccatgtcgtaggacggaattgcgcgacgcagatgatgctgcgcatcgatttccatcgcttcgagcgtggcaggagcatcgacgtcccagtagatccgcgtcagccgcgtcggcagctccgcgacggcgttctccagctccagatcgaagacgccgacgccgctcgccttgaccagcatgtccgccgatttcgccgctgcatcgagcgagtggcgccagccgtccggggtcgcgggatagacgacgaccctggcccattccgggtcaccgatatcccgatgcgcctggcgctcgaaggcgtcgggttcgtagaaggtgacgtcgtggccgagcgccgcgatctccttcagcataccgcggtaataggtggcggcgccgttccagtaggatgagacgaggctggatccaaagaagcagatattcacgcgacggctccgatatcatgctgggactgtgactggaggcccgagccccggatgtcggccacgatgccgacaagctgctccgcccggtgacggcaggtgtgacgctccctgatcgtctcaagtcccgtattcaccatcgcggcggacatctcccgatccccgcgcagggaacgaagcgcacgcgtcatctgcgcgccatcggcaacactgagataggcgccatcggggaagagaccctctgcgtccgaccagggtgccgaaaccaggggaatgccgcaggccagcgcttcgaacacgcgaatggtcggaatgcccggaagcaggcgcacgtaaggcccgcgcggcacatggatcgtggtgtgtgcgccggcgaaggcgagcgggacccagtgtgctggcagccagccgccataacggatacccgcgctcctgatggtgaggagtgcgtcatctgaatagcgcacgccatggaggcttgcgcggagcttcagttccgccacgggccccaccaggaattcgttgagttcggcgctgcgctccccatcgccccaattgccgatccagaccagatcgtcggcgcgctcgacttgcggcagcggatgatacagcgcgacatcggctgcctcgtgccaggtgaaggcccggtcggcccagccaagcttcagatagatctgccgaagcacctcgccgaaggcgagcacgccgtcgaatccgtcgagatcgaactgcgcaagctcctcgggcgcactgacggcgcgatgatgggtgtcgtggaacagcaacgtgaagggagcgccttgcgcgcgtcggcgtccgatctgcgcgatgagatcgggcggattccattcatgcacgatgacgagatcggccccgtccagcgcccgctcgagatccaggctggcgtcgtagcggcggatgtctattccggcaaagagggtgggaatctcctccatcgcatgactgccgccttcgcgcatggcgttcagccggctccagccgtcaatgggctcgaacacgacgacctcgtgcccgagcgcgtgcagctccctcgcgtagccacgcaggaaatgcgcattgccgttgttccagcacgaggtgaacgcatgatagaacaggacgcatttcatgcgcgcacctcgatctggctcggcgcggtcttcccgctggatgcgatcaggtcctggtagagaccaagataagcgctggtcatgcgcatcagcgaataggtcagggattgttcataggcggcgcgctgcagccgtgcccgagccgcatcgtcagcgcaaaggtctgcgagggtttgatgcaacgcatcgcggtcggtcggatcgaagaacagggcggcttcgcgccacaattcgcggaacgtcgggatgtcggagaggaccagcgcgcaacccgcggccgccgcttccagcacggcgaggccaaacggctcatacaaggcgggactgacgaagatggcagcgtgctgcaagcgcgcagccatggcttcgtgcggcagctcgccgagccgggtgacagccgtcgacagccgtgcgtcaacggggccggcgatctcgaccggccagtccagcccgggcgcagcggcggcgagagcttcaacattcttggcgcggtcccacaaccggccggccgagaagatcaaatcctgcttacgcccggtgggatcacgaggcgtaattccattccagatcaccgcgccgcgtgatcgggggctatagatcgccgtcatgtcctcgtggaaggcctggcttggacacacccaggcctgcgccgcgtcgagcgctgcagcgacgcgttcgctgtagcggcgccatctcggctcgccgagccaggacgtatcgtggcaggcgagcgcccaggaatttacgcaggaatgcgccaccagcacggtcggagcatgccaggcgaaggtcgcttcgcgaaagctgttcagatgcacgatgccaggcttcagcctggcttcgagtttagtgagaacccgtcgtgcttcggaaacgttttgcccctccgggtcttgccattcgagcgcgaggtccgtctcgaccaggtttactcgcgtgccacgcagcatctggcgttgatcgattcgagcgcgcgggcctagcgtgacgagcgtgacgtcggcgccggccgcggcgaggctgccggcgagggcgcaggaataagtccatacgccaccaaccgtgtcggtcgtcatcatgatcctgatgtccgcgcccgggctcatgaggccacctggagttcgaggctgtcgagcggggcggggcgatcgttctgcacgtcgctgaactgatcgaacatcgcgagatagtgccggtgagcgcgctcccacgcgaaatcgtcgggctcgccccagagcttgcggtagtcaggcgagccgggatagggatagagcggcaccggatcgttggcccagacgccggcatcctgcatcgtgcgccgccagcgctgcacgatgggatcgtcatcctccggaacctcgatcagattggcctgcacgaagggcacgtggcggcgggcctcgaccagccgatcggcgagctgatccgtggtcatcttgcagttcttggcgagtgctgcgcgcccttccacggtcaggctctcgatgccggcttcgatcgagacgcagccggcgcggccgagcagcgcgagcatgtcgggcttccacaggtcgatgcgcgtctgcacgccgaacttcaggccccgggctgtcaacccttccagcagctcccggttgggaagaaagatctcgtcgatgaagtagacgtactcgattccgtgggtgcgcagacgatcgatctcgtcgagaacgacggctggcggccgcttgcggtaggcgttgcggaaattttccttggcgcagaacgtgcaattgtaagggcagccgcgcgaggcctccacctcagcgcccggcgcaatcggctcggcctcgaagcggtggtggtgatgatggtgccgccggatcatctcgtccggccaatggagtgcgggctgatcgctgaaggccaccgcctgtgggccgccgttgacccggagcgagcgaccgtccaggaagcagaggcccggaaagtcccgctcgccgttggcgagacgcagcagcgatccctcgcactcgcccatcacgacgatgtcgacgccgagtttcttgaaggccgccttcggcgtcgtggagccatgcgggcccaccgcgatcagcgtcggcgcaaggtcccgcacagccaatgcgagctgctgcggcactcggagctccggcggcgcgcagcgccagaacagatatgtcggcgcggtggtgatgacgatctggtcggggcggaaggcgcgcagctcggcctcgatctcgtggagcgagagatcgaacatatgcgcatcgagcagcagcgtcttgtgcccggccgccttcaggtgacgctcggagatgccgagttcgagcggcaggtgaggggaccggcagccaaagtagatgcttccggtaaaatcccagttcggattgatgagggccacccgcgtcatgccagggcctcgcttctatcctgtgatccgaagcggctgtcgagccaggtgtggagcgagcgcaggccttcggcgagcgacacttgcggcgtccagccgagcgcggcggtcagcgcctgcgtatcggtcacgtaccagggctgatcgcccggtcgccagtcggcgaagcgatatgtgacggtgcgacccgtcagttcggtgatgcgatcgatcagctcgagcaggctgaccgcattcgccggaccgccaccgagattgaagaccctcccgcgggccagcgcgatgtggtcgagcgccgcgagccaggcgttcaccgcgtccgagacgtgcagcgcgtcgcgaacctgcttgccgtcgccgtagatcgtcagcgggttgccgcggatagcgctgagcaggaaatgcgcgatccagccctggtcctcggtgccgaactgccgcggtccgtagatgcagctcatgcgcattaccgcggtctggagcccgaacactcttgaatagtcgtggacgtattgatcggccgtgcccttggagcatccgtaaggactgtagaaatccagcggtgcgctctcggagatgccgccgctgagcaaatcgctgaccggcgtgtagcggcggccccggagcgcaatctcgctgtcttcgatcaacctcccatagaccttgttggtcgaggcgaagatcaccggcgccgcgctgttatgcaggcgaacggcttcaagcacgttcagcgtgccgcgcgcgttgatctcgaaatcggcggcgggatcgctgacgctgtcggtgacggcgacctgagccgccaggtgcagcacggcgcgcgcctcgcgcacggcgtcgatgaccgggatcgggtcgcggatgtcggcaacggcgattgtgatacggtcgccatgacgggatttcagccattgcgcgttctcgcgcacaccggcacgggcaagattatccagcaccagcacgcgatcaccgcgatcggcgaggcggtcagcgagattgcagccgatgaagccgcagccgcccgtgaccagcacgtgtctgttgtctcgttcactcatcacgcgaccagccctcgttgcaccagctcacgggtcgcccgctcggcctgatcgtccgcgatctggtcggcgaggtactcggcgagctcttcaaggccgtccttgaacgcgacatgcggctcgaagccgagcaggtcgcgtgccttgccgatgtcggcgaagcagtgccggatgtcgccggcgcgatatttccgcgtgatctcgggcgcgatatcacgccgtcccatcacctgggccagatcctcggcgaccgagagaatggtgcggctctgccccgagccgacgttgaagacgtcctggctgtggtcggcttcgagcgccattcggcaggcgcgggcgacgtcgtggacgtggacgaagtcgcgccgttgcatgccgtcctcgaagaccagcggcggccggccgttcagcagccgagcggcgaagatcgccagcacgccggtatagggattggacagggcttgccgcggaccgaatacgttgaagaagcgcaagcccacggtcggaaacccgtaggccttgccggtgatcaggcacatgcgctcctgcgcatacttgttcagcgcgtagatcgagctcagggacggctgcttcgtttccggcgtgggtatgggatcgagcggatcgcctgcggaatcccgtagttcccactctccttggcgcagctgctcgatcggccgttcgtcgcaggcgacgactgtcccgctgccgtcacgatagaggccctcgccgtagatgctcatcgaggatgccaccaccagccgtgcggccggacgcttggcaagcgcctgcagcaacacggcggtgccaagctcgttggtcctgacatagggctcgatgtcgtacatgctctggccgacaccgacggcagaagcgagatgcagcaccatgtcagcgccgcgcaatgcctgttcgacggcgagagcatcggtgacgtcgccgacgacgagctcagcgtcatcggcgagataggcgggtcgctgacggttgccgccgtgaacctgtggggagagattgtcgagaaggcgcacgtcatagccggctgcgagcagcacgtcggccgtgtgcgagccgatgaatcccgcgcctcccgtaatcaatactcgcgtcattcatcgctccgcgccgtatgggtccgatcctttcgggatcggccgaggatgagagttgaagcgcgccttggcttggtcgggcgacccgcgcgccagtcacgtctgggaggtagaagcggtgcaaggaatgttcgttcctgcgaaacctacaaacgataatttctctaacctggatcaataacccaggtgaatccgctcgcgacggaatctagaagtgtgctccgtgagcgggcgccggcagatcgaggtgtctcgcaacgctcgcgccaatgtcggcgaagccagctcgctggccgatcggtgcgatggattgcgccgtccacgccaggatcgggacctgctcgcgcgtgtgatcggttccgctccaggtcggatcgcagccgtgatcagcggtgatgatcagaagatcgtcgtctcgcagtcggccgagcaactcgggaaggcgggcgtcgaaggcttcgagcgccgctgcatagccggcaacgtcgcgacggtggccgtagagcgtgtcgaagtcgacgaagtttgcgaacagcagcccgccctctgcaaggcttgccagcccgtcgagcatggcatcgaacagttcggcattgccgtccccgcgcaggttccgtcctgtgccgcgatgggcgaagatgtcgtcgatcttgccgatcgtcacgatgtcgcggccgcagctttcggcaagatcgaggatggttcgttcgggcggcgggacggcgaaatctcgccggtgcgaggtgcgcttgaagttgtgtgcgttggatccgatgaacggacgcgcgatgacgcggccgatgttcaggggatcgaccagtcgcctcgcaaccgtgcagagctcgtaaagccgatcgagcccaaaggtctcctcgtgcgccgcgatctggaacacgctgtcggccgaagtgtagcagatcggctcaccgcttcgcatgtgacgctcgccgaattcggcgatgatgtcggtgccggaggcgtggcaatcgccgaggatgccgggcaatccggcccgctcgcaaaggttctcgacgagatcgcgagggaagcagggtcgaacttttggaaaatagccccactcgaacgtgacaggcacgccggcgatctcccaatgcccggagggcgtgtccttgcctctggatatttcgctcgcgcatccatagcgcgcatgttcgagccgaccgtcgagcccaggcgggacgcgcccggtggcaaggcggcaggcctgaccgaggccgagcgcgaccagattgggcaggcgaagcggcccctcccgttgcgtgctgtcgccatcgccggccatgcacgcatccgcaatgtgacccacggtatcggcgccttcatcgccgtaattgtcggcatcgggcgccgcaccgatgccgacggaatccatcaccaggatcagggcacgcatgtgggctcccggagcagcgaagcagccagcgatgaggagagaccggttttcgcacaatagcggtcgaccatctgcgcgcagaactcggcgaattcgttcacgtcgtgcggcgggctggtgtgatgaggctcgaggccgcggtgctccggcgtgaagcagaaggtcacggtgacctcgaactcggcgagcgcgtccatctggcggtcgaaccagtcgagcgcattgggacggaagctgtcggcccatgacagaccagtccgcaagtgcctcacgccgaggcggcgcatccagcggacggcgtcctcaagtcgatggtcctcgtagtgaaaccactggcacaggcccatatcggcagcgtattggccgaacagctccgctgcggctttcggtgttccatcctcgcgcagcagccccatgtggaaatgccggtagtaggacgatccttccgcctccttgtgccgggtggtcgcctcccaggctgacgggagatcgtacaggctgtaccagtgaatgcgcggcgcccggccgatcaagagctcggcggtgcgcgacaatccccaggcctgcacctcctcggcaccgaaggaggagacgccgacctcggtcacccagaccggcagcgaggtaacggccttgatctcgtcgatcttggccggccattccccgatctgccacagattccagtcgagcggaaagccgtgcacggcgacggcgtcgacgtgatccagcacgccgcgcgcctgcatgttgcgcatgaaggagggatcgatcggcgaaatgccgccgagcacgcgcggcaaggtcggatgcgcgctgcggatggcctttccggccgcgagcgcgagatctgcgaacatcgcccagtccggatcgatcaggatgtcccaatgcgacttgttgttgggctcgttccagatcttggcggcctcgatcatcggttcgcctcccgcgacggatagaccggaccatcggcctgcggccgcgccgtccgcttgcaaagatagacctcctcttccggatgcgccgcgatggcaaagcccgcgctgcgcaacatggcctcgacacaggcgcgattgggcacccaccaattggtggggtcgtcggcatatttgtgctcgatgaagtgcagcttggggtagccggaggagtcgaactggtcggtggtccagaagtcgtagttctccttgatggtatcgatgcggccatcaccgcgctgcatcgactggaacagcaggagatcgccggcgacgtgctcgtggatcaggtccagtgcgagcagcgggtgccgcagatggtagagcacgcccatgaagatcacgagatcgaacttctcgcggagctgcccgacatcataggccgacatccggcgaaactcgatcctgagcccgttcacctcggcggcgaaacgagcctgggccagatattcttcgtcggtatcgaggccaagcacgcgttcggcgccgcgccgcttcatctccatggcatagaagccggcattgcagccgatgtcgagcacggtcttgccttcgagtcgatcgggaatgatgccggagaagcgctgccatttcacgttgggatagtcgccgaggaagtgcgagggcgcggtgggcacgcccttcaggtcgaggttgtgaaaccacggccccagcgcatcgacgcgctggcggatttcctcgcgggagagggcgcctcgggtcatgcaatcgctccgttgttcgctgggaccgggcggacgccttcggacgacgcgcgggcccgcaacttcgaacggccctcggcggtctcggcgagcagggccatggccgtgcgatagccgtcgatggtgccgacatcgacataggattcgccggctttgacgccgatgccgcggccaccggccgaaagataagcgttgaccagcgtcccgaaatattcgtcgcgacgttcgcgcgcgttccacagcgcctgcagctcgcggaagccgcgtgccgacattctgaatgcgccccagatccagcgggacgttgcattgggctgcttgacctggatctccgacacgcggtcgccatccagcaccaccgcgtcgaagaattcggggtgttcgaccgggaacagcaggaacgagaggtcggcctcggggagggattgcagggccgccttgggaaaccacacggtgtcaggcaggccgaccatgacatcctcgtgttgcccgacgaccgtgcgtgccctgaagacggcgtcgcacaggcccgatgcgtcgggctgcacgacgtaggcgagctcagcggtgccgtaatggtcgccgaagtactcgagaatgtcggacttgcccggcgagatcacgaagcagatcttgtcggcgccgccgaggatgaggcgctccagcagatattccgagacggcacaggggcggtccgtcccgtcgtcacggcggctgccgaccggtagcaattccttcgagaacgcgagaggctggatacggctgccgcggcccgcggccggaacgatgccccacatgatcaggcctcctcgggttgttgccggcacacgcgcttcgatgccatctgctccagcagcacgatcagttcgcgcgcgcgcttgtcggacgtatgctggtccatggtgcgctcgtaggcgcgcagagacatccgccggagctcggcatccgtcatcgcgagcgcggcgagcacgtcctgttcgtcgcttgcgatcaggatatcctctccgggcgcgaagaaatccgcaattcctggccagtcgtcgctcaccagcggcgcgccgcaggccgcagcctcgaacagccggccggaaggacaccagcccatctcggccatggcgcggcgcgtgacattgagcgtcagccgcgatgaggcaaagaacggcgcgtgctccgacggcggcaggtgccgcacgaaatagatgttgggcgaccagggaaaatcgtttggatactgcgccccgccgatcaggaagcggagatctcgtcgcgcccgcgcaggcgcgacgaaaagcgtctcgagcgttcgctggcggtcttcagaataggtgccgagataggacaaatcggcgcgatagtgcggctggggtgcgaccggccggtggacgtcggtgtcgacgtgcccgtaaagcggccgggtgtcgcgcgcgccgagccggtcacggaattcctccgtgatcctaggtccgcccgtgaaactgagcaccaggttgaaatccgaaaggccgcgcggtccgatatagggaacggcttcgccggccctgagctttgcgagcgtaaccggagtatcgagatcgtagaagacgggaacggcgcgaccttcggtgaggatcagatcggttgccgcaatcgcatcggggcaataggaggtcacaatcgcgacgtcggcctcacggatatcggcgctggcgttctgccacgcatcgtcccaactggagtataggcggagctcgcccccgggcagctcgtagagatctcgggcaccggcatagtagggaacgtcacgctcgaagaagacgacgctgtgtccggaccgcgcgagatgcttgcagaggccgcgccacaaagtggcgtgcccattgccccaggacgaggagattgtcaggccgaagatgacgatcctcacgccggcacccgctggttgatcccgatgatcttcatgccgccgccgtcggcgcggagcgtgctgatgctggcagaatcgatttcgatcgagagaaaatcgtctagtggcatccgcgaatagtataacagcgcggcgcggatcggctcggcgtgactgacggcgacgacaatgtcgggactgccatcgctacgtagttgctcgaggtgagcgaccgtgcgattctgaagcgagcgcatgctctcgccgccgggtggtcggctcgtgctgcgtcgccggttccagcgcgaccatcgtggatccggcgccagatcgtcgaatgatcgtccggtccattccccatagtcgagctcgtcgagagcggggacgatctcgaccggcagcccaaagtgcgcagccaggatgcaggcggactgcatgcagcgccgctgcgggctggattgaatgagcgtcggccggggtgcaacagcttcggcacagcgcgccatttcgccacagccgatatcatcgagctcgatgcccttcatccggccgcacagaaatcggccgagcagggcatgatgaccgtgccggaccaggtgaatgagtctggccatcacgcatacgccttgtcatcgatgaaggcgcgcgtccgccgtccggcctcctcgtcggtaaattgctgcggcggcgacttcatgaaatagctcgaagggccggtcagcgctccggcctggccgcggtccatcgcgagcttggcgcagcgcaccgcgtcgatcacgacgcctgccgaattcggagagtcccagacctcgagcttcacttcggcgctcaggggaacgccgccgaacgtcgtgccttccaggcggatgaaggcgagcttgcggtcggtgagccagggcacgtggtcgctcggtcccacatggatgttgtcgggctccatgggaacgtcgaactggctggtcacggcctgggtcttggagatcttcttcgaggccaatcgctcccgttccagcatgttcttgaagtcggtattgccgccgacattaagctggtaggtacggtcgagccgcacgccgcgctcgcggaagagattggcgagcacgcgatgcaggatggtggcgccgacctggcttttgatgtcgtcgcccacgatgggcaggccggcctcctcgaaccgccgccgccactccggatttgaggcgatgaagacgggaatgcaattgacatagccgcagccggcttcgatggcgcgcgccgcataccattcgctggcgcgttgcgagcccaccggaagataggataccagaacgtcggtgcgggacatcgccagcacttcggatacgtcggcctccggcacatccgcaatcgggatgtcgtccgcgagataatgtccgatgccgtccaggaccgggccgcgctgcacgattacgccggttggcgcgacgtcggagaagcggtgcgtattgttggggggtgcaaagatcgcgtcggcgacatcgcggccgaccttgctggcgttgacgtcgaaagcggacgcgatctggatgtcgctgatgtggtagccgccgagatccgcgttcatcagtcccgggacgggctcgttcgatttggcgttccggtagtaggtgaggccctggacgaaggaactcgcgcaattgccgacgccgacgagtccgacgcgcacgcggcgcctgtcttgaagacgagaatgcatggaattgagccctccgggaaagcacgaggcgtcggtgtaagtacgtcggcgaacgtgtggaaggtatgttcgttcccggcagggagatgtgagcgccgcgttgcccgcgattcaggccgacaaaatgcacgggacttaacatgggataaattctccagccgtctgcagggaacgaagagctttcacgatgaagatgaagaagatgatgatgccggcgtcaccgggctgctccgcatccgaccgaagaacaaatcgctccgaccggcgtttgtcggccaatggttcgatgcggtgccgggctcatcggcccggccggttaagcgaggtgtgaaatgactaaggcggaaaatagcgaagctcaccagaccaccgatcatggtgtaattcgtaaatgggccgaagagcgcggcgggaaacccgcaaccgtgaaggcgaccgaggaggatggccacgccggaatcctgcgcatcgatttcgatccgccggacgaagggctggatcgcatcagctgggacgagttcttcgacaagttcgacgaagccggaattgcgttcctgcaccaggacaagaccaaggacggtaagctcagccgattccataaattcgtgcgacactagcgacgcgcttgatggccagcgactgggttcaggcgatcagggcgggcgacttcgcgcgtgcctgggcgatcaacgatcgtgatttgctggaagttacgcccccgcccaagcataccggcccgcgtcatctccagcggatttggcgcggcgaagacctgaagaacaagcacgtactggtgcgttgctatcacggcctcggcgacacgatccagtttctgcgattcatcaggccgctccgccagattgctcgcagcgtcacgctgtggtgtcagcccgaacttcttccgctggtcgagagtgcgccgggcatcgaccgcgcgtttcccctccatgatggggtgcctgaagtcgatttcgaggtcgacatcgagatcatggaggtgccgcatgccatcagagcgcgacgggatcaggtcgaggtgggcgcttcctatttggcgctgcctccaactgtcgttccacctctccgggaagagcagaatcttgccgttggtctcgtctggaaagtcggagagtgggacaagcggcgtgaagtcccggccgcactgttgagtggtctcgccgtacccggggtgacgctgtattccgtccagcgtggcgcgagccccgaagagctcgccgcgatcggagcgctcgagatcagaacgccggacatcgcgaccctcggccatcgcttgcggcagctcgaccttcttgtttgtgtcgacaccatggttgcccatctagccggcgcactcggctgcgagacctgggtcttgctgcacgccgaatgcgactggcgctggcctcaatccggcgcgcactcgttctggtacccgagcctgcggttgtttcatcagaagaagccgggcgattggggcactgtcacttccgaagtgcgttgcgcgttgcgctcgcggcttgaagtgggtcaagcgcgtgtagcgaggtgaagttgaggatgttggtgagggaacgagcgttgcgcccgcggtttgagcaaggtcctcgcaatggaagacgctcatgcaagattccgataccacctcgtcgatgcccagcctgtcgcgggtgacagacgatatctggatcgtcgacgacaagccgatcagcgccgccggtctgcaactgcccgtgcgcatgaccgtcatccgtctgtcgaacggcgatctcgtgctgcattcgcccgtgaggcattcgccagctctgcgccaggagctggagcggctgggcacgatcaagtacctgctggcgccgaacatcgcgcactggatgtttgtccccggatggcaaagggagctgccgcaggccgcgactttcgcagcgcgcggccttggggcgcgcaagcaggttcgggctgccggcctccgcatcgatcgggagctgggagacacgacgccggaggaatggaccgccgagctcgaaaccgtgtcggtgaatgccccgatgttttcggaggtcgagctgttcgaccgacgaagccggacgctggtcctgacggatctcgtgcagaacctcgatgcccatcggctcagcgcgtcaaatgaagccgcggcgaacctgctcggcattgccaagccggacggcagggccccggtctatctgcggcttctgctgcgccttggtggtggcgcggcgcgggctgcagccgagcggctcgtgaggctggctccggaacgggtgatttttgcacatggcgactggttcgagacacaaggaacggcgcgcctgcgacgatccttgcgctggttgcttcccgagggcgtcttgggatccgagcaggggcagatgattggcacacgcgtcgtcatcaccggcgcctccagcggaatcggccgtgccgctgcgctggcgtttgcccgcaacggtgcaagcgtggtgctcgcggctcggcgcggcgaagtcctgatgcgccttgccggcgaatgtgaagcgctcggagcccgggcattggccgtgccgaccgacgttaccgatgcgcaggcggtggagcgtctggccagaacggcccaagacgcgttcggcggcatcgacgtctggatcaacaatgccggaacgggcgtgttcggcgcctatcaggatgcggatattgcgcttcatcgccgcacgatcgaggtcaatctgctcggcaccatgcatggcgcctacgcggtgcttcccatcttcctccgccagaatcgcggcgtgctgatcaacaacatctcgctgggcggctgggcgccgacgccctttgcggcagcctataccgccagcaagttcggcttgcgcggcttcaccgcgagcttgcgtcaggaactccgcacccatcccgatattcatgtctgcggcgtcttcccagccatcgtcgatacgccaggctttgtgcacggcgccaatacgtccggacgaaggctcgatcccggtccgttgctctatcaatccgaggacgtggccgagaccttcgtgcgccttgtccgcgcgcctcgtgacgaggtggcggtggggtggccggcgcgcgccggccagctggcctatgcggtcgcacccgggatcaccgagaacgtcctgggggctgtcttccgctggctgctgtcgcgtgcgcgtcccgcgccggtgagcgagggcaccttgatcgaagccggcccgcagggcacgtcgctggacggcggttggctggcgggaaagaaaatgctgcccgccggcgtggtcagcgcggggctcgtcgtgctcggcgtcgcggcttgtctggccctcgcggcatcgacggccgggcgcgcgtccgcatctcgcgcgaggctgcggcgccgccgcgcgtgaggcgaccagttcggctacttcagtcgattggcaatgcgtgtcccggacgcaatcgcccagcattcctccgagtcaggggccgccgtcgaccgccacgtcttggggacctgaaggacaagatcgccgacggcgctcgccccggaacgaagcttcgcgaccgcgcgttccctgcggaagcccgaggaccggacgtgccgcgctatcattttgatctggtggattcaaaaaccgttgtagacgaaggaggtgccgagttgccggatgacatcgacgccctggatgtcgccgaggagattgcaaagcgcctgctcggggagaggcccgagctcaaggggcgtcacttctatatcctcgtcacgaacgaggatggtgaggaaatcggtcggatgccattggacgtcttgcattgaagtgtgatctgacatgacgctcaggatcggcgtgattgccgacacgcatggactgctgaggccggaggcggtgcactgcctcgccggtgtctcgcacatcattcatgcaggcgatatcggcagccaggctgtcatggacgggctttgccggatagcgccggtcaccgcgatcagaggaaatgtcgatcgggacgcgtgggctgaagcttttcccgagacgctgacgctgggcctgggcggccgccgcttctacgtcctgcacgatctcaagcaactctcgatcgatcctgctgaactcgggatcgacgtcgtagtatcgggccactcccaccgcgtgcggatcgagactgccgaagacgtgctctacctgaatccgggaagtgcagggaaacgacgcttcgcgctgccgatcacgctggcgacgctcgacatcgagcggagcggcccgctacggccggtcatccacgatctcgacaggacctgacgccgaggcaggcgccgccagttgcggctgctccctagtgcgtgttcgatttctgccaacgctccaggtccaccggcggccgttccggatcgatctggtctttttcgggattaccttgccagggttcccgcgtctgccggtgagtgggcatgtccgtctgccgacgtggatcgtcgagtggtgtctctcgcggatcgttttcagtcgcttttggcatgtatttttctctggctatggcggtgcggcttgctgaccaacccgagccagaacaggttgttccatggcctcggccgtccgtgcgtgctgcggcgatcggcgcaggaacacccccgggcgtcagttcattattctacgtcaaggtgcgaagccatggagcaagacatgtcaaagatgcctccagttcccgaagaacagcgaagcaacaagggacccggtgcagacccggccaccgaggtggaagaacgcgttccgggccgcgagaatttcgatacgcagggacgccacggcaacatcaagcagaacacgaccaatcagggctatcagcaggatcgatgatgctcgaccgaaacagatgccatgagagaatgacgggtctcgtgttggtctctgtgcttgcggcagctgccatcggaccggcatcgggacaggggggcggaggcggcagtgcgggcggaggcgccgccggtgctgcggctggaagcagtggcggcaccgcgtcagctcccggaaccaacgcggccggtaccgcccagtccggcggtagcgctgctccgcggggatcgatcacggtggggcgacccggcaacccggccggcggcgtcaatatcgggcgtatcgacggaacggtaacaccgggtccctcgctggacggggacgaccagatccgctcggagacgtcgcgggactccgatgtcggtcggaagatcaggagcatctgcaagggatgctgacgcacgatcaggacgccggctcgtccggcgtccagtcgagatccgcgtcgtcgcgcggcccagggtcgggagagcagggcttgatcttcagatcgtcctcgagcacgggctggccgtcgctgtgttcgaccagccnnnnnnnnnntttcctctttcgtcggaaatgtccggcttagcctttctgcgtccttgaatagcgcataggccatggtgtgatcttctcctgcacctccacggtgtcgacaacagacgctcgcagcggtcgaacgttcctgtcgaccgagaagatcgcgatgccacgttccgagcgctgctgagccctcgctccagttaacgtatgttacggccgacgaagcgcgtgggtgctctccgcatgcggtgcctggcggactctgatccataggaacgtctgcgtgtggcacgtcttgtactcgcttcacggtgcctccgcccgcgcgagccattcaatgcatgacaagagatcagacagcttcccgacttccgcgggcgtcctcctcgggcttggcctcggtgggttcttcgacggcatcgtctttcatcagttgctgcaatggcatcatatggtgagcggctggtatccgctcaattcgatcgagaacatcacactcaacacgacatgggacggcatctttcacagcgccacctacgtgttgctgctcgcaggtctctacctgatgtggcagcgggcgcgcgggagcgagctgcgctggtccagttggcagtgtctcggcgcgatcctgctcgggtggggcatcttcaatctggtcgagggcgtcatcgatcaccagatcctcaagctgcatcgggtgaatgagacggtgccggacgagcaacgcatcttctgggatatcggcttcctgctgtggggggctgcgatggtcatcatgggcgctgcgatggcgcgagcgggcaagcgggagggagcggatgcgggaggcagcctacaggctcgttagaagcacgccgccggtcctcgtttacacgatctttctgttgctgctggtcctcgccacagcgccggcgcttcgcgtcttcttgttcgggctgtccgtcgatgacctcctgcaattgcgctgctttgcgccggcctgacggaggaggagagaatggtggagttcaggcttccgaagagctcgcgcatcgagcagggaaggctctggccaaagccgggcggcacgagcttgcgcgaatttcacgtctaccgctggaatcccgatgatggccgcaatccgcggctcgacacctacttcgtggatcagacagattgcgggccgatggtgctggacggcctgatctggatcaagaacaacatcgactcgaccctgacattcaggcgatcctgccgcgagggcgtctgcggctcctgctcgatgaacatcgccggtcagaacacgctcgcctgcaccaagtccatgaatgaggacattcaggagggcgagccgctccgcgtgctgcccctgccgcatcagcctgtggtgaaggacctggtgccggacctgaccaacttctatgcgcagctcgcgctcatcgagccatggctccagacggcatcccccacgccgcagaaggaatggcggcagagccatgaggatcgggcgaagctcgacggattgtatgaatgtatcctctgcgcgtgctgctcgacgtcatgcccgagctattggtggaattccgagcgcttcctggggccggccgcgctgattcaagcggcacgctggatcaacgacagccgggacgaagcgacgggcgatcgcctcgacatgctcgaggatcccttcagaatttaccgttgccacaccattctcaattgcgcgaaagcctgtccaaagggcctcaatcccggcgaagccatttcggcgctgcggctcaagatggtggagcggaagttctgatcggggggccgaggcgtaagcttccagacaggaaccatggctgcagcgctcgcttggtaacgcgagtcggaggcgtttgatgggaaagaaacagtttgccgcgttgccgtttcgtttggacaagtccgaactgcgggtgctgctgatcacgaccagacgcaagcgcaggtggagcgtcccgaagggatcgccgatgcgcaacaaggagccgcacctcaccgctgcactggaggcctacgaggaggccggcctgatcggcgtcatcgcaacccgggcagtcggcagcttcaagcatcgcaagggaaagggcgatcgcaagcggaccttgaacgtcgcggtctttccgatgcaggtgcacggccgcgagcgctggtggcccgagaaaggagagcgggaggcgatctgggtctcgccaaagagggcggcacgcatggtgcacaaggccgagcttcggcgcctgatcgcacggttcgcagcacagacggaggagggtgcatcctcgccgctggacggctgaacgacgatgctgctttaggaacgtgcctcccggccaaccattcaaacaggatggagcaacgaaccacagggctcgcatccgagcaggaagcgcctcatgaagtcctggcggcggccatcaagcgacgccgcgcaatcctgttcgtcggcgccggtgtctcgatggcagtcggcttgccgtcctggcaatccctgatcgaccatctgctcgacgatcttggcctcgaacgcaatgtcatcgacgggatgcacggcggctatcagatgctcgcggagtattaccggctgaagcgtggcgcgatcgggccgctccgcagctggctggaccgaaactggcgcgtcgatcccgagagaattgcggcctcggagcttcaccggatgatcgtccagctcgactttccggtgatctacacgaccaactacgatcgcaatctcgaaaccgccttcgacgtcctcaggaagccgtacgcgaaaatcagcaacgccaaggagatcgcgagcgccgaccctggcgtcacccacatcatcaaattccacggcgacttcgacgatgacgcctcgctcgttctgaccgagaccgattttctcaatcggctctccttcaattctccgctcgacatccggtttcgcgccgatgccctcggcagcacgctgctcttcatcggatacagcatgtccgatcccaacatccgcctgctgctgcaccggatctggcagatctgggacgggtcccggcacaaccaggaccggccgaaatccttcgtattcgtcacgcagcgcaatccggtccaggaggccgtgctcgcgaactggggcatcaccaccattgctccgccggaaggcatcgctgcagacgagggcgtcaagcagctgcttggcgagatctgccggcatctcgaccatgacatctaggccgcagctcgcgtgctttcgtcggagacgccgctatggccgccgcacgctgcagatcccgttcttgaccggagcaaggcgtccggcatgctgcatatcgagcaagcctgcccgccagcgttgcgccatggctgtctccgacagatcgaaggatttttcaggacctgcttcctcgcggccggggcggtagctcaggagatagaccttgtcgtcatagtcgaggtcctgaagctcggcgcgcagctgacgggcttccagggcatatccaaggcgctggaaggtctggttgctgaaggtcaggtcgctcttgcgttcggctgcggcctcgagcccgtcagggaccttgccgtcgcgtggaaacaaatcgatgacatagaggtggagcgggcccgcattctcgaggaccgggtcgaatggcgcgttcagcgagaacccgccatcgccgagccagcggtcggcgatccgcactggagcgaactccgggacgaatccgcaactggccaggatgtgatccatttcgatccgctccaatgcggagtcgaacaagaccgcatcgccactttcgacgtccgtggcgcagatcgtgatgcgcggatcgccgccgttcaaacgttcgaaatcgatcaaccgccggaggcgttcgcgggtggggccgagatcgtagagaccgccgaagtgagatgccgggagagggaggcggggatggaagaagcccgaatgacctagcacgcgcgtattgatcgagctcagccaggccaacgtatggcggcctgcgttcggcgctgcggctggattgcttggcgcgtgccaatagctgcgcagattgcgcagccggtcggcgctcgggctgcccgcgatcagtgcagcggtgatggcgcctgccgatgaaccggtgacccaatcgagcggcaacgtaagagaggtgaacgcctcgaacacaccgccgtgataggcgccaagaccgaggccgccggaaaaggtaatggcggtgagagggcgctctgccgccgccaccccgctccgctcagctgcaggatcggtcaagacggacgccggtggccagtccggagttcggggctgatcaccggtatcccctgtaacggcgtgcgtgggcatagcggggattgatgccgcaataggcgttcgttcccgatgctgtcgccatgcattgggcgtagctggcgaactggcaattgcctggatagccccagatgcgaccctgcaggcagtagcgatcttgcgcgaaagccgcgttcgaggaggcgaagccacccgcgatcaccagagcgacggcaagcaggcgatgtttcatctttgatctccaatttcgacattgaacgcggcccgagatgtggtgttccaaaacgctcgcagggcactgatgctcgccatttgaggcgagccgttaacctgtgtgaagccggtcgttccggatcgcggctaaggtgtcgccgcgacgtcttcgatcggaagcagaatgccggaacaatctcccagcctcagaaacttcaccatcaatttcggtcctcagcatcccgccgctcacggggtgctgcggctcgtgctcgaactggacggagaggtcgtggagcgggtcgatccgcacatcggccttttgcaccgcggcaccgaaaagctgatcgaggcaaagacctatctccaggccattccctatttcgatcggctcgactatgtcgctcccctgacgcaggagcatgccttctgccttgccatcgaacggctgatcggaatcgaggtgccgcggcgcggccagctcatccgcgtgctctatcacgagatcagccgcatcctgtcgcacctcttgaacgtcaccacgcaggccatggatgtcggcgccttgacgccgccgctgtggggcttcgaagagcgtgagaagctcatggtgttctatgagcgagcctcgggcagccggatgcatgccaactattaccggccgggcggcgtccatcaggatcttccgcccaagctcatcgacgacatcgaggcctggtgcgatccatttctgaaggtcgtcgacgatctcgaccggctgctctcgctcaaccggattttcaagggccgcaacgtcgatatcggcagggtgacgctcgaacaggcctgggcctggggattctcgggcgtgatggtgcgtggttcgggggccgcctgggatttgcgcaaggcgcagccctatgactgctatgccgagatggacttcgatgttcccatcggcaggaacggcgattgctatgaccgctatctcattcgcatggaggagatgaggcagtcagtccgcatcatgaagcagtgcatcgagaagctgaagtcccctgacggcgggggcccggtgctcgtgcaggacaacaagatcgctccgcccaggcgcggcgaaatgaagcgttcgatggaagcgctgatccaccatttcaagctctacaccgaaggcttccacgttcctgccggcgagatctacgttgccgtcgaggcgcccaaaggcgaattcggcgtgtttctcgtctcggacgggaccaacagggcctacaagtgcaagatcaggtcccccggcttcgctcatctgcaagcgatggattttctctgtagggggcacttgctcgccgacgtctcggcgatcctgggctcgctggacatcgtgttcggcgaggtcgaccgctgatcgccggcccggctttagagtgaatcgatgaccgcgccgggtgagggctttcttctcttggcgattgtccgattgcggaaacaccctctccccaaccctctcccgcaagcgggagaaggagcgcaccgccggtggcgcaatcaaacctaatcacatcagctccggaaacgtgaatcggtttcccggaaggtctgcgcaagacctgaagtccgatgacgagtcattcgatctcattgcgcttcggcgagcggcgaacggttcaatccgccagaggggtatcggcgacgtccagcagcgcgccgaggccttggcggaggcgtcgggttgcgatgctatcgttcgccaggccaaacaccacgagcgaacgcgccgtcaccgcatagtcgtgcccgaactcgaactcggccatcggtgcgtcggggcgattggtgtcgatcaggccgagccagctgcgtccgtccgcgacctccggcaacgtgaagttcacgacgtcatggtgcgcgttatagaccagcagcatggtcgcatcggagccgcggcgcttgactcccgtctcctgcgcgcggccgtcgagcagcatcccaaagcacttggcgttgccatcatgccactgctccgtcgtcatctcctcgccggatggcgacagccaggtcacgtccttgacgtcgagttcctcgttgtgtgacccgaccaggaagcggctgcggtagaggatcggaaacgccttgcgggtggcgatcagcttgcgcgtgaactcgcggaggctgcgcccgttggcggtgatgcccatccagttgagccacgttgtctcattgtcctgggcgtacgcgttgttgtttccgttctgggtgtgtccgaactcgtcaccggcgagcagcatcggcgtgccatgggagagcagcatcgtcgcgagcaggtttcgcttctggcgctcgcggagcgcgatgatctccggatcgtcggtcgggccttcgacgccgcagttccacgaatggttgttgctgtgaccgtcgcgattgtcctcgccgttcgcctcgttgtgcttgtcgttgtacgagacgaggtcgttcagattgaagccgtcgtgggctgtgacgaaattgacgctggcccacggccggcgcccgcgcttgttgaagaggtcgccggatcccgacacgcgcttggcaaagtcggccagcgtgcccgggtcgcccttccagaaggcgcgcacggtgtctctgaacttgtcgttccactcggcccagccggggggaaactggccgacctggtagcctccgggaccgatgtcccagggctcggcgatcagcttgacgctggagagcacgggatcctggcggcaggcgtcgaggaacccgccgccttcatcgaagccatagggttcgcgcgccaggatggtggcgaggtcgaagcggaagccgtcgacccgcatctcggtcgcccaataacgcaaggaatcggcgacgagctgaagtacgcgttgatgcgacaggttgacggtgtttccggtgccggtgtcgttgatgtaatagcgcttctggtccggcagcaggcggtaatagctggcattgtcgatgcccttgaacgacaaggtcgggccgagctcgttgccttccgccgtgtgattgtagacgacgtcgagaatgacctcgatgccatgggcatgaaactggttgaccatggccttgaattcgctggctgaagtcgccttgaggtaacgcggatccggcgcgaagaaggcgatggagttgtatccccagtaattgcgcaggcctttctcgaccagatagctgtcgtcgacgaaggcatggatcggcagcagctcggcgctggtgatgccgagcgaacgcaagtaggccgggacttccgaatgtgccagccccgagaacgtgccgcgctcggcttccggcaccagcggatgcagctgggtgaatcccttgacgtgcatttcgtagacgatcgtgcgctcccacggcacctccagcttgcgcgctgtaccccaggtgaaggcggggtcgatgacgcggcatttctgcatcaagggcgcgctgtcgcgttcgtcgtaggagaggtccttgtcggcatggtcgagttggtagccgaacagctccggtccccatcggagctggccgaccagttgcttggcgtagggatcgagcacgagcttgttgggattgaagcggtggcccgcgtcgggctcataggggccatggacgcgatagccgtagactgtgccggggcgggcggaaggcagatagccgtgccagacctcgtcggtatattcgggcagctcgatgcgctcgagctcggtttcgccggcgtcatcgaacaggcaaagctcgaccgtggtggcgtgggcggaaaatagagcgaaattgacgccgaggccgtcccaggtggcgccgagcgggaatggcctgccctcggtgatccgggtgcggcgcaacctcgaggcggcccgggtgagggcgtcgtccgaatgtagtttttggtccatgatcgcccccgatagtccgtcaagatgtcggcgcggccgccgcgagttcggtggtcgcttgttcgccggccaccgtcgcggcgatcacggcttcggaaggcttgttcagcacttttggcctctgagcggcctccttgctgatggccgaaatcgaattgccgatgcgcccgacgattgcggcaagctccatatccgagagcccaagccgtttcttgaccagccgtacctgggcgcggtcggccaggtcgagcttgttacggactgcttgtggtttcgagcggcgcatgtcgacagctcctgtgtgtgatcgtaacagtcgcccggacattcggttcccgcgccttgaagacggtgccagccggcgccggccgcaatcatggtcaagccgacagtgggtatcggcatccggatctcgttctcactcttggcgatcgcgagcaggtcgagttgcggcgtttgccgcagcgctggcagccggagataagccgccagatactcccgcgccatccgctcggccgtgaagcgctgcttgaaccgcttgcggatcgcttgccgctccaacgtgccgagcggactcgccgccgcgacggcctcctccatggagttcaccacgaaccgctgacgccgtagccgatcacttcaggcaccgaaccatgggccagggcgatcactggcgtgccgcaagccatggcttcgaggtgtcatgtgcttgacggtgggatcaaggcgcagggccatcttcgagcatggcgcaagctcggctgacatgatcgggtctccgctcgcgaacagcggactctcagtcccttcgtaaggtcgcgggccagctcgccgccagtggagagatttgcgccatcttcatggccgtcccccaaatgcctggctagatcgacgacttgtagagttcagcgtaggatttgattgggtccagctgaaggcctgcgccatggcagccctgcgcgtgtggtcgagccggtctttcatgccgaaggtcgagaacgctcggcagaggcttccaggaaacccggcgcccgatgcgcggtcaaacaggaagccggtctcccccagcgaagctaaattctgcggcgcagcaaaggttcctgagagttgccaatgagcgcgctgtttttacgctgaatgcaaaagtgtacatgcgggcggcaccggcatttcgagtccggtcagcagcccggcggagaggtcgcctgctgacatgcctcggaaggaacgaatgcaccgacggcagcttctcgtcccgagacatgattgagcgaacgtaagctggctccgtttggcaacgcgcttggctgaagcatgtccaattccgaacatgccggcgcgaaaggggattggccttggatcaaagactgggaacggccgagcaggggcggcgccatggtcctcagatcatcgatcatggtgtctcgttcaacttgtgggcgcccacggctcgatcggtcgagctgctcgaaattggccagccgccccgcaggatgccgcgcgatgagcacggctggtatcagctgctcagcgagaccgcgcgcgccggcacgcgctatcagttcaggatcaatgaggatctcgtcgttcccgatcccgcctcgttgttccagccggacgacgtcggcgcgccgagcgaggtgatcgatgccgcggcgttgcgcgatccggttctctacccgggtcgtccctgggcggaagccgtcatctacgagctgcatgtcggcacgttcagcgaagaggggacctatgccggcgtcgagcagaagctgccctatcttcgcgatctcggcatcaccgccatcgagctgatgccgctcaacgacgtcccgggccggcacaattggggctacgacggcgtgctcctgaacgcgccgaatgcgcgctatggccggccggaggatctcaagcggctgctgcgggccgcgcacgcactcgatatcatggtctatctcgacgtcgtctataaccatttcggaccgcagctgaactatctgcacctctatgcggagaacttctttaacgcgcgccacagcaccggctgggggccggccgtcaatctcgaaggagacgacggcgcgttcgtacgcggattcctggtcgagaatgccctgatgtggctgcgcgactacggcttcgacggattgcggttcgacgcggtccacgcattgaaggatgattccgagcgtcatttcctgatcgagctcgccgaaactcttcgcagtcagctggcgggccggcgcgtccatctcatgctggagaacgaggccaatcaggcgcacctgctcgagcgttcacacggacgagccaggtactacgacgcgcaatggggcgatgatttccacaatgcgctgcatgtgctgctcaccggcgaggacgaaggctattaccgggccttcgcagacaagccgctcgagcatctggcgcgatccctgaccgaagggtttgcctatcagggcgaagtctttccgctgcacgaggagccgcgcggtgaaccgagtgcgcatttgccgcccgaagcgaccatcttcttcgcccagaatcacgaccaggtcggcaaccgcgccttcggggagcggctgtcccggctggtcggcgcggagaagctggagcaggccctcgcgctggttctgctgagcccgcatatcccaatgctgttcatgggtgaggaagccgcggccgaaacgcccttcctgttcttcgcagactggacgggcgaagctgccgaactgacacgggaaggccggcgcaaggagttctcacatttcaaggcgttcgccacgcccgagacgcgcgcgaaaatcccggatccttgcgacgaaagaaccttccgcgcctccaagctggactggacgagcatcgatcaatccccggctggcgcaaggtttcgggcgctgacagcgcagttgttgatgatacggcgtgagaagatcgtgcccctcatcaagcggggggtcgtttcggcgcagcgagaactcttgggatcggattcccgcatgggaggtctggatgtacgctggcagacaggtcggggcgacgttctgcagattgtcgccaatttcgccgaccgagaactccctgtgccgccgctggtcgagggcgagagcctgtggcgattgcatcccctcgaagccaaagcacttatgcccggcgacctcattgtgaggattggccggaagggctgacccgccccgacggtagcggaacacgcagaaatgaccgagggtgccggtcccgcgccggctcagcccgccactgcggccgtgtccgatgcggatcacgggcgagcagatctgatcggggtgccgcagctccggctcggatgatggcatcatgccgctgttttgcccgacaagtcaaagtcgtggccgcggaggtctgctctcagaaatttgcctttgaaaacagggaggctctactgtgcatggggttgttttcggaatctttcgtttttgatccccgaagtgtgcatcggttgtccgaaaagatcatgcgcgaacaacggcccaaacgcgcgatggcgatttatgacgatatcgccgcgctttagcggcgggttgtaaggggatgtcttttgtcgtgctttccagagcgagagcagcggctagctatagtcttcgccgagaaattgactgatcgcgtcgaacgcctgcatacggtttctctccagcagaaccatgtgcgtgccttcgccgatctcgacccatcgccgatatggcgtgtgtttcagcgacaggaagaaatcctgcgccgaggcgatgggaacgtcctgatcccattccgcgtggaccaggagcacgggcacgcgaatgtcgctagcggagtagagggccttgccggcggcccagtattcgcgaatgtcgaggatcgggccgttgactgcgcgcatgaccgggggcgcttgcgaactgccctgcgggtcggtggcgagcgaggtgttggcccagcgttcgaagccgtcagccggaatcaagcgagatcgggctgcttccggcgcggccgaaagccagcgctccctgaagtccagaaccgggacgttgcgatagcccccgaggcgcccgccggcatcgattggagccggacccttcagcaaccaaagtggtgcgaccagcgcgagcttgacgaccttatcgttgttggccgcggtgtaggcaccggccaccgacccgccccaggacatggcaaccagattgaggcgcgtgatgccgcggtgtttcaggatgtattcgactgcgctggccaggtcgcgtacgccgacttcggtgcgcacaagcggctcggacgcctccggcggcgcgtccatctccggcggtcgagtcgatccgccatagccgcgcacgtccaccgcaaacacgtcgtagccgtgcccggcgagatgatccaggaaggagaggccgcagagtggcgtatcgaaaaggctctccgacgaataggttgcgccgtgcattatcaggatggttctctcggcagagaaggtcttcagcgctgccggccgcttgttgcgcaggtggagtgaaatcccgaccgtgtcactcggaatcatgaggtcctcgaccatgatctctggcctgactgcgtgcgcgcgagcgtgcttgttcatgatcggtctccctcttagacgaacttccagataaagcgttcgccggtccggctgatgcggccggcagatgactgcgcaaaatgggtggtgaagatggttgcgccacgctcggcggcgtcctccagcacgaaggcgcgcgagcgcaaggctgcttccggaaactcgcagaagcaggaattgagcgagggctcatacacctgtagggggtgatgcatcacatcgccggcgaaaagcgcctgctcgccgccagacacgagacggatggatgcgtgatcgatgctatggcctggcgtcggaatgaacgagatgccttcgaggacctcgtcgccgtccaccgggatgagtctggccagtccggcatcgatcaccggacggacgctgtcgtcatagacacggtcggccggcttgcgcagcgccggaccaaggaccggatcagggcgggctgctccggtcggctccgtacctgtcgcgaggctttcgccgtaggcctgctcgatcccggagaaaatgtaagtcgcctttgggaagctcggagtccagcgcccatcgacgagacgagtgttccagccgacgtgatcggcatgcacatgggtgagcagaacgtagttgacctgctccggggtgacgcccgctgcagccagccgcgccagaaacggctgattgagccggtggagcggtgggatctctggccggttcttgtcattgccggtggccgtgtcgatcaggatcgtgtggtcgggtgtcctgaccagccagctgtgaatgctctgaatgaaggtgccggtcgcagcatcgaacgagcccgcctccaggcgctcgcgatggcgctccagcgcctgcaactcgccgtccggataaagcgcgtcgaacttgaatgcggcaagccgcaactcgtcgatccgtgtgatggttgcatcgccaaggcgataggtgctcgtcgcttgcgtcaccaggatgtcctccgttccaggcagcggcgtgatagagcctgatgccctgcgccgccgtgaccgtgaggtacgcagctcgccgcccgacgggagggccgcgggctcgataggtcccatcgacatcgtcgatatcgaaactgtcgccagggttttcacggcaccgtttcgggcttacctgtgtcatcgcggctcgtcctgcccgcgatcatgtactttgaaagggagtgccccatgctggatgcggaacgcggtcggccccggccggctgacgacagtgatctggccgagatcgaccttggtctgttgctggcactggaggctctcctgcatgagcggaacgtgacgcgcgcggcctcccggctcaatatcgggcagcccgcgctatcggcgcggctgaatcggctgcggcaggtctttgccgatccgctgttcgtacccgcgacgtccgggcgcggcgtggtgccgacggcgagggcggtcgagctgcagacggagcttgcagctgtgctcggcaagctgcgtcgcatgctggaggggccggctgtgttcgaccccgcccgcagccagcgtaccttcgtcgttgccatccacgaaaatccagccgttacactggcgccgggcctggtggcgcgttttgccgcgaaggccgagagagcgcggctcgctctcgttcacccgacgcgcgatgtcgtggatcagctcgaaaggggggagatcgaccttctggtgacgggagctgacagagctcacggcgagctgatgcagcgccctctgttcgaggacagcttcctgtccgcacagcgtaaaggccatccccacggcaatggcctgcttgatctcgacagcttttgcgcgctcgaccatcttctgatctccgccgacgggggcggcttctcgggtctcgtcgacgatgcgctggccgcgctcggccgctcccgccgcgtcgccgtctcaatccagacctatgcactggcgccgatcatccttgcgcacagtgactgcatctgcacgcttcctcggcgctttctgatgcgcttcgcccatgagctcgacctgaggccgccgccgctggatctgccgcccgctcgcatcgtcgcgctgtggcatccgcgcaatcaagacgacaagggtcacgcctggcttcgcgagtgcttgtatcaggcggctgcggcttgagctcgattggtcttcatcgatctgctctatcgaatgtcggagagagtgtatgtgcggcccatccggctcatcctgacgagcgatcagctgtcgtcgtgttcgcgagctgagcttgcagtggacgcggcagcgtcgtgcgcgagaatgtcgagtcnnnnnnnnnnnnnnnnnnnnnnnnnnnnnnnnnnnnnnnnnnnnnnnnnnnnnnnnnnnnggtccctatgctgccttatcgcttttctgtcgcccccatgatggattggatcgagagttcaatttttcaatcggttatagagcgccgtgtgcgtgacgtgtgcaccgggagatcaagaaatatccatcgcaagcatgcgtcggggtccttcgttggagctgcgcgacgtccgcagaacgttggcggatagagagcgggtgcgcagcgctggctggcgtccacgcagggggctaccatgatgcccagcttcgcgagcagcgctcaccgtcggtcaagcccgaagtgtcacgtaagccgtactgggggcgccacaacgtcatagcggcatttatcgcggcgctcgcgctgtttgccttggcggcaagggcagcgctccggcctggtggtccctcaacacagaagaagccgccgggttcttcaccctggcggcttctgaaaagtccgcgactgttgattgcctgcccgccccgtgcgtaccgccggtacacgcgagaacgagacgctgcgtgggcccggatcgtgacatgccgtccgggcccaagatcgagcatgcagatcagctgcagctcagcggcaacggaacgccggggtgcaactcgtaccaatcgtagcaatccggatagtagccgtagaatccatagccggggcgatagtggccatagcggtggaacgcatgctggcggaagcctaagccgccggaggcgacgtggccgatcccaaaatgcgtgccgccgagccgtcccccgccaaagccgccggcatgtccgatgccgccgaaatgagcgccgccgccgaagcccatatggccgccaccaaagccaccgccaccgaagctgtggctgccaccgccaaaaccgccgtgaccacctccaccgccatgcgctgcggccgcaccgacggtcaaggtcgaggcaagcgccgccgttgccaaaatcatgattgctcgtttcatgggacactcctttcgtggcgagccgtcaaccatcattgcagtgcgtgttcgtgtcgtgcctcgccatgctctcgacgagatggacacatgatgactgcgctcgtgatgcaccacaggtaggtagggtgcacgggaatcccactaaattcggcttcaggaatgaggggatatctgccgggaaggtgcttcgcgcggattgccgcggccatgcaaaggagcgggctgaacattcagtccgctcctattttagatgtgaagcgatggtgtcggtgccggggccagccgccttatgtcgggcagtcagaacgcgccagtgccaggctcgcacggcacgtcgttgccagtccacggcgccgtcgcgaacgcgccgatgcgcggcgctggcatgcacgcgtggccgccctgataggtcggtgcgctcgatgccacggtgtccgattccatcgcggatttccgcatgccggcatggtgttcgcgcgccatgacggggcctccgatcaaggccgccgcaatcagacccatcggcaagagtttggacgtgatcattcggcttctcctttgatgatagcagaccggtcaggtcggctcttcgggaagatgcgtgcgaccgagcccgatccaaatgcacgaattgctcaccggcattcaacggcatgtgaaccgctgcgccagcgtggctacgatcgtgcgaacagacaaccttcgttgccttcgagagtaacggcgagcggattgcgggcatatctccgttgcagcgcagctcgaatggaggccgaagatggtcatgacaatggcaaggcgcattctcgtcctgttgacgcctttgtcggcaggtgcggccgcattcctgaatattaattcagttctgctcgcatcgccgcagcaccatctggtcatgcaacgcgtggccaatcgcaggcggtcgcggcaccgtgcgctcggagcgtgacggtgattatgacgtcgcagattgccgggcccacgccgacccgccgcaggccgaatcgccgcgcagaaggtgggacgaggctcatgacacggattctcctcatcgaggacgacactgaaaccgcggaggcgatcgtcgccgagcttgccgagcggagctttgaggtgcattgggcgccgaacggcgtcgaagggctcgaccgggcgcgtacctcgcatcccgatgccatgatcgttgatcgcatgctgcccggcatggacgggctgaccgtcatcgaggcgctgcgcaacgaccagatcaagacgccagtgttggttctaagcgcgctcggcgccgttgacgatcgcgtccgtggcttgcgcatgggcggcgacgattatcttacgaagccgttcgcgatcgtcgagctgatcgcgcggatcgaggccttgctgcgccgtccgatggacagccgcgaaaccatcctgctggccggcccgttggagctcgatctgatcgaacgaaccgcccgacgcggtgaacgcgaaatcgacctgctcccgcgcgaattccgcctgctcgaatacatgatgcgccggagcgatcaactgctgacgcgcgcgatgctgctcgaagaggtctggaactacaagttcgttcccgccaccactaatctgatcgacgtgcacatgggccggcttaggcacaaggtcgatgctcccggagaggtacagctcatccacaatgtccgtggttccggcttcatcctgcgcgcgcgtgaatagcgagatggccatgcggcatattcagtttatccgctcgaacacgtttctctgggccctggcggtcgcggccaccctcgcgctgttcgtcgccggattgttcgcgttcgtctaccagaagctcgacaactacctgatcgcgcgctccgaccgcatgatcaccacgcagatcaacttcatgagcgatctgccgcacggtcgccgcgtccgcgcggtcgccgatcatctccagcaagactcccggcatgtgcactatgtcgggctgttcagtgccgccggcacgcgccttgccggcaacatcgatcgcgtgccaagcgggctcgcccttgacgggacggtgcaaggcgcgcggctcaatccgctggaggcggcggcgggccgaggccccatcgtgaggatcgtcggcaggcgcctcgatgacggcgacgttctggtggtagcaaggaacgttgacgagacacgcgagatatcgagcgtggtcgggcaagcgctcgcgctcggcgtgctgcctgccttctgtctctgcgtgctcgccggcgcgtggctgagcgcccgggcccagaagcgcgtcgaagtggtgaaccagcgggtgcaacgaatcgttgccggcgagctgcgcgagcggcttccggagggcaatgcggacgatccgttcgcgcgacttgccaggatcgtcaatagcatgctcgacgagatggagacgatgatcaacgcgctctccggcgttggaaacgatatcgcccacgatctcaggaccccgctcacccgggcaaggctggcgctggagcgcgggcgaacgcacgcagtcacgcttgagcagctgcaggaggtcacggacaaggcgatcgctggcattgaccagtcgcttgcgatcgtcaccgccctgttgcgcctggccgagatcgagaatagcagccgtaccgccggtttcggcaacgttgtgctggacgagatcctgcacgaggtgtgcgacgtctacgagccgattgccgaggacaaaggtgttgcgcttggcgtcgtcatcgatcgcagcgtgcaggtgtggggcgatcgggacctgttgttcgaggcaatcgccaacctcgcagacaatgccgtcaagttcgcaccacctggcggacaggtggagctcgaactcaaattggacgacgggcgggcgctcgtgcgcgtgagcgataccgggcccggcatcaacgagcaggagcgcgaagcggtgctgcggcgcttctaccgctccgacaagatccgcaacacgccgggcgtcgggctcgggttgagcctggtggccgcgatcatcaagctgcatggttttcgactgatcatcggtccggctcccggcgggcgaattgaaatcgtggccgacgccgcaagggaaggcaagacacgctgcattccgatctcggatctcaggtcacgcaagcgcgaagtggataggacgatccgcggtcgcctcgatgttgggacatgccggatgtctgaaacagaattcaggtgtgtgacatccagtttagtggccggcgcgaccgcaagcctcttaggatcagtcaaccgtttgggaatgtgggagcaatagatgcagaccagtcacgaaatccagaggcatgattccgtcgccgcgccaagcctatccgcaccggtcccgttcctcagggcctacgcaatgtccatcaagcgctacgagcttctcgagcgtgatcaggagcaacagctcgcacggcgctggcaggagacgcgggacgagcgcgccgcgaatgcgctcgttacaagtcatctgcggatcgcggccagggtagcgcgtggctacaagggatacggcctgccgctggttgatctgatcgccgaagccaatctcggtctcgtcatcgctgcctctcgcttcgagcccgaccgcggcgcgcggttctccacctatgcggtgccgtggatcaaggcgaccatccacgcctacatcctacgctcctggtccctggtcaagatcggtacgacggcggcgcagaagaagctgttctttcggctgcgcggcgagatgcggaaagccatgggcggcgcgatggcgcggctgacgccagaggtcgccactgtcatcgccgacagactcgaggtgaccgcgcgcgaggtgatggagatggagtcgcgccttaacggcgacatgtcgctcaatgcgcgcgtcggcggcgaggagaatggtgccgagtgggaaacgctgctcgtcgatgacgcggtcgatgcggagacaatcttggccgatcgcgagcaaacggacaaccgaagcagcgccctgcgtgctgcgctgggcgcgctaaccgcgcgcgagcgccacgtcctggaatcgaggcggctggcggaccgccccgttacgctcgatcagctcggcctcgaactgtcgatctccagcgagcgcgtcaggcagatcgagatccgcgcctttgccaaggtcaggcgcgccgtcattctcgccgcgcgggatgcgacgcgccgagaagcgctgccgcccgcggcgcgcgatgcccggcttgacggcatcaggcgctcccggctgcgcgaactcgccgccccatgaattcgttttcatttgagcggatatccgcccgtcatctgtccctcgatcccgcttcactcgttccaggcacaccgtcatgggtattgttcgtttcgcgctgcgatttccgcacacattctatgtgcttgcggcgctaatcctgttcctcggcggcatcgccatccggtcgatgccgaccgacgttttcccggagatccggatccccgtggtcacggtgatctggagctataccggtctctcgacgcccgagatggagcagcgtgtcagcacctatagccaatactcgatcagcgcaaatgtcagcggtatcaaaaacgtcgaggcgcagacgctcaacggcctgtcgatccagaagatctacttccagcccgacgtcaatctcgatctggcgatctcgcagatcgtgtcggcgaccaacgccatccgcgccctgatgccgcccggcattcagccgccgatcatcgttcagttcaacgcatctagcgtgccggtgctccagctcagcctggaatccaacagcctgaacgagcagcagctctatgacttcggcatctatcgggtccgccagcaactggcgcccgttcccggcgtgacactgccgacgcccgccggcggcaagtaccgtcagatcatggtcgacatcgacccgaacaagctcctatcgcgcgggctgaccccgctcgacatcgtcaatgccgtgaatacccagaatctcacgttgccgaccggcacggccaagatcggcgacacccaatacaccgttcggaccaatgcgacgccggcttcgatcgaggatctcaacatgatcccggtcaagttcgtcaacggggcgacgatttttctgaaagacgtggcccaggtccgtgatggctctcaggtgcagcagaacatcgtgcgcgaggacggccaccgcgccgtcctgctcagtgtgatcaagaacggcaatgcttccacgctcgccgtggtcaatggcgtgaagaaggctctggaatcgcttcgtgagtcggcgcctgcggggctcaagatcaaggagctgttcgatcagtcggtattcgtcacccattcggttagtggcgtgctgcgcgagggagcgatcgcggccggacttacggcgctgatgattctgatgttcctgggatcgtggcgatcgacgctcgtcgttctgatctccatcccgctcgcgatgctctcctcgttggtcgtcctgtacttcctcggcgagaccctgaacacgatgacactcggcgggcttgcgctcgcggtcggtatcctggtcgacgattccaccgtgacgatcgagaacacttaccggctctggaccgaggatggcatgcctttgccggacgcgacgctgcacggggcggccgagatcgcgatgcctactctggtttccacgctggcgatcagctgtgtcttcacttcggtcgtgttcctagagggacctgccaaatacctgttcactccgcttggtcttgccgttgtgttcgcgatgctggcgtcctatgggctgtcgcggacgctgacgccgatcaccatcggcctgctcttgaagagcgagcggcgccacggcaagggtgaagccccgtcaggtattttcgcgcgcgcctcggctgcgttcgagcgcggcttcgatcggttgcgcaatggctattccgaacttttgctgaccttgctgcagcggcgcgccatcgcgcctgtcgtcgccgtcctggtgctggcgctcggggccaccatgttcgtctatgtcggacgcgacttctatcccctgatcgacggcggccagatacagcttcacgttcgcgcgcccgcgggcactcgcatcgagaagaccgaagcgatcttccaggcggtcgaggacaagattcgcgaggtgattccggagcgggaccgttcgctgatcgtcgacaatatcgggcttccggcgcgcgcctacaacctcgcattcacggacggctcgacgatagggggcaatgacggcaccatcctcgtgtcgttgaaggatggacatcagccgaccgcggattacgtcagcaagctgcgccaggtgctgccatcggcattccccgaggacaccttctatttccaggcggccgatatcgttacgcagatcctgaacttcgggcttcccgcgcaaattgacgttcgcacggtcggctatggcgccaacaatctggccgtggcaaaggagcttcagaagagcctgtccacgatcccgggcgtcgtcgatgctcacctccagcaggaggtcgatgctccagcgttctacgccgacatcgaccggaccagggccgcgcagctcggcctcaatgccagcacggttgcgaccaacatcaatgtcagcctcagctcgtccgcgcaggtctcgccgaatttctggaccgacccggcgtcgggtatcccatattaccttgccgtgcaaacacccgagtacagggccaattcgctgaatgcgctggggaatacgccggtgtcggcttcgcctgcggcaagcgggcagacggtaccgggcctgctcagcaatgtcgcgaccttcaagcgtggcacggttcccaccaattcgaatcaggccaacgtccagccggtgttcgacatttatgcgagcgtgcagggacgcgatctcggtagcgtcgcggccgacatcaacaaggtcacgtccgcgctgcagaagcagctccagcccggcaattcgatccaggttctgggccagatccagagcatgcatcagtcgttccgcgatctgggaattggactgctgttcgcggccatcctggtgtatctgctgatggtcgtgaactaccagaacttcggcgatcctttcgtcgtcatccttgcgttgccggcaaccttctgcggcatcgtgacgatgctcttcatcaccggaacgacgctgaacgtgccctctctgatgggggcgatcatggcggtcggcgtggcctcggcgaattccatcctgctggtgacgttcgcgcgcgatgagcaactgaaaggacactctgcattccaggcggcgcttagcgccggccgtaccaggatacgtccggtcctgatgaccgctgccgcgatgatcgtgggcatgatcccaatggcgatcggcggtccgggcgaggagcagaatgcggcacttgcacgagccgtcatcggcgggctgctgttcgcgaccccgacgacattgctgatcgtgccttatctgttcgccatgctgcgcaagcgcaatgatggccagcctcatcacggcgtattcgaggagcaaccgcaatgagtgacgttcgcgtacggaccaatgatgagaagacgggccggccaggtgcggagagctggcggatggtggagccgcccgaaaaggagccacgattgggccgccgttacggtgctgcgttgctcggaggaggcatcgttctaatgctcgcgggcggtctcggcgttggcggctggcggcactatcaggccgcgcgtgaagccgcggcgttggcagaacaggtcagaaccgccgttccggatgttcgggtcgcggttgttcggcccagcggcgacatcatgaagatcacgttgccagcgacgacgacggcgttcgaggcggcaaacatctttgcgcggaccagcggctatatcgagaagcgctacgtggatattggcgcgcatgtgaagaagggcgatctcctcgccgacatcaccgctccggagctggaccagcagattgcacaggcacaggcgacgctcgctcagaaccaggcgacgctgcagcagacgcaagcaagccgggaacttgccgacgtcactaatgcgcgggacagcaatctcgtcaagcagggctggctgacggcgcagcagggcgacaatgaccggctcacgctgcgtgcgcagcaggctgctgtgggcgtcgcccaatcgaacatcgcggcgcaggaggctcagattcgggtcctccagcaggagaaggcctaccagcgcgtggtggcgccgttcgacggcgtaatcacgcaacgcaacgtggacaatggcagcctggtgcaggccgggtcgaccttcatgttcacgctgatgcattccaaggtgatccggacccaggtctttgtgccgcaggacgaggcctttggagtcacccccggcatcgatgccgatatccgcgtccccgagattccgggccggacgtttccggggaaggtcacgcggatcgcgaccgcgttgcagccgggcagccgaacgctgctgaccgagatcgacgtgccaaatccggatggcctgctcaaccccggcatctattgcacggtcgagctatcgattccgcgcaagacgccgtcgatgatcatcccgtccgacgcactggtgttcgatgaaaacggtcttcacgtcgtgctcgtgcgcaatggcaccgttcatttgcagcaggtctcgatcgcgcgggatttcggcaccaccgtcgaagtccgtgaaggcgtgcagcccggcgatcaggtcgttctcaatccggcggtgagcctggcagagggcagcaaggtaaccgttcgcaaggtcgtagtgagttagggcgaggggatggtaagaaccattttcgcaacgttgctcacttcgttgctgctcgctggctctccgagcaacgcgcaggtggccataaccggcagcacggcgatgggcctgccgacggtgccgggcgcgatcgtgatctcgccgttgaacagtcccggtcctttttccgccacgaccgagccaaacgcacccgacacgacgctcgcgcccgttccgcttgcctcggacccgacgtcgccggggaccgtagttgtctgcgctccgccatcgccgtctccgatgccggagccgccgatcgcgacgaacccgggcttgtcgacgccgggcagcgccgctccgacattgccggtcatgggactgagcggcagctccactggaaccattcccgcagctgcgtcgataggaacgggtccgacggttgcatgcagctccgtgccgggcggccaggtgacgtctgccgcatcactgccgctgtcgatcccgcaggtgccgaccagccgggcaccgggcaccatttcggtggatctaatggatgttggcggcaccggccttgatccaaactccatcgtgcccagcccgaacagctctgcctgcatggaaggggtctcgatgaacctggcttcgcctgcgactgtgttgccagccaatgctacaggtgcagcgccgacgccgggcgtgtcgccgatcctgccgccgggatgctgagggctctttgcttcataggccgggcgcagctcggcccttggtgggaacatggattcgccgtccagcagtcgtcatcgagagatcgtgatccagcgtcgtccgcaggattgggggaagaagcgctttggctaatggcaggtgcaggaagcggatcggccgccgccacgtgccgtcgccgggcttgcaaccagaccgcgcgcgaatgcgagcgcgggaagatcgacttcccggtcgaacatcgccgtgatcgggccgacgagatcgagcgcggtctgcttgcggtccgatcctgccatgatccttgcccaagccgcagcgatcttcagctcgtagaagcggcattgttgctctcttgcaacggacaacccttcggcgcacagcagttccggccgggagagatcgagcggagcatcgaccagcagaatttcagccttgatgcgcaagagatccgcaaggcaccacaattgccggccttgcctggcgatgttcaaggcctcttcgacggcggccaaggctggcgcggtctcaccggtcgcaagcaggccttcggcgagtgaacccagaaactcgggattgcgcatcagccatccattctcggcccgcgccttcagtccgctccgcagcaacgctattccattgtcgtactgaccttccaggacgagcagctgtcccttcaggcacgacgtccagctcgtccagaaagctattccctcgcgggtcacgagctcgagaagtgccgagatcgcctgatcggccgcggcgagatcatgcgtcatgagagcgatcgggcagacggcgttccgcaacgcgtaggcaatcgcaagcttgtccttctcccgctccgcctcctggaggcattcggcggcaagagccctgctctgcaccacctgtccctgtagcagcaggacgcgggccaacatggccttggccaaaacgctctggttgagcaggaaccacatctggtgcgggccgtcctccaatccgtgagcctcgtgatccagggacagggtgagctcccgcctcgcatcctcttgcgctccgtagaaatgcgcggcggcgccgatcaggcgtcgacctacggtctcgttggcgggattctccgttcgcagggcgatctcgaggtatcgctcgccgacggacttggcggcgtcatattggcccgagttgagattgtagctccacagcgtccatacagccttgagctgcagctcgagatcggacatttcttcggcgagcacgaggccgatgttgagggccgctttcatgcggtcggcagagccggtagtgttgagaagggcgaatcccaatgcgacatggagctgcgccttgagccttggatcggaggtgagctcagggccgagatgggcgagggcgtgctcgatccggctggagcactccacgaaggacagtaactgcatccataccggaacgaagcccgccgtcagctcgactccgagcgcggcatcgccatcaggcgcaaaggcccagtcgagcgcgacatgcacgttctcgatctcctgggcgaggcgggaaacatcgtcagaggttggggaagtgtcgccaagcggcgtcacgagctgcctcaggaagctcgcttgccgtcgtgtcacttgcgcgacgaggcccgctcgcgccagcttctccaaggcgtaagcacgcgtcgtctcgagcaggcgccaccgcccctcgaaggagggatccagagcgaccagcgatttgccgaccaaattgaacagcgtctctatgacgtccgatcgtgtaaggtcgtcgtctgccactgcaatggccgcgtccagcgtgaagccggccggaaacaccgcgagccggcaaagcagcctctgctcctcggacgacaacagatcgtagctccagtccagcgtcgctcgcagggtctggtgccggggcagctggtcgcgacgaccgctgctcaggagctcgaagcgccggtccaggcgtgtcaacacggcgtccaccccgagattcgcgacccgggctgcggcgaactccagcgcgagcggaattccgtcgagccgccggcagacggcggctatcttgggcaaatcgcttgggtcgggaacgaagcttgcacgcagcgcccgcgtgcgtgcgacgaagagctgcaccgcgctttcccgaagaagcagatcgggatccaggatatctggtccggggactgacagcggcgggatggctgcaacgtattcgccgtcgatgcgcagcccttcgcggctggtcgcaaggacggtgacattcggacaattgcgaagtaccgcgctggcgatttgtgcggccacgtcgatgacatgctcgcaattgtcgagcacgaggagcaggcgccgagtgccgatggcctcggcaatgcttgcagaggagacgttcttgtcgttcaaggcaagcttcagggcgcgggccgttgcagcgatcgcgagtgccggatcctgcaaggacgcgagctcgatcagtgcgacggactcgccgaacgatgacgcgacgtgccgagcaagttcgatggccagcttcgtctttccgatgccgccggggccgacgagcgtcaccgcccgatatgcggacaggatgtcgaccagttcggtcaggcaatcctcgcgaccgatcagaggcgcacgcatattcggaaggttgctcgagaaggagctggacggagcggatatcgtagtggccgccccgtgatccggatgtccgcttcgccagcttccggcgagggtgtatcctcggcctgagaccgttctgaggagatcgcgatccttgccgagcgccttgcgaatggcggaaatatggacctggagcgtgttgtcctcgacgacctggcccgaccagacggtcccgatcaattcatccttggtcaccagcaggccggcagagtccgccagcttctcgagaagctcgaacgcacggctgccaatcggcaccgcgacgttgtcgtgtctcagctccctgcgctggcaatcaatgagccagtttccgaaagtaaaggttcgattggccggcgaagacgacattgggatccgtagatcagattcacagtcgcgatgccggcaaagtcatggcccccgaggaccaccgtcacttggcaataatatggaagcatgactatgccttggtctcgtataggggaggccgttggcatgtcaagaagaccttcgccgccctcgggcctccgccgtcgggccagtgttcgatatgctggttgttccatacaggaattcgtgacgataatcggtgtgggggcgtctgaaatttcccgatcttgcacccttaacctgcgactaaatcgcgtcttgctacggtcgtttcgatggaggccttcaacgatcgcggattccgccggccgcgcatcttctggcctggcgcgataccagcaataaatgcctcagcagccagcgccgagtcgacggcgcaatgccgcccggtcggcttgatctggccatcgggaaatagcggccgagtgcagcgtgctgatcggaagaacggcgctgcatgagactgccgttcttccgtcagcgagacaaaggccctcaacgctgcgaggagcttcctcggctcagcgcctgtcgcttgccttgcagccaagggtctgtccggtccacgggctcagtagccagaggtaggctcgcatggaggccggtgccacggagcagtcgcgtacgcaccgacgtcgggagcgcgaacgcagctgcgcttggcagtgaccggcacgcgctgaaccgacgcataggagtcgacgttcgtgtgacgcgtgttgttgctgccttcgcgagccatcgcgggggaggcaatcagggccgcaacggccagtccggccgacaagagcttcagagtagtcattgcatgtctccttgaaaaagcgacgccgggaacgcctcggctcgcacgtcaaacatgggcacgcgcatgccggatcagcagcatcaatcgaacgatcgctttcgcctttgcacggagtcgtggccggctcggtgcgcagctgctggtccgcgaaattacgtggctgccgcagtgtgggcccggcggggtgcgccgcttggcgcgggcgcactcccgtgcggattcacggatgggcgtggtcagctgcgtacgcaggctgcccgtctgtcgctccatcaacgatgccattgatagacgtgggatggcgtgctccgaacaccggcgcggcgccaccgggccgctccagaccaatccgtcctgccggcgtcagcgcgcctcggttgagcacgtcgcgatccggatacattgatgcaaatgccgcgggttcctggtcggcgaaggaccaggtcgcggaggccgaggatatcgttgccgtagagatcagcgccgcggcgatcatggtcttgaatacactcatatcgactctccattactcgtgaggcgcggagtgtcgcttggcgattgtcgctgctcggctggtgacgtttccgaatcgtcttctgtgccgagtcatataggcaatgcagtcgtaaagacttgtccggtacgcatcactcttgcgcgaagacgagttgggtagcaggcatgtacgcgggcgattgaggaggaatggtccatctccgacgtcgaattctgtaacgtttgtcataatcgttcgcgcgatcgtgcgtggtcgtatcagtcgcggcgtccagtttaaagggcagtcatcgaacatgcggaatgcaaaccatgaaactgctctctttcctctgcgtgatagcttgtcttgaactttcgggcacggcatctgcccacacaggcatgggatcgcatatgtcgacggcgagaggcggtgctctcggtacgagtgccgcggcgcctggaacgaactcgctcggcattgcacttccctcgtcggagggcgacggtcatgcgatgaaacggcctctgctcggcacggacgcggccatcgacaaggaagatgcccggctcgagaaaatgctggaaggagcgatctgccgcggctgttgacaggtgaggggtaccagaagccgggtccggcggtcttccgcgggactagctgtgtctcctgacaggatggtgatagacttgcacgcaagacaatgaaaccattcggggccgtgccaatcatggctgagacaggccagcgtcccgtctacacctgctcggagtgggagatcgatcttgccaggcgcgaattgcgctcgctgggagacgtcgttcctctgggcggacgcgcctttgagatactcgcggagttggtccaggcagaaggcgatctggttaccaagaacgatttggtcgagcgcgtctggcggggcgtcttcgtcgaggagagcgcactcagggtgcacattgcggcgatccgaagagcccttggttcgggccgcgacatgctcgcaaccgaggtcggacgcggttatcgcctgcaggggacatggcagatccgccagatgaatgcgcccttgcaatctgtcgcatccgaacaattgcgctcgaccaacattccgagcgcatccttcgatctgatcgggcgggccaccgccatcgcgcatctgtgggagcttctctcggcgtatcgagtggttagccttgtcggccctgggggcattggcaagacggcgcttgtattggaagccgccagaaagccgccgcccggctttgcggcagatcggttgatggtcgagcttgcctcgttgtccaaccccaaaatggtttgctcggccgttgccggcgtgctcggcgtcaagctcgaaggagaggacatctcgccgggggcggtcgcacgtgcgatcggcgcgcggcagctcttgctcatcatcgacaattgcgagcatgtcgtcgaagcggtggcccaactggccgacgcgatcgtcagccgctgtcccgggaccaccatcgttgcgaccagccgtgaagcgctgcgcatcgacggcgagcacgtctatcgcgttcctcctctaggcgtgccgccggaatcccggctcggatgcggcggcgcatttgcctataccgccgtggaattattcgtgaccagggcgagggcgctcggttcgaactttgcgctggatgaggaaaatctcgaagcggttgcctccatttgccggcggctcgacgggattccgcttgcgatcgagttcgcggcggcgcgcacggtgatgctaagtccagcgaagattgctgtgctcctggacgacaggttcaaattcctgacgaccggccgtcggacggcattacccaggcagcaaacccttcgtgcgacgctcgactggagttacgatctgttgccggaggtggaggcgcggatcttgcggccgctcggcgttttcgccggagagttctcgctcgaagccgcgatcgcggtggctggcgaggacatgagcgaggtgacgcgtcggctggcgaatctggtggccaagtcgctcgttcttgtcgacattggcggtgatcatgctcactatagactgctggataccacgcgcgcatacgcattggaaaagctgcgctcccgcggggagcttgccggcgcggcgcagcgtctcgccgaatattaccgcggcttctttgcgcgaaccgaagccgatagcgagcagccgcagtccgagtggcttacgttctatggtcgccatatcgataacgtgcgatccagcctcgattgggccctctcgccggcgggggacgcgcagatcggagcagcgctgaccgttgcggcggtcccgctatggatgcaattgtcactgtttgccgagtgccgcgagcggaccgacctggcgttggctcgtctcgaggggagtgctgcgaatgcgccgcagctgcgcatgcaattgttggctgcgcgcggctggtcgctgatgcatggtattggaagagccggggaggcgggtcttgcctgggccgaaacgctggggctcgccgagcaactcggcgacgacgattatctgctgcgatcgctctgggggctgtgcatcgatcgattcaacaatggcgaatttcgcaaggcactcggtctcgcgcgccgttttgcggatatcgtggcgggatcacgcaactccgtggatcggatgatggcagaacggctcctcgctacttcgatgcactatctcggcgaccagcggctggcgcgccgtcatatcgaccgggcattggcccgtctttacgatctcacgacaaagccgcaggtgtttcgctcccgtttcgacctgcgcgcttcagcgtattgcgtccaggcccgcatcctctggctgctcggctgcgtcgaccaggcgctgagcgtggtcgatcgcaatctcgaggaaggtcgcacgagtggtcatgccctgacgttttgcagcttgctcggagaggacgcctgcccagttgcctttttcgccggtgatctcaccctggcggagcgctactacgcgatgctgatcgagcagaccgaacggcacccggtccggctgtggaacgtctgggcgcgcgccttcagggggatggtgatggcgcgcggtggcgaccttgaaggcggcctgtccttgctacgcaaggcgctaggcatggcgggcgaggcgcgattcctgccgcgttttttgcttcctcttggagaactggcggcatgtcttggagaagccggcgaggtttcgcaagggcttgcaaccgccgaagaggcgcttgcgctatgcgaagcgcgtgaagagggttggtatgtagctgaactctggcgcatcaagggcgaattgctgctgcgctctggcgcgcatcattccgtggccgccgccgagcaggccttcgaccaggctttggtggtggcgcggggccaaggagctctgttctgggaactgcgaacgacgatcagcctggcacgattgcggatcggccagggccggtcggccgaggcgtggcatattctcgattccgtgtacggcaagtttaccgagggcttcgagatctccgatctgcgccgcgcgaggacaatgatggcgcagctgtcggcttggtagctcacgtcgcggcgtggcgtccgatgtctcggagcgggcgcacgagctcgcttagtgaaccgcaagcttgtccgaccgggagaaacgcagctcgatgagcagatccgatgctgtcttgagactgcgtgcaccgaatccctcggtgaatcgggcatacacaggcgcaagaagttcctctgcgtcccggtggcggccttgccgctgccgcaacttcgcaaaagcgattgccgtacgcagctcgtaaccgagcgcaccctgttggcgggccaattcgagggaatgctcgagggtctgctccgccagcaacacgtccggcgtggccttccgtatcagcgcctcggccttcacccgcagcatgtcgggcatctccagcaggaagctgcaacgtcgcgcctgggcaattgcccggttgatcgtttccagcgccgcgtcgccgcgatctgccgccgccagcgccgcagcaagcggtacgctcaaccctgcgaccgcaccgaaacgatggtcctgcagcttctcgaccgagccctccagcaacgggagacccgaatcggctccgcgcgcgagcagtgcaattcctttcatggcttctgcggcgatgtggagcgtggcgagcttgtgcgtgcgactctcggccagaagcgtgtcgatagaatcctcgtaactgtccagttcctcgttccaatagaagacgtcgaatgcccagagcagcgcccggcagagcatggtggggtggttcatggtgcgcgcatcggaaacggcctttcgcactgtctccatggcccggtcaggatatccctggagccaaaggttgcgggccaaggtgattggcgcgcggccggggtagtcgagcgtcggctcgccatcgacatccgcattcgcatcgggacgcgacatcgccgcctctatgtacgcgcgggaggcggcaaggttgccgagataatggcaggagatgccgagcgccacgcgcatgcgggaaagggcgccgggatcgccgctctcgagtgcaacgcgctcgcctcttctggccgtcgtcaagccgtcgtcgaattttccggtgagcagttggagcagatgcagccgattgatcagccggacctggccggagaggtcgccgttcttctctgccagcgcgagcgcgcggttgaggcagatcatggccagatcgtcaagttgcccggtgagtgttcgggcggatccgagtgcggcgtagagcacaagactgtgtttcgcgctttcggcggtttcatcgagagcctcgagggcacgggcagcccaatgctcgcattcggccaggagcgacaatttgaagaacagaggaatcgctgcggccgtgagcgcaacgccgatgccacggtttccccggtccgaaaagcaccataccagagcacttcgtatgttgccgaactgatcggcggcggtcgagaaaccgtcgctcgccgtgccatccgtgtcctcgagcagggcgagaaagtagttggcatgacgccacgccacctcatcggcatcggtgtcggcggcgagccgctcctccgcgtaggcccgggtggcgtcaggaagccgatagcgggtcgattgccgatcggcgctcgacgcaagtatcgatttggtgacgagactgtcgatgatcgccggaatggcgccatcgtcctttgcagtcgcggcaatcgcctgcgcggcgtctaaggtgaagctgccgacgaatacggacagccgattgagaacctcgcgctctgctccgggcaggagattgtagctccattcgatggtcgcgcgtagcgtgcggtggcgtggcaaagcagtgcgccgtccctcccagagcatattgaattgcttatcgaggagtcggagcattgcgccgacgccgtatgcgccgacatggcccgcggtgagttcgattgccagcggaatgccgtcgagacgtcggcagacgtttccgacgtccgaggcgttcgcatccgtcaacgcgaactcgctccctgtggacgtcgcacgctcgacgaagagctcgacggcgggataggccagcgcgcttgccgcagtcagaatggccttctccggcgggcttgccagtggcagaaggcgatagacatgttcgctctcgacacgcaacagctcccggctggtggcaaggatgtgcaactccggtgcctcctgaaagagccgatctgccagtgcggccgccgcatcgatgacatgctcgcaacaatccagaatgagcagcatgcgcttgccgcgaaggagagtcgcaagatccgtcgagggatcgttcgatctggccggcaagccaagcgaagctgcggcgacggccggcatgagggcggcatcgcaagtctcgcccagactgacgaagcggacctggcctgcgaattcggcgagcagggtgtaaccgaccgaaacgaccgccgtcgtcttaccgatgccgcccggcccgacgacggttacgaaacgctgaactcgcaaccgttcggatatttcccggatggttctttcacgtcccaccatctgccggggacgcgccggcaggttgtggacatcaggaagactggacggctccggttgtacctcgtcgggctcggagatcgacccgacaaaacaatagccccttccggagacggtgctcagatagcggacgccggcattgccgactccgagcgccttgcgaagcgccgcgatgtgaacgcgcaagctgttctcgttgacactggagccgggccacgctctggtgatcagatcgctcttgctgacgacggttcccgcttgtcggatcaatgtgagcaggatgtcgaaggcccgcgccgacagctggatttgctcgccattcctttcaatccgccgctgcccggcgtcgagatgaaacgggccgaagacgaaagtctcccgagaggcgctctcttggtcagatgggagagcagcggccatgtcaatatcgctctgccaactggcggcccctctaggagttcaaccgacgaacgacttgtcgggttctagaactcgggacctcgctaggacgtgtggaggttgtgcatgctcaaaactaacatcgggccatatcgacgtaaaggatggtcgctatgcgccgcatgtcacggccgcatatggagcttttgcgctttcagcctttgatgcggcgatatgtcactcaacggcgctcggctctagccgatgatcaccggcgagaagaagtcctccagtccgatacggcgcagcaattcggcgcgtgcgcggccggcgatggcgtcgatggcggctgcgccatcgtcatcgggatcgaaatgaaccctgagcggccgccgccccaatggcatattcacgacatcgacgatggctctcgcgacgtcttgcggagcccgatccctgggcgaaaactgcgccagtcccgcgagcgcggtctccgtcacatcgccggtcgggccgtcggcgtattcctcggcgcgagcggtgtccgttggccgaccggagcgaacgtagtggccgggtccgagagcgctcggaacgacgatgctggtctcgatcccccatcgtgcgagttcgccggcataagcaagcgctagcgtgtcgatggcggctttcgacgacgcataggcgccaagaaatggcaccgcgacgccagaggcacagctcgatgtgatccatatcatcaggccttggccctgtttgcgtaattgcggcaacgccgcccgattgaggcgctgcgcgctcagcacgttgatctcgtagagttcggcgagttgctccggcgtaaaggcttccgttggcccatagaggacctgtcgcgcattgtgcacgatcacgtcgaggcgttcgtgttcggcgatgacgcctgcaatggccgcggtcacggaggctgccgaggagatatcaaagtcgatggtacgaagctcagcggcctgtggccccgtcctgccggagccaggttcgctcaggtcgcccgcttcccgcattgagacgtagaccgtgtgccccgcctgcgccagttcctcacagatgcttcgcccgatgttgtttccagctcccgttacgacgatcactttgctcattggatccccactcgcattccgtctccgcgaggatggcctcgccgctgacgcgacccgtcgtctggcggtcgttacccatgcgcgaagaggatgtgacttagggcgaggtgcgagggcggtctttcgcgcattacgtacaattttcatatagcacggagaattttcagagcgcccgaaccgcggcgcaagtaagtcgtgtccagccgcacggaaggcatgaacgaggcgtgcctttgcgaaattggcgttgagtctaagaagatcggagccgcgccggccggctaggaaaccttctcgttatccgacaatgcgaccgtttcgctccgctcgccgggcggcttgtggctcggaaggagactgaatgaatctaccaggcaaactaccgtggtcgagcctcggatcgctcatcttgattgcggcggtcgtgggcggtggcgcagctgcgttcgcctacaccgcaggatggctctcgccggggcgtttgacgcccgaacggatgatcgaggcgctgacgccatccggcattacaccactcggacaccggcgaaaccacgccaagggaatttgcttcaccggcacgttcgaggccaacggaaacggcgtagaactctcccgagccaaagtcttcctgcaggggagatatccggctctcggccgcttcaatctcggtacccccaatccgaacgcggtagacgcgaccgtgcgcgtgcgcggtctcggacttcagatcgcggcagatggcgaggtctggcggatggcgatgatcaacccaccgttcttcgcggtctcgaccccccaagcctttcacgacctgctgatcgcgtccggcaagaaggatccggacgcgatgaaggcgttcattcaggcaaatccagagttcggtcgtttctcggcctgggccaaggcggcgccgtggaccgccagctatgcggaggagtcttatcatggtctcaacagcttcattttcacgaatgccaagggcggcaatcacgcggtgcgatggtcgctgctgcccgcggcacaacctgtcccgatctcgcaagccgatctcgagaagcgtgctcccgattatctcgagcaggagatcgcggagcgggtccggacagccggtccgctgcgatggaccatggtcacgaccgtcgcggatcccggtgatccgaccgcagaccccagcaaagcctggccggagacccgtcgcaagattgaagtcggaacgctgatcgtgcagcggatcgaaccggagcgcgatggaccgtgccgcgacatcaacttcgatcccaccgtcctgcccgagggaatccgagtgtccgacgatccgttcccggccgcgcgctcatcggtctatcgcaggtcctatgacttgcgcgccgcggaagccaaggactatccgcgtaccggagccgcaaagccgtgatcaaagcttctcatcgcttcacgctggtccagcggctcctgcactggctgatggcggcctgcatccttgccatgctcttcattggtgccggcatggtctcgacagtcgcaccagagtatcttccgctgattctcatccacaagacgctcggcgtcaccttgctgggcctcgttctgatcaggctggcacttcggctgtattacggcgtcccttcattgccggacgatcttccgagagccgtgaagctcggagcaagatcgtcgcacctactgctgtatggcttcatgatcgtcatgccgctgctcggcctcggcatgctctggacagcgtcctatccggtcgttctctacggcggcattcaaattccagcattgttgccgcagagcgaccatgcgcacacgctgttttggaacgcccatgtttatctgggctttgcgttctttgctctcgtgctgctgcatctggcagcggggttattccacgcatgggttcggcgcgacggcgttttcggcacgatgtcgctggcgcgcgtacgagacagaactacggacggcgaatgaccctcggacctcaccgcggcgagaattctccaatctccaagcaaggataacgatgatgaccaaagtcgaactccagacaccgaccgatctcggtgccaatgtgaaccgggacgtgccagccgcgttgagagcgctgctcgccgacgtattcgccctttatttgaagaccaggaacttccattggcacgtatccggccgccactttcgcgactaccatctgctgttcgacgagcaggccgagcagatcttctcgatgaccgacgatatcgccgaacgcgcccgcaagatcggcggcaccaccctgcgctcgatcggccacattgcccgcgagcagcgaattctggacaacgacgccgactatgtcgacccgcaggacatgctcgctgagctgcgcagcgacaaccagcagctgacgcgggagatgcgccgaattcacgatctctgcgatgaatacggcgacgtcgccacagcaagcctcctggagaactggatcgacgagaccgagcgacgaatctggttcctgtacgagaccggccgtaccggtccgacttcgtaagctcaagatgtgccgaccggcatggtcgtcgtcgagctgatcacggggtcagcgcgctgttcgctccgcagcggcgcgggttcgctgcgggcatcgcattcagcttcgcgctcgatagccgtgaatcccgttacgtccagccggcgacggtataggccatgatgacggcttcgacgttcacccggcatcaggagatcgcctggcgcggcggtcagatacggtcgacttcgcgcctggtcgctgaagagaccgcgcttgcgcttacctataacggatcgacccatgcggtaatgatgggcaccccgggcgatctcgaggatttcggtatcggcttcagcctcaccgaaggcatcgtcgaacgcgcgagcgagatcaaaagcatcgagattctcccgaacgagctgggtgtcgaggttcggatgtggctcgatggcgaccgcgccgcgtccttggcgacgcgtcgccgcgccatcagcgggcccgtcggatgcgggctgtgcggcatcgagagcctcgaacaggcatgccgcccgccatcgcaggtcgcgagccgaaacatcgtctttcatgcgcgggacttgcttggcgccatgcaggcgctgtccccgctccaagtcctgaaccagcagacgcggtctgtccacgcggcggcgttctggcatccgcgcaccggcatcggtctggtgcgcgaggatgtcggccggcacaatgcgctcgacaagctgatcggtgcgatggcacgcgagggacgccccgctgtcgacggcgccgtgctgctgaccagccgcgtatcggtcgagatggtgcagaaggccgcgaggatcggcgcaccggtcgtcgtggccgtatccgctccaaccgcactcgccatccggaccgcggaggaggcgggcatcactctgcttgcgatcgcccgcgacgacggatacggcgttttcacgcatgcacgccgcgttctgctgcccgacgaggccgcagcgcgctgaggcctgatctcgcgggaaattggcgccgtgatgcaagccagatccctggtcgttgccggctaggagcgggccggcgtcgatgatcccgagcgatcactgcttgtcgggtctctcctgaccgtgtcgggtgatgtcctggagaaaggccctcatcgtctttccgctggggctgctctacttcgctatcggcttccgcgtcttcaagagcaagttcctttgggaacgacctcgtactggccgcaagtagcgaccaggcggaatgccgcccgttgtggtggctttccgctggatagcagccatgctcaatcaagcaataaagaaagggcgccggcttcggcgccgttcccgtcaggtcttcggcatgacgcctggactgttgtccggccactgcgcgatcaacttctcgtcgatgttgaggtgttgggcgaccagcctcggcggggtgtgcgccagccagttggagagcgatacctcctcgtagcgcggagcccggaagacaccgatgaactgcacatcggtatcgccgacgttctcgacgtagtgtccgagattgcgcgggatatagccgatgtcccccgcggaaaaatccgtcgtgcgtatgttgggccccgtatcgaacaccgtcattcgcgccttgcccttgatgtagtattgccactcgtctgcgttcgggtgccaatgcatctcgcggacggcgcccggcggcatcgtcaccagcgctgccgcaaccgtggttgccaccttgaagttgctgctgtcggcgactcggatgcttcccgcagcactctccttgagcggtgcggaactagccagcggatagacgaagggataaggcggcgcctcggcatgttcggcgatgaaggcacgatctgtggcgagatcgccgggaagcgtgccttggaagatccagagattgtgcaacggaatcttggcaaaggtttcggccggcacgccgaagttcttgctcagcacctccggcggagtatgggcgaaccaatctgtcaccagcagtgtgttgaactcgttggcgtggccgtcgtcgaagcagatcacgaactcgcagccgtcgggaccaagtccttgcagggaatggggcgcgcccgacgggaagtaccagaggtcgccggccttgagatcggccacataagggcggccctggacgtcgagcacggtgatgcgacagccaccgtaggtcatgatcgcccattcggccgcctgatgccaatgcagttcgcggatgccgccggcggacagtcgcatgttgacaccggagatctccttcgagagcgcgaagtcggcaacagtgacctggcgggcccagccgccgttctggatgcgcctgggcgcgttgttgaaggaagcccaattcatcggcaggccgccgacatccgtcgccggcggcgtctgcgcggagggaaattgcttccccagagccggattctgtggcccgtgatcgctcaggctgctggcattcttggcatttatcgccccctgcggcggctcatccgggttaccgaaggtcgcgccttgcgcaccggagccgaccattgcggcgcccgccgctgacatagccagcaattctcgtcgtgaaaacatgttggtcgctcctcaacgcattgtcgagcctccagcgagactccagcgttgaagcctagtttcgtcctgtccgtccagcttccgcgaacgacgctcttttttccggaatgcactatcgacgtccgcaaggcctgcgcgctcgcagcgggactgaaggtgtgcaattgcgaaattcgagggccgatttgaaaagacgctacagctgctgcgatccttaacttcgatgggatcaccatattcagagatatcttcgatgaaaagaaaatcggttcgtccctatcgtgagcctgccggaggctggggagcgctgaaggcactcagtgaggccctgctggtgcagcgcgtgccgattaagggcgcagtgacgctgagccgcatgaaccagccgcaggggttcgattgtcccggctgcgcgtggcctgatccgaagcatacctcgtcattcgaattttgcgagaacggcggcaaggcaatcgcttgggaagcaacgtccaaacgatgcacgcgcgaattcttcgctgcacataccgtctcggagttggcaacctggagcgactatgatctcgaaatggtcgggcggctcacgcatccgatggcctatgatgccgcatccgaccgctatcttccggtggagtggagcgatgccttcgacatgatcggccgtgagctgagggcgttgccggatccgaacatggcggagttctacacgtccggacggacctcgaacgaggcagcattcctctatcagctcttcgtccgtgaatatggtaccaacaattttcccgactgttcgaacatgtgccatgaggcgaccagcgtcggcctgccgcaatcgctcggcgtcggcaagggtacggtgctgctggaggatttcgacaaggccgactgcatcttcatcttcggccagaacccgggcaccaacagcccgcggatgatgacgagcctgcgcaatgcgtcgcgccgcggggcgtcgatcatctccttcaacccgtttcgcgaacgggcgctcgagcgcttccaggcgccgcagagtgccgtcgagatgatcacgctgacgtcgacgaagatcagctcgaagcttttccaagtgcgtgttggcggcgacgtcgcggtcctcaagggtatcatgaagatcttggtcgagctggatgacgcggcccgcgccgccgagcagccggagatcctggactggaatttcatcaaggggcacaccacggggatcgaagcgctgattgacgacctcaagcgaacgcaatggccagacatcgaacgtcagtccggcctgacgcgcgaggacatggcgtgcgcggccgaagcctataggaagtcggagcgcgccattctcgtttatggcatggggatcacccagcatcagcgaggcgtggacaacgtgcagcagatcgccaaccttgcgctcctgcgcggcaatgtgggacgcgagggtgccggcgtttgcccggttcgcggccattccaacgtgcagggcgatcgcaccgtgggcatcacggaggtccccaagccggattttctcgagcggctcgaacaccacttcggcttcaagccgccgtcagagccgggacacaatgtcgtgacggctttggaagccatgatccgcggcgaggtgaaggtcttcttcgccatgggcggcaatttcgccgctgccattcccgaccggcgtgcaacgcaggcggctctgcgcaagctcgatctgacagtccacgtctccaccaagctgaaccgaagccatctgatccatggtcgcgccgccctgatcctgccctgtctcggccgcaccgaaatcgatgtccaggcgacgggacctcaatccatcacggtggaagattccatgtcgatggtccacgcttcgggtggccgcaacacgccggcgtcagagcatctgctcagcgaagtggcgatcgttgccggcgtcgccaaggccaccctcggcgaccgcacggtagttgaatgggatgggtttgttgacgattacgatcgcatccgcgatgccatcgaggcggtcttccccatcttccaggactacaatgcgcggatccgcgtacccggcggcttccatctgacctcgacggcgcgggaacgaatctgggccacctcgtcgggcaaggccaatttcctggtattcgagggatgtggcgaggatccaaagcaatgcgatcccgatttcctatggctcagcacgatccgcagtcatgaccagtacaataccacgctctactcgatgtcggatcgctatcgcggcgtcttcggacagcgcgatgtggtgttcctcagcgaatacgagatgaaaaagcgcggctttgccgagggcgaccgcgtggacctcatcacggaatccaccgatggagtcgagcgggtcgtgcgtaacttccgcgtggtcggtcattcgtttccggccggctgctgtgcagcctattatccggaggccaatccgctggtgccgctctatgcccgcgatcccatgagcttcacgccgtcgttcaagggtgttccgatccgcttggtgcgctcgagcgacgtcgcgactgcaacagagaggctttgaatccgcgtcctccccggatcaggtcgagcccaccggctcggagatcggcagcgtaaaccagaaacgtgcgcctccctgagcgcccttaccttcggcatggatccggccgccatgcgcttcgacaatggagcggcagatcggcaggcccatgcccatgccgctatccttggtcgtgaagaagctttcgaacagccgaccgacatgttcggggtcgatgcccggaccgttgtcttccatcgagcagcatagggttttcgtatccagggaaatggtggtgatgacgatcctgcggttttcggtgccggcctgggtcatggcctgcacggcgttgattgccagattaacgatcacctgctggagctgggtgcggtcgccaagcaccagcggcgctgccggatcggggcggtgctggaccgcgacgtcgcgagactccatttcatgtcgcaggaacaacagggcttcccggacgacatcgtcgaacgagaggaagatccgctccggagtcttgcgtgccgccatgccgtgaacgcgcgccacgacgctcgcggcgcgtctggcatccgtggccgtgttctcgatcaccttgcgtagctcggccaagtcgggattgggtctgtcgagccatcgcaggccggctgcggcattggtcgtgatggccgacaacggctggttgacctcatgggctatcgaggcggtgagctcgccgagcaccgagattcgcgcggcatgcgcgaactccgcctgcacctgtcggagcctctcctcagcgcggacacgctgcgagatatcgatcgtgccgacgaggctcagctcgagatcatctataggaccgacccgcgccgtcgtaaataggacgtcgaggatgcggttgtcccacgtgaccatccgggtctcttcctcgaagtgggtctctccgcgaaagcgggattccatggcgcgtcggaatgtgtccgggcgctccttccaggtgtcgaccatggaccgtccgatatactgatcggagcttcttccgaacatctgaatggcccgttcgttggcttcctggaacgagagcgcctccatgcatgttttgagaaagtcggggtggctgtcgaaataggcaccgagatcctcgacgccctcggccctcagctttcggaacagtgcaaccaaccggctggcgtcgagttgccggaatgcgatcggcatacggctgaacagctggcgatagcgctgctcgctccgctccagttcggcgatcgccctattccgggcggcgatgtccatggctgctgcgacgagcgtcagcgatgcagccaggaaagctgcgactgcgatcaccgtgaaatcatactcaagcaagaagcaggcgagcgacaacagggccaaggcgacactgccccaggcccacaggagaacgcgattctgcttggtctcggtcggcagcacgtcgcgccaccatcgccggagctgtacgcgatgggagccattcgggcgttcagacgtcataacgaacgtctactgaggtgcggaagagccgtcttttgcgtttccgcaggcggtttgtcaaaacgcatgacgctacgcgccgacatgggtcgcagccactctccggtcgtgggccgaagctgttgctgccacggggcgcatcacgccaaatcgccgcttgaatgcggcacatcgatgacgcgcgccggtgggtgccaccgccgatcttgcggtcgcccggccccccgggcctcgacctccaacgggacgctcttggtcgccacctcagcgaaccactccactgtgtacacacttcggcgccaggcattgtcaccagatgacagacgttgaccgtgatccagacgttgccatggccggcagaagcggctggattgtcgctcctgctcccatctccatgtgcatgaacatggttggcgtgtagagcgccggatgccgggcaccaagtgagcgatggtcgtctccggcgtgacggtcaccagtgctttggtcgacatgccgtctcggacgcctcaaacggattcgcgggtcaatcccttagctccgccggcgggggaagtgccgggtgcttcacttgcaacagacttgggtccggtgagccagctgccgagcttgtccagatagagatagaccacgggcgtcgtgtagagtgtcaggatctgcgagagcatcaggccgccgacgatggtgtagccgagcggctggcgtaattccgcgccggtaccggtgccgagcatcagcggcacgccgccaagcagcgccgccatcgtcgtcattaggatcgggcgaaagcgaagagtgcaggcctggtagatcgcctcctcggggctcagccgctgccggcgttccacctcgagagcgaagtcgaccagcatgatgccgttcttcttgacaatgccgatcaggagaatgatcccgatgatggcgatgacgctgagatccatgtggaccgcgagcagcagcagcaatgcgccgatgccggcggacggcagtgtcgagagaattgtgatcggatggatgaggctctcatagagcacgccaagaatgatgtagatcacaatcagtgccgccccgatcaacagcggcgtgcccgacagggacgactggaaggcctgcgcattgccctggaacgaggtcgagagcgaagccggcttgccggtctccttctcgatcttctggaccgccgccacggcatcgccaagtgcagcgccgggccgcaggttgaacgagatcgtgactgagggaaacaggctctgatggttgatcaggatcggggcgggctcgatgacgctgtgaaccagcgtgctcagggggacctgctggccgctggccgagttgaggtaaatgtccttgagcgcctcaggcccatactggaacttcggatcgacctccatcacgacgtgatactggttcaacgaggtgaacatggtggagacgatgcgctggccaaaggcgtcgtcgaggacattgtcgatcgtcgtcggcaggatgccgaagctggaagcaatctcgcgattgacggtgacctgcagtctcgggccggcattggcctggtcgctcgcgacgtcggtaatgatgtcgagcgcgcggagcttcttcaggaagatcgccgaccagtggctgagctcgttggaatcggcgtccctcagcgtgtactggtattgcgtcttcgacaggcgcgcgccgatggtgatgtcctgagccgcctgcatgtagagcgtgatgccctggatgtgggcgagccgtggtctcagccggttgatgatctggtcggcgttcgccttgcgttcgggcttcggcttcaggacgatgaagatgcgtccttgattgagcgtcgccgtcgggccgccggggccgatgtagctggctaccgattggatggccgggtcctttgtgaggacgccgacgatcgcctgctgacgctcggacatggccgggaatgagatatcctgggcggcctcggtgatgccgacgatctgtccggtgtcctgctgcggaaagaaccctttcgggatgatgacgtagagaaagccggtcagcgcaatcgtcgagagcatcacgagcagcgtcaggaagcgatggcgtagcacgatgcgcaggccgcgcgtatagagtgcaagcagggcgtcgaagccgcgttcgaaaaggaggtaaagtcggccgtgcttcttgcgcgaactgtcctttaggaggcgcgcgcacatcatcggcgtgagcgtgagcgagatgatcagcgatagcaacagcgaggcggtgatcgtgatggcgaattcttggaacagcttgccgacatagccgcccatcaggaatagcgggataaacaccgcgatgagtgagaaggtgatcgaggcgatcgtgaagccgatctcgctggagcccttgagggccgcgtccatcggcgtcatgccctgctcgagatgacgaacgatgttctcgatcactaccacggcgtcatcgacaacgaatccgaccgcaatcgacagcgccatcagcgacagattgtcgaggctataaccgaggacgtagaggactgcgaacgttccgatcagcgccaggggaaccgtgatagccgggatgacggtggcccagaaattccgaaggaagaggaatatgaccatcaccaccaaggcgacggtgagcatcagcgtgaactgcacgtccgagactgcggcgcggatcgtggcggtgcggtcggctgcgatcgtcactttgatcgcaggcggaacggaggcttgcagttgcggcagcagcgccttgacgcggtcgacggtttcgatgacgttggcgccgggaacgcgctggacggccagaatgatggcggggtccttgccataccagcctgccaggagatcgttttcgggcgcttcgatagccgtgccaacgtcgcgcagccgcaccggagatccgttgcgataggcgatgatgagatcctcataggtcgaaggcttcagcagctgatcgttggtgttgagcgtgtaagtcacgcgcgggctgttgagcgtacccttaggcagatcgacattggcgccggcgatgacgttgcggacatcttcgaggccgatgccgcgggcggcaagggcctgtggattgacccggatgcggatcgcgggcttctgctggccaccaattcccacgagacccacgcccgggacctgcgagatcttgggcagcaggatgttctcggcataggcgtccaccgtggtcagcggcagcgagtccgaggtcagcgcgatcagcatgatcggcgtttccgcgggatttactttccgaatcgtaggggggtaggggatgttcggcgggaggaagggactggcggcgttgatcgcggcgagcacgtcgacggcggcgctgtccaccgtgcgcgacagttcgaactgcaccgtcaactgcgctacgccgagcgcgctggacgaggtgagctgggtgatgcctgggatctggctgagctgctgttcgagcggcgtggccagcgatgacgcgatggttcccgggtctgcgccgggcaattgcgcggagatctggatggtggggtaattgacgttggggagcgcgccgaccggcagcaagggataggccgcaagcccgagcaacagcaggcccgccatcagcagggctgttgcaatcggccgcaggatgaacggcgcagagatattcatgggatggcatcctgcacggcgctttgcaggtcggcctctcgcgcggccttgccgtgcagctcgtggacgtgacttccttccgtgagccggtattgaccgtcgaccacaacgacgtcacctgattctagtccctgatcgatcagtgcttggccatcgctgatctgcgcaacgtggaccggacgcaaggtcacggtctggtcggcagacacgacatagacatagctgccgtgaggaccctgctggaccgccgagccggccactgtcaacgcatctttccgcatctccagcagcagacgcgcgttgacgagctgccccggccacaaccggtgctcgtggttgggaaattccgccttgagctggacggtgcccgtcgttcccgcgatctcgttgttgaccagcagcagcctgccttcgtccagcttcatcttgttgtcctggctgtaggcgatgaccttcagcgttcccttggcggcgtgctcctgaatcgaaggcaggtccgtctgcggcaaggtgaagagcagcgagatcggctcgatctgagcgacgacgacgaggccattgggatcggtcggatgaatcacgttgccgacgtcaatctggcggacgccggtgatgccggggatggccgaggtcaggcgcgtgtagctgagctggacgttggcctgatcgatctgcgcctggtcggctttcaccgccgccttgagctgggcaacctgcgccgtctgggtatcaatcaattgcggcgtcgcatagcccttgtcgccaagctgattgtagcgggagagattggcctcggcattcgcgagctgcgcctggtccctatcgcgatttgcggtcagctgctcgatctgggccttataggggcgagggtcaatctgggcgagcaagtcgccggccttcacggcttgcccctcagtgaaagcgatcttgacgatttggccctggatctggctgcgcacgacgtcggtgttgtacgcgataaccgtgccgatgccgcgcaagtagatcggcacgtcctttcctctgaccgtggtggcgaccacgggcacggcagcgggcaccggcacaggcgcggctgcgacgaccggcttgcggtccgcgaagaaccataagcctgctccggctccgattgcggcgagaacgatgagcgcgacggtgaaagagcgtttcacgacaatgatcctcgatgaggtcagggattgcccgcgccgccgatcaacggcgtgccgttgatcgacatcgcgccatcggcagggacggggttcggcaccggaacggagggactgattccggcaccgccgagctcggtggcccccaacggtatcccgacgcgtccgacggtcattggcgaggacgaaagcggcggagccgccgcgctgccagcgcatgcgctcgatgagttgccggacagtccgccgccatcgaacaatgcgccaggcgaggcggagtttgccgatgtcggacagttcgacatgccttgcgcaggattgagcggcgaggtgccgggcgttgcaatctcggtcgatcccagcgggatgcctacgggccgggtggattgcggattgagcggcgatgtcgcgagcatgccgggagaaggttgtattccgggcaccatcgtttgagcgacggccgcagtagagatcagccaaagcatgccggctgcaagcgtcatgcccggatgcatcgaggtgcgccggtgtgaattcgaacttatcgtgacgatatgggttggtgaatgctgattccgcatggacgatcgctccggcctgaatgccgtcgaacattagaaagccgtggtaggtccggtatttctagaacgcacgtcccgctcccggcctgcacgaagacgacgagagtttgcttgcgtcctctgtcatacgactaggcgcccactgcattggcatcagcacgcgctggcgtcggtcgtgacttctacttctgttatctcagaatggaccgcgcgcgtgccagttcccggcggcacgcgcgcatgtcaccgacgtgatcggcggcgcgagcgcgatcaagcgaatccaacgcagccgtgaaatcgaagccgtcgccgctctctgcttcggcaagggagcggggcgttggctgatggccgcgcaatgcgctgaggctctccggctgccagccgtaggagccggcgtccttttcgatgacccgatccagctgcacctgggtgcgagcgatctcgttcgcgcaggtacccgcgacggctggcgacgccgcgcacagcagaatgaggagtgcaggctggcgttttgcggtggatgtcattgatgcggtcctgtgcatgctggatgcgcaattagctaggtcgtcttctccggaatcgcgagaaagcattggaccaaacggcatgtccgggcgtgcgaagtggcaaggaaagttaattgcggaaataccgcgggggcggtctcggcgtactttcgcgccattccaacacggagggatcccggaatgaaacctcgtcgcgccagcctcgccttcgccgtcaccctttcgctgttcgcgaccgtcgacacggcgcgtgcggagccgctaaagaacatcgtcctggtgcacggcgcctgggtggacgcgtccggctggaagccggtttacgagatcctcaccaaggaaggtttccatgtcaccatggtccaggagccggaaacgtcgtttgccgatgacgtcaaggcgacgaagcggattctcgaccttcaaaacggcccgacgcttctcgtcggccacagctatggcggctcgatcatcaccgaagcgggtgttcatccgagcgtcgtcggcctcgtctacgtcgccgcgcacgcccccgacgtcggcgaggacgaatctgcgctgggcaagaagacgccgagcgtgctcggaaagaccgagggtgtcatcaagatcacgcccgacgagttcacctatctcgatcccgtgcaattcccgaagctgttcgcgcccgatctgccgcgtgatcgcgccgagttcgtcgcacgttcgcaggtcccggccgccgcacaggtgttcagcacgccgctgacggcggcggcatggaagaccacgccgagctggggcatcgttgccggcagcgaccagatcatcaatcccgatctcgagcgctggtactatgaccgcgccaagagccacaccacggtgatcccgggcgccagccactcggtctacgaatcgcatccgaaggaagtggcggccgtgatcacccgcgctgcgcgcagcatcgatcagcaggccgcgcgctgaccacgacgcgttttgccggtcctgacgcacggccggcgaagggagggacggcgggagagacagcactcccgccggcctgactgcctcatttgaaatttccatgaatccgaccggaacgaccggccccaggccgcgaagaagctggaccttggttattcgggggttcgcaactgcgcggccaaatcatacgcaccttgcaggcgctggatgctgcagtcgcgctcgacgaggcgattccgaatagcgtcatgtcgccggctagagtgtcggcgaggtcgcggcccggctggatatcgtggcgcgccgggcggaagccatggatgcgtccacccgcgtcggcgacggctggtcttcgtgccctgacttttcgcgcagtcgctgcgggcaccgcggccgcaatggagatgcatcggccaaggatctgcctgtcgaggttgcctccgcacgcgacggctcgccgaagcgttggccgagtttcgcgatatcctgcgatcggcatccgcggcattcccgccgggcggcggcgcgcgtgtgctgagtggcatcgacggcgctcccatcgtctccgccgagacaggtctcgacaagctcgctgcgcagatctcacaaaccgcgcaatgggagagctggctgcaggcctgtctggcggcccgcgccacggcgtttctggggcgtgggccaggacacgcgttgagcgcgatggtcaggggcatccggcccgatccgccggcgcatgcgctggatgatttcaggagtgttgtgggtgtacgcatctggctgcgcgttggctcaccgatgagaaatgcccttcaattgcctccagcctcgaataggcgcgtgggctgccaaaaaagaggggccgtcctccttgtgcgagaggacggccctaatgctcgtaggcctgggaggagaggcgcgagccgtgacttgggctctcagtcactaacatctccagcgtcgccgatcgggcgggagaagtatttcacgaaacaaggtttgtttctcatttcgcatcattcacgaaagcgcatacggcagaaggtgaggtacggccttgcgccccgaagctggatcgtcgccagccggcgcggatgaggcctgggcgttccggctcgagcaccgccagcgtgccggagtgttgcccgtaatgcgcttgaagacggtggagaagtgcgcctgcgtgcagaagccgaccgccagcgccacctgggccagggaggtctcggagttcagcagcagggatttcgcctgctcgacgcgctgatgcagcagatattcacgcggtcggtacccggtcgcggcccgaaactgcgcggcgaagtgcatccgcgatagtccggcgactccagccaggtccgacaggctgatgcattggtcgaaatgcgtcctgacatagtcctcgatgcggcgcagacgccatttcggcagagcgttgaccttcgtgcgcggcgcttcgcgccgggccacatgcattgccaaagtctgggcgatgcaacgcgcgaagtcgcggtcgaccggatggccgtgttcggtcagcgcctttgcgagttgcgcggcgaacgggtcgcgcagtagaaccatgtcgttcaactcctcgggagtgaccgggtgctctcccgtcggcgataacggcagacattttgccggaacgtggaagtgcagaaaatcgcatgacgcatggaaatgtgcgcaaagcgactttgacggtgcgccgacatagagcgtgcccgcgggcatgatgccgtcgaatatggtttgagcgcctctggtcagcttgagacgggtcgtcttcagagcgatggcgaagaagtaccggtctgttggcgtcgttgcttcctcccgccccaccgccgcctgcgtggaggtccaccgcgagatcatgatgtcgtcacgcccattgccggtgggctgctcaggctggcgccatcttcgctcgttgggaactgcgcgttgcccctggggcaaaacctgttcgcgagggctgggttgatacgtcagccgggcgcccgccgcttgcacatcggtgaacatcgttcgtcccgtccttgatccaacttgcggcgtcaccgcagctgaaccttgttggtccatgctcgaacgatacgtctggacgggtcacaaggctcgttagagttgcttaaaccgtgttaaattttgcgaatgcagcggtggggccggagatcgcatggccgttgattggagcagaaagatcaatggcctaagtgtcatggggtttgcatggcctcgattcaggatcagtaatgcggcggcgagttcatgaacggggaaactattgtggtccggcgcctgccagcgcctcttcgaggcagcggatgatttcgtcgccgctcgagggcttgccgatgtagcagtgcgcgcccgccgccatcacgcgctggcgcaccgtctcgctcggaaatgccgtcatgaagatgatcgggaaacggcggccggaggcaaccagcttagcctgcatctcgtcgcccgtcatgaccggcatctggacgtcggcgatcatgcattccggatcgtttcccggtggttgtcgcaggaaatcgaccccggactcataggcgtgcgcctcatagccgagcgaacgcaccaggcttgcgagggacgtgcgaacgccttcgtcgtcgtccacgatcgcaatcactggggtcttggccatttggcacacatcctggccgcggtgttccgcaaggaggacatctcccgttgcgcggctgatggccccttatgcaccgttggtcgcccttgttgaaactatactcaggtttggtccgtagtcctgcgggtctgggaaagtccgagcgcctcggccttgcgaacgaggtcggccagcgacttagcgcccatcttgcgcatgacgttgccgcgatggatcttgaccgtgatctcgctgagcccgatcaggccagcgacctgcttgttcatcaacccggcggtaacatggcccatcacttcgcgttcgcgtgccgtcaaggtctcgtattgagctcggatatcctccttcgccgcggcttcggcgcggtgctgcgcgtcgcgctcgagcgctgtcgtcacggcgtcgagcatatcctgatcgcgaaaaggcttggagaggaagtcgaccgcgccggccttcatcgcacgcaccgacattggaatgtcgccatggcccgtcatgaagacgatgggataattgatgccctggcgggtcaactggccctggaggtctagcccgctcacgccaggaagcctgacgtccagcacgatgcagcccgggccgtcaggcagcgtgccgccgagcagttcggccggcgagccgaacaggcgtgtttcgaggccaaccgaccggaataggctgtcgagcgaggcgcgaatgcctgcgtcgtcatcaacgatgatgacgactgaactggaggaggtggccggcggatgcgcttggcttggtcgtgtcatggtgaggcgtggtgtttgctgaacggcaacgtcaggcggaaagtcgctcccgagccagggatgctctctgccgacaactggccgccatgagcttccgccgtcgttcggcagatcgcaagccccatgcccattccgccgtgcttcgtcgtaaagaacggatcgaacaggcgcggcaggtcgtttgggctgatgccggggccgctgtcctgcaccgtgattgcgaggctctcgccatcgacggtgccggtgcgcaacgtgacgaggcgggaaccggattggctggacatggcctgggcggcattgatcagcagattgacgagaacctgctgaagctggatccgatcgccgcggatcggcggcaagccgggttccatctccatggcgagggcgacgtcgtctttcgcgaactcgcgggctaccagagcggttgcctcctcgataatctcgtcaatctgcaactcgtcctgctggggcggtgccttcttcaggaaactgcggatccgagccacgatctcgctggctcgccggccctgggcgacaacgtggcccattgtggtggcgacttccctcaggtccggcacgtcccgtcggagccaccgcaggccggcttcgccgctggtgacgattgctgccagcggctggttcacctcgtgggcgatggaggcgctgatctcgcccaaggtggcgacgcgcgccgcatgcgcgagatcggcctgtgcggcgagcagcgcatcctgcgcctgtctgcgctcggtgatatcgatgacgaaagcgagcacgttgcgatctccatccggatcggccggaaagctgatcgtgaacagcacgggaaccttgcggccgtccagcctgacgatctcggtctcgccttcgtagaagggctctccttccgtgaaggccagcaatgcgccgacgaagctgcggtcgttctcgctgaggagcttgtccacattcgcgatgaaggccgaagcgccgtcggcgcccgccatcctctgcatggccggattgacgtcgatgatcctggcaagcctgcgggcggagcggacgacatcgggatgtcgtgccagatggtcgcgcaattcggcgccgccggtgtccagcgctcccagcgtggcccgtacgtctgtccagtcctcctccacgacgccgatccggcttgcgttgaacatccggcggtatcgctgctcgctctgcaccagcgcgctgtgcgccgccacgcgatccgtgacatcggtgtgcgtttcgagcacgccgaccggtttgccgagatggtcgtgctgcaaggcccagcgcgcatcgaccgtgagtgtggcgccggccctcgtgcgctgcttcactctgccttcccagcgtccggtctcgagcagaacacgctcgatggtctctcgcctatcgggataggtggtctgcagcaactcgtcggcggaccgcccgagcgcatcttccgccggccagccataggtctgctccgcggccttattccagaagctgatcacgccggcgtgatcgcggacgaagatcatgtcatgcgagagattgagcaggcgcgcctgtgccgccaggcgattggtcgcggcatgattctgcagcgcgagcagtgtggtgatggcgatggctgcgaggctcaccacggcgcgaagggccggcgaggcgatgtggtgcagatcgtgcgagaggagatacgccgctatcgtcagcatcgcgcagccacacgccgcgacgaggatgtcgttccgcctgttcgttctcgctgcgagcaggatcgcaacaacgtagagaacggcgatcgcgccctcgagcggcgtcagcacatcgacgaggaagaccgcgagggcaaggaaggctgaccagaaccgcaggcccacacggctcgtggacgaatgcgtggcccggtcaggagtcgtcatcgtcgccagtttcgttcgcatcattccagcggcgttgatgccgcgatttgatcgcgccgacaacatcccactgcgcgattttcgtgctctcttggaagaccggccttatcggccgagcgccgcgcggccgatgaggggcagcaattccgcaggaaaaagtgattctacgcgaatctgccaagcgaagcgcgtcaacttaccgcacttgtatcaagcagtgcggccagtcgagtcgtcatgcgggcactatcccgccgccatccgacccaacgacgagggcgtgatcatacctaggtatgatgcgatcaacccgagaacctaccggttcacccgcccgtagaatggagcgcggggcccgtcgaattactctgctgccatgacgttcggacaagccggtcaggcttcgccgagtcgaaatggggaaaaggagattcgacgatgtcgctacagctgtcacggccgcttaccaccaaggatcatgcgatcggctcgatcgatatctcaagcctcggcggcagaagtcggccttcgggatattgcgatcaggccggctgcgagggaacgacgctgcctcggggtcatctcgatgtcgccctcgctatcgaggcgccggatgcacagaggtccgagagccgtccaagggacttaatcgatcccgtgctgcggcagctttcggatgcgcttgcagcgacggaggcactgcaccatccgcattccgccatcctggccgacgcattgcgccttgccattctgacccaccgcgccagcgcgcaggcagtgacccaacgcagggaggccgagcccgatgtcgaagagcgagagggccgtgcgcgtcgtaccgtgcgatcgttgcagaaatggcgcctcaagcgcgtaatgcaatatgtcgacgaaaacctgggcgcgaagatcacgcttgagcacctcgcagccgttgccgggctgagccggatgcactttgccgcgcagttccgggcagcggtcggcatgcggcctcacgaatatctgttgaagtgccggatcgagcgcgcccaggagctgctgaagcagggggacgtctccctagtcgacaccgcattgaccgtaggattccagacccaggcacacttcacgactgtgttcaagcggttcgtcggcgatacgccctatcaatggcgcagcgcctatcttgcgcaattcatgccgctcccgcgcgccggagccatgctgtcatgagcgagatcggcattcaactcctgatgctgccattggccggaatccatatgacgcccgtgcacaacgaggtcacgtgctggctcgaaattgcccgtgctctcggcaattcgtaccgcttggccacttcagggctgagcttgggcgcgctctatggccgcctcatcttcaccttctgcagagctaccctcacggtgtctcgcgactgcacgtactgacaagtgctgagccatcgactggtcacgtgcgccggccacgtcggacgggacgcccatttttatagggccgtcgccggtgtgatgcaccaacgtgaggggtacggcgggactgatggtcgcgatggagcgcttttcgatctcactttcctcaatgacgcagtcgccgttacggccgtcggcgcggtctcgaaggatcgtctcgacgaaagcaagcttggcgctggagccgaggtagagcagcccgaaggccttgccggtgggcgtctcccagcgtgcagacctaaggccgcagccttcttcgctaaggaagcgacatgaagttcgtcttcatcgcgaagcaccgggcggtctggccggtggcatggctatgcgaagcactgggagtgtcgcggtcgggcttccatgcttggctgaaccgctctcccagcgccagatcccgcagtgacaaagagcttggcggtaaggtcaaggccagtttcctggcgagtgaccgcacctatggcgcgcgccgggtgtggcgtgacgtgctcgccgacggggctgactgtggcctgcaccgcatcgagcggctgatgcgcttgcaaggtttgcgagcgcggccgcggcgccggcgcttgccgaaggacagtggcgatcggcaactcgagagcgtgccagcgaacctgctggaccggcggtttttcgccgagcggccgaaccagaagtggatcgccgacttcacttatctctggacggccgagggctggctctatgtggcggcggtgatcgacctgttctcgcgccgggtggtgggctggtcgatgagtgccgccatgacggcacaactcgtgacggacgccttgttgatggctgtctggcgccgcggcaagccggatgcgctgctgcatcattccgatcaagcagtcagtatacgagcgatcagttccagcgactgatggccgaccacggcatcgtttgcagcatgagccgctccggcaacgtctgggacaacgcggcgatggaaagcttcttctcctcgctcaagaccgaacggacggaaagcaaaacctacaggaccagagacgaggcacgagccgatgtgttcgaccacatcgaaagattctacaacgccacccgcaggcactcgaccatcagctgtctcagcccggttgagttcgagcgcaaggtgggattagcttaacccggtgtccatcaaaccggcagcagctcacataccagttctgcagtggaagccgaaattcttgcttaatgaacccatcccggtgccagccattccgtgcaggttaagctaggcctgatagggagctccgctaaccgtcgactgaatcggacaattggacttttggcggccggcctagcttggggcgcggcgccctgatctttggtcgtgtcgtgggttcaatggtcaatctcaccttcaaagcagcgaagaggtttaggacacggtgcagttgcggatcgacggtccctccaaaagttttgtagaccgttgtccgcataatcccgagcctgagtgctagagcactaacgttctcagatttgacgacttcgctcaatccgaggattgccattgccggcttctcgcgatcgaatgcttcgctcaggcttgccgcaatcgcctcggagctgtcggtttccggcacaatacgggcctttacgttcagtgccccaaaaagcttgagagtgcggctcaggtgcgggtcgattcggcccccaaaggtcctgtagagcgcatctcgccgcaagccggcgtcccgggccaagatttgcacgttctgtgcatgcatgaccacgttaagcgctttccttgcgctttctgggttgttttctctaaatttttcagttagataggtcgatatttccgctgggttgtcgcggaggatcttgttaagaactgacttgttgccgactgacatcacgaggggtttgtccgtcactgtggctgccgagctacagcatttctggcggaggcgtctagattaccttcagagattgacgccatcatttggggacttgaagatgaagaagacattgctcgctttagccgcggttgccgcaatgaccggttcggcctccgcggctgacctgggtgcacgtccctacgcgaaggctccgatggtggccccggtcgccagctggaccggcttctacatcttcggcggcggcggcggcggcatctggtcggctgacaccggcgttcagtccacggtgaccggcgctccgatcctcggcttcaaccagaggcagggtggggatggttggtttggcacggtgggtgccggctatgactggcagttcgccggcacttgggttgccggtgtgttcgccgacggtcagttcggcagcctgaagggcacaatccaggatcagggtccgttcctcgctggcaccatcaagaacgactattcttgggctgctggtgctcgcctcggttatctggtcgctccgaacgtcctgtcttacgtgaacgccggttacaccaactcgcactggaagggcacgacgctgttcaacaccgcgaccgccctcccgagcggcctgcacaccaacagcttcgatcgcggcggctggttcgtcggcggtggcgtcgagaacaacctgaacatcttcggcatctcggcccccggctggttcatgaagaccgaataccgcgcggcctactacgacaagaaggcgatctccgagctgactgacgtcggcaacgtatcgaacggccgcgatatcacctttaagcccttcgtccagaccatcagcacctcgctggtctaccgcttcaactggaccggtccagt

SEQ ID NO: 179 - DNA, 16819 bp, Bradyrhizobium colbertium
aaccgaggggaaacccatcaatcaaatggggacaaagcttcgcttacgctgggccggatcatccgcgatattcgccgcaagatcgaaggtcagaccgcgctcgagaatgccgtcgccctcccgctcggccgggcctcccagatccgctcgcagcagcagcgccagcgcggctagaagctttattccttccacgctccggaggtcgagtgcaatcggcaagggccaaggcagccgcgcttacgagttcggtgtcaaagcctctcccggcgctctattcgtgctgcacgccagggcgctaccagataatgcgtacgacggtcacaccttgcggacgtcatcgaccgcaccgagacactcaccggctgtgcgatcgagcgggcctatgtcgacaagggataccgtggccaccacgcgcaaaatcgtcgtcgcgtcttcatctccggccagaagcgcggcgtcttcggtgtcatcgagcgcgagctgcgccgccgctcggccattgatcatcgggcacttgaagaccgatggtcacctcggccgctgctacctcaaaggccgcctcggcgatgcggccaacgtcatcctctccccgtcggccacaacttccgtcgcatcctcgcctggccgagggctctttggtgcctgatcctgaccacgctcatcgcggccgccagcgaccgctcacagctcaaatcggttttcttaacggacgacttcatatggagcatgccgcccttttcatatgtgagcatgatcctgagaagtcgaaggggaacgatcatgctcaataaatcatagcgcgatgacgtttcatctcaatcgcacctcgctaggccgagcggtctcctggacttgggcgctccctttcggttgatgctagatgacgaagcggtcccaaccagcgtagtgttcgcgggttctcttgccacgccgcagactaagaatagctaatgcgacacctaggaagacgctactccaggacgccgttctcgttgccccatccagaatccatggcgctgcgatcagccaagctccgaaaagcacgatcaatagtcgcagaatacgcgccacctccgcggtcgcaataattgcgacggtcagcgtaagggcccccatcaaatggtcgctgttagccatcgcgttggtcgtgccgaagataagtcggctgaacatcagaaacacggcgatggccatgcagccagcgagattccaaggcacgcagacgccccgcattgtatcggtccagaatgcgccccagctcgccagcccatccgatcgatcctctgccccggcatccacggcatcgcccctaaagaaagtgcgaatgagcggcttgccccggcaactggaccagtacagaaattggcccatcgcgatgacttcgtccaatgcgaatggaatcatgatgagcatcgcaagcgctgcaataagtgctggcgtgctccaggtcccgatgacgatgggctggataatgatgaagtagatgctgatgacgcccaagggaatgacgagaatgccgaagaacgtcaccatccagggcatcgtacgccagcggtcgcggccccccatgacagccattaagatttcaagcgtataggcgacagccccaaggccggcatccggaatgggccatgccttggaaacagtagacgtgataatctcctcggtgccgttccttggatcattgggattgccggaaaagaatggctcccagacgtggtccacatgtccgagctgatatgccgtcagcacgcgggcgataatcaggccaatgaggcccattgcggctataggcagccgctgtgcgcccgtggatgggcaataagtccagccggggggaattactttggggtccatcatgccggccatgctcatcccaggcatcatgggcacgagcaccgcgaacgaaatgaccagcgctcctaccaggagatcgttattgtattgcgcggcactcgggctccaaaacaagaggggcgcgaataacagccataaaccgacagcagccgctgcccattgcgcccaccaggccgttctgctcgagagcgaaagcgcgccgaagcaggcaatcaagagcccgctgatcacatcgctcgcgaggagcaagctcgtccgccactcgagcgaaggcaggtcccggtccagagacacgacgagaacatttgtattgatgctatctgcacgcatagcgtcgtaaaccaggggactggcagccagccaaagacccagccccacgttcgcgtaatgcgcccatcgcgtgcgtcgctcttcgtctttcatcttcgacatgtggtcgtggccgcttcgagtggcatgatccgtcccatggtgagggggcgcagaggcctgggcggcgccatgcgcatccttcttttcattgcctgactgggccggcgccggacgctgtccgtaccacgccacgagcgcgggattgagcttgttggctttgtaccatgcggtcggatcacggcgcagcgcatcgatgatctttggcaatgtctgtcgcaatgaatgtcgcggctgccaatccagcaactgccgcgcgcgcgatatatcgagtacatagtgagcgcttgactgctcgaccatccagggcttgatgaattgatcatcccccaagacttcggtctgaagccacgatccggcaagcgccagggtctcggggacgcgaatagtcgtccaatcctcgccatgcagcgcctcgccgatgatgttctgcacttcggcgtagccaatcgcatcgggttcgcccacaaggagcggcaattcggtgggaaggcgatctcttcgctcgatcagccgagcgatcgcgttcgctaagtcatcaagatgcaggaaggactgcccggcgcaaagcatgccgggatagatatgcgccgtcgcgcggtgctcataaattcgcgacacctgctcggcgatgaaaggtgaatggccgagatcatcgtaaacgccggcgatccgaagcatgaccacggggatgtgaccatgccgttcgcgcagcaccgtctcggttctgaccttcgactccggataggcccatgacggctcgatcggagagtcttccctgatttttgcatcgggccggtctgttgccttgtagacaagcatcgtgctggcaaacacgaactgttcgacctggaatgattgtagtgcatcgatcaggcgatgtgttccttcaaccgtcacccgttcatatagcgggtttgggtcacccgatatgtcgtaataagctgccaggtgcacgacggaagcgatccgctttccgaaacgcctctgcagctcgttaaggcctgctttcacgctctcttctgacgtcaagtcgaagtcgatgacattcgctggagagggagggtgaggggggcccgcacggtccagaccgactagcgtatattgtcggcccaagcgtccgataatcccgcggccgatgaatccactggcgccggtgatgagaacgactgagccgctttccttaattccgcccgatgccatgttgcgtcatctccaatagcaaaacctcgtcttgcgcctgctcagcgcacaggaatgctgccagccaactcttccaatcttgcgctgttcctttgacgcttcgtggccagtgtgtggctaagcgatcacatccagccagaatctcctcgcgaagccgccgctctcgggattcttgctgcatgttattgagaccaaggctccccatccgagtactctcaccatcgcgcgcctaccgaacgaacagttcagcccgcatcccttaaggagattggaccttgaacgagctcagccgtcgccatctactccggctcgcctcactgtccggcgctgccggcttagcttcgtcagccctgccgagttgggcgcaaagcggccccttccatcctgcaagccggctctcagaggtttccggaagcagcatcgatctgaccctcgacagggcggcctggccgatcaacggcaaagcaggttccgcgatcacaataaatggaactgtgccaggtccgattttgcgcttgaaagagggacaacgagtccgcatcgctgtcacaaaccgcatggacgaagccgcttccatccattggcatggcatgctggttccattccgcatggatggcgtgcccggcgtgacctttccgggaatcccggcccgcagcaccttcgtctatgagtttcccgtcgtccaaagcggaacttattggtaccatagccactccggctttcaggagcaggtcgggctctacggcccgatcgtcatcgatccaaagggcgttgatcccgtccaatacgatcgagagtatgtggtgatgctctcggacttcagcttcctatctccagagatgatcatccagcggttgaagcaggagggcggtgtattcaactatcagcggcaaactgtcgccagtttgctcgcgggccgggaccagacgttggccgagagacttcagtgggccaagatgctgatggaccccaccgatatttccgatgtcacaggtgcgatatacacgttcctgatcaacgggtatggaccggaagataactggacgggtttgttcaggcgaggtgagcgcatccgcttaaggttcatcaatgccggcgcgcagatggtgttcaacgtgcggatacccggcctgcatatgacagttgtcgccgccgatggacagatggtgcggccggttcgcgtagatgaattccagatcggcaacgccgaaacctacgacgtcaccgtccagccgatggacgataaagcttacacgatcgtctctgaggcagtcgaccgctccggaatggggcgcgccacgctggcccccaggctggggatgacggcgccggtcccgccgcttcgtgagcgaccgctggcgacaatgaaggacatgggaatggacatgtcttccatggatatgggggacatggacaaatcaacaggatcgaacagtagcgggatgtccgggatgtcgggcatgtccaagggcgtccaaacgggcgctcaagccaaacagggaatgcagcaatcaggcggcatgcagggcatgtcggggatgtccggtaagtcgggcatggcgcgaatgtcatcatccactccgcctggaatggctccgcaaaagccgcgcggttcagacctgatgagcggccccgaaatggatatgcgcgatcccaaaaatgcaccaggcgtcaagatggggcctggcgtccagacgattgcgcccatgccgcaagatcgaacgggggatcccggcatggggcttgaaagcgtagggcatcgggtcctgacgtatcgggatttgattgcccttgagcgcaatcccgaccctcgcaccccgacccgggcgctcgacatccacctcaccggcaacatgcaaaagttcatgtggggctttgatggggaaaagttcagcgaaaccaccaaaccctacacgttccgaaaacgcgagcgtgttcgtgtgacgttgatcaacgattcgatgatgctccatcccatccacctgcacggtcatttcttcgaagtggtgaatggcgctcccgaaaaccacaggccacgcaagcatacggtcaacgtgttgccaggtggaaaagtaagcttcgacatcactgccgaaccgggtgactgggcctttcactgccacatgctctaccacatgcatgcgggcatgtttcaggtgttcagtgtgcggccactcacaggcgataacgcatgaacaggtccgtgctgatcttggcggcggccgggctgggaacgtgcagcgttccagccggagcccaaatgagtggcaatatgccgggtatgagcatgcccgctaacaagccggctgccgctgttgcgccaaaaaaaaagagcgccgcaaaaggagcggcatctgcaaagacgtcgccgaactcgcaaggcgctcaggatggatcaatgtcaggcatgcaaatgcccgggatgaagaccaagggaaaaaatgccgcgcccgccgcggcgtccattcctcactcgccgcctcctccgccgccgccagaccatgctgcggattattattacgatcccgcgcagatggctgaggcgcggcgcgaactccgtcaagagcagggcggcggagtatactcgaaggtgtttttcaacatcgctgaatttcaattgggccagcccggcggttaccgctgggatggacaggcttggctgggcggcgatatcaaccgattcgttgtcaaaagccaaggcgatggcagccgtcgcgaaggtctcgacagcgccgaagtccagttgctctattcgcgagccgtggcaccttacacagacgtgcaggcaggtattcgctacgatttcaaacccgatccctcgcgggcctatctgacgttaggcgtgcagcagctctttccgtattggttcgagttcgagggagctctctttgtttcgaacaaaggagagctgctcgcccggctcgaaggatcttatgatttgctgttgacgcaacagttggttctgcaaccgcgcgccgaattgaattttgcggctcagaactcgcaggatattggcgtcggagcaggcctttccaacgccgaactaggcctaaggctgcgatatgaattccgccgggaatttgccccttatatcggcgtctcctacgatcagaagcttgggaatacagctgcgtacgcgaggagttcaggcaaagacagcggctcaacaaggtttgttgtggggctacgctcctggttttaatcgcagattgctgggtcttttagcctgttactgaggctggtcgcgccatgtatgccaaacaggcattggccatagcgcaaccgcgcgtcgttgcgggcgtcacgaagagctgtgccttggcatccacaccccgcacccgacctgaaatattcttcaacggtcgagttcggcgggttagatgtggttaacaatcgaagcgggcataagcaacagacacaagctgtatttagtgcaaagagacgagctgcggattacgagcttacaaatggagcgtcaaagaagtggattcgcgaaagcttaccggactgcaagcggttgatagaccgtgcgctggcggatcgaactgaggccgggaaaatggcgccggagccaggcacgagatattgctcaagcgagcgcggcgatgggaggcggcggccgaccaaagcttctactgcggccaacacccccagggtgaggcggcctttctagctctgtctgtccacgcaatttggcagcgagcagtgacggctttctcgagaaaatgctagtttcttcacaggctcggccgttcccagacgcccaccgagcttagaccgccggcctgcgggttcgcctcatgagccggcggtcgtctctctttgagccaaacaaagaggccggctacgacgaaaattatgggggagccgttcacctcgctttgcggctttttgcggtatcagccctggaggaaatgctccgctgtgtcccgcgctcaccgccgccatttgttatttcgtgcaagtcactggttctcttaagagccgaatgccaattaacgaaaaattaaccatgtagtcggcaatttctgcctagctccgcaggaggctgccgatggcaatcaacgatatttccaccctgtccgtgctgcgcacgaaaatgcaatggcaccaggagcgtcagcgcgttttggcacaaaacgtcgcaaattcagatacgcccaaattcaaacccctggatttggtcgaaccaaattcgatcgaaccggccggggcgtcggagttccggcagcttcacttgtcatgctccagaccgcgccgaaccatatggcgtcaatttcaagcggtgcagggccgagtcaaaacgcaaaaagtggctaccagacccgtcccgcaggcaatcaagtcagtctggaggaggaaatgatgaagtcggctcaaaatcaaatggattatgcggctgccacctcgttgtactcgaaaagcctgaacctgcttaagacagcaatcgggaagcgctaggccggcaaacgccaagaacctcgagaaagcgtgaggaccgggagacaaacctctaagctcaaaactgcttggcggccgcctgcatgagttggccagccgctcgtccctgatcccaagacaatgcagcgcgccatcttgatccggtgaggtggaactcgaccggtcacgactgcgaatttggagcgaaagtgcaatcgagcgtgggcatatctggcttgttcggcgcgggcacacggttctagagtcggaacgcattttcgctaccgcgagcattgaacgcctgcgacaacaatcaagcccgacgaccagagacagaactctatgacatttgtcgccaacgctcccaaatacctcattgtcgcactgctgggcgctggggtggcggtcactatgtggcagttgctcgcgccggccgaaaagcccaagagctacatcgtcgatgtgacggagccagaactctccttcgccgggcgcgaggggaaggcgctttttgatacgaattgtgcgccttgccacggcctgaaggcggcgggtacggaccacggtccgccattggtgcacgacatctacaatccaggccatcatgccgatgcggcctttgtgttcgcggcccagaacggcgtgcgccagcaccactggtcttatggcaacatgccgcctcaaccgcaggtgagcgcacagcagatcatgtcgatcgtacagtacgtcagagaactgcaggtcgccaacggcatccgctttcgatcgcaccggatgtagttgcggtagttttcatgttcgtttacccatctcgttcgttgagagttcgcaagaatgaagcccaaggagggaacttcgcccgcgtcttcgaaaccggctcagcgcaagcaggacgcgctgaaacgcctaacctgggagataatctcgattaatttctccattgagaaacttcatcgcattcgggcaagagccctcaacatcagcggcccgcagtggaagatcttgttggccatttccgaccatgaagatgcaaacgacggaatccccgtcaacgttgtcgccaagacgttgcatgtcgacgcttcattcgtgacaacgcaatcaaaaaagctggagaacatgggctttttaagccggaagccttgtcctgcagacgcccgcgttatgcggctcgctttatcaaaagcgtcagttcagcaacttgccagcgtggccgagcaagaaatcgcgctcagcgaatttattttccaggatttttgcgagaaggagctgagcgagttcagcatcaaactcgcttcgatcaagaagcgcctggacaaggctcggttgaagctggcgctggagttttgagccaatgcgttctcctatgacggctccgattccctcacgactggtgagcgttctcaggtggtgacgatccgcgtttttgggttgcacgaaccacgagcgcggaaaatggaagcactcggcatcagcgggcgacgcaaatcggacagcgcacctatcgtgctaggttgagcttcgtcgaacacagatctaagcacttccaacgctggaatctggtcaacaaatcgcttttgcattctatttgggttagtcaacaatgaacccgtaggagcccccgtatttgcgcgccggctcggtccgacggggcacgccatagatgcggttgatgttgccgagcaattctgcctgcgcatccgaaggcgccgcaaagccgtcatccgggcgcgacagatccttttgcgcgactgcgcggacgatataaggcgccacaatcacgattagctcagtcgtgttgttgacgaagtcgcggctgcggaaaagtgagccgaggatcggaagctgcatcaggcctggcaggccgctggctgcttgcttggtctgctgctggatcaggccagccatcgctatcgcgccaccggacggaatttccagcgaagtctcgacgcggcgggtcttgatcgcgggcaccgtcaacgagttgaccgacgtcgagctcacggcctgtgacagcgtgatcgcgttttcgttcgacaggtccgacacttccgtcatcacacggaggctgattcgaccctcggtcatcacaaccggggtaaagttcagggagataccgaactttttgaaacttatctgggtggtgcaaacacgggtggtgggatcgcaggcatagcccgctggaaccgggaattcgccgccggcgatgaaggtcgccgactcgccggagatcgcggtcagattcggctccgccaaggtgcgcaaaacgccagcgctttccatcgctcgcaggactgtctgcaccgacggcgttgcgccgaacttcgtggtaaggttgttgccgtctaccaggttgcgtccgtaggcggtaaacgggttggagtgagcgaaattcaccaccgccgtgccgtaattgaggtttgcggagagatcgatgccgagctgcttgatgatgttgcgcgcgacttcggcgaccgtcaccttaagcatgacttggtcgcggccgcggacgacgaccgagttcacgaccttgtcggcaccaccggcaatgcgcgcggcgatgtcgttggcctgctgcgcctcgatcggactctgggcggtaccggtaaggaccacgccttcgccgaggccgtcgatctggatatcggaattgggcaggatctgcttcagtgcggcacgcgcgccgttgaggtcgcgcttgaccgcgatgtcataggacgcgatctgctggccggcggaatcgaagaacacgatgttggtctggccgaccgcagcgccgatgatgtaggcgcgctgcgacgagcgcacgaccgcattggcgatcttgggatcggccaccagcacgtccttgatgtcccgcggcaggtcgatcacgatcgacttgccgatgccgagcgacaggaaacgcgcgttcatctggccgtcggcggcggaaacctgcgccgccgggcgataatcgtcggcgatcaccggcgtcagcaccgggttgagagtcaacgcggccgctgcggaaatcgacagggcgcggataatcatggtccgcaagctcgccgtggtgacccggcatttcatatcgaaagtcctcatcgtcacttctgtgccgtcatctggctcggcacgccgaaccggatgatcgagatgctctcgccgcgcttgcgtgtcggctcatccgacgcgggttccttggcattggcctcggagatgctgcgcagcgccaaccacagcgtgccactctggcgcgcacgggcgagcgtctcggtctgttccggcgtgacctcgagcaggacggttcgggccggcgacggcgcggacgtcaggcggcagcatcgcagccctgacgccgcagaagtcggccttaacctacttctggtcgcggatgtctcaccccgcattaaggaagcacgtgcgatcgcgccgagcctgggtgtttccgatggacgatcggtgcggcgaatgaaggtggcgctggcggtcacggccgggcaggtctgccacgggacctcttccggcttgacgggctggccgggggccgatggcgttcttggcgacgaggacgtcaatgatgggaagctgtacgaccgggcggcgggaggcggggctgacttgtcggagcagccggcgaggcgcgcggcttcgccggcaccagtggcggccaccaggattacggtgcgtgccttacccatttcgctttacaatcatgcggcgtccagctcccagttgagcagtcatttgtcaaagtatggttaatgaagcgtatacgagacacgttggcgcagctttacccactaaacaaaccagctgatccatagctcacaaatgcatgttggcgacgcactcaacgtcgaaagctttaatcaagcgcgcgcagattttcccgagcgcgagggaagttgtaccgtcaacgcctctgatgtcgccgcaaccacggccatgcgcatcaatcgggcacggcgcttggccaggctatcgttagcgcccctggatgcctgaaattgcaggatcaaccgggcaatctttgccgatccggcaaattacccctgtcaaatcaccgcaatcgcgtcatcttagcattgattttgcaactgattccgcaatggcatcgcgcttgccttctctcggctgatcatgggcggaagagagatcgaccggccgtgatgcacggagacaggctcaatgaatatttacggtagtgagcggcggctaacatgggtttgaattcagccttggccagtgcgatgagtggcctgcgtgccaaccaggccgcactctcgatcgtctcgtcgaacgtcgccaactcgcagacgccaggttacgtcgcccagacgccgaaccagatcgaggtcacgaccggcgacttcggatcctcggttatcaccaccggcgtcagccgcgagctcgatcgttatgtgcaggaccagctccgtacggagaccgggggcgctggctacgccgatcaaatggccaacatcctgaagcagttgcagagcgtctatggcaaccccggcggcagcggcacgctcgaaagcgggctcaacaagctgaccagcgcattgcaggcgctgtcgacgagtgcaggcgcgcagtcggcgcagaccgtagcgatctcagccgctcaggcattggcgcagcagctcaacgtgtccacgaagggaatccagtcgctgcgctccaacgtcgagcaggacctcggcatctcggcgcagcaggccaacgcggctatgacgcagatcgcagccattaacggaaagcttcagggcctggccctgaacgatccgtccgccgcaacgctgatggaccagcgcgaccaggcgatcaacacgctgtcgaaatacgtcgacgtgcgggtcgtaaccgacgcttcgaatcaggccaacatcttcacaaccacgggcattcagctcgtcggcgccgatctcgcatcgcagttcgccttctcttcgagaggcgcactcaatgcgatcgcgctttacgatcccaatccggccaagtccggcgtcggcgcgctgaacgtcaagctgcccaatggctcttcgatcgatgtggtcgccaacaatgtggtatcctcgggtcagatcgccgcagatatcaagctgcgcgaccagacgctggtgcaagcgcagacccaaatcgaccagctcgccgcagcaattgcgagcgcgttgtcagaccagaccgcggccggcaaggctgtaacgggaccgcctgccggcttcgacgtcaatctgtcaggcgccttgcccggcaacaccgtcaatctgacctatacggataaaacgagcaatacccagcgccagatcacgctcgtcaacgtgactgaccccgcggcattgccgctccaaaacgcggggaatgccaaccctctcaaggtcggggtcgacttcagcggaggcatgacctcgatcttggcaacgctcaactctgttttcggaggcacgcctttgacgttcgccacctccggcgcgacgttgcaaatccgcgacgacggcacgggctcggcggccgtcaacagtgcctcgctcaccaagaccatctcgtcgctggcgtcgggcaatccgcagctgccgctcttcaccgacggcggcgcgctctataccggcgcgatcaccgcggccggctcgcagatgacgggacttgccgggcgcatccaggtgaacgcggcggtactgagcgatccgaccaagatgtcgatctatagcacctcgccgcagacgccagccggcgacaccacgcgttcggactacctctattcccagctcaccaatgccgtattctcgtactcgccgcagaccgggctcggctcaacagggcaacccttcaccggttcagtttcgcgctatctgcagcaattcctgagcgtgcagagcaatgcatcgactcaggcgacgcagctgcagcaggggcagagcgtcgtggtttctacgttgcaagccaagttcaactcgacctccagcgtcaacctggacgcggagatgtcgaacctgatccagttgcagaacgcttacgccgccaatgcgcgcatcatgtctgttgtgcaaacaatgatggacactctaatcaaggctcaagcatagtggttcgctgccctcggatccgccaagcaatcgtcgtcttgcgcaagtcgaattgccgctatggcgttccaaaacagcccagcatagacgaggcaattcacaaatctcggaattttgtatattgttcggatggtatttgaatggttccatttgtcgcaatgccacgaccctttgaatgccgatacgtagcttgattattcgccgccattctaaagccgaggtatgcagatgaaacgactgactattttctcaatcgccgggtccgcttttctgttggcttcggcaggcgtcgcaaccgcgcagcatcatcatgatggcgcacccactttcactacagaacatagggaaatgctccaccagcattttagacatcagcactacagttcgttccgcgatcctcactttcatgcccatgtcggagatgtcgttccggacgcaatggagcttcatccccttcctgacacgcttgctacgcgcgtcccgcacggaagccactacggatacggtctcctcaacgagaggcccgtgattgttgatcattcgacgcgacgagtgatccatcattttgactgacaaaagagcccaggcggctgtccgacgggaaccacacgaattccggcttgcagtctaagttattaagttgcccgctaggttaagttgggtttgtttcactcaaactctagccccgccctttcggcaggcttgacttgcccatttgaatgagtaggcctgcgtacggtgaagtgccggcctgggatccgcgtgtgctttccccagatttccagaactgttgcggacggattgatcgccgcaacgcttatgtactttccactcccgcgatgtttcgtccgtcagccgtagctggaacaaatccggctccgcgaggtcgttagacgcgcgtcagtttggatctttgtcgatcgggatgaggaaggcaaacgcatacttcgtatcctcgccacgagcccggtccaagctacgttccaactccagcctcgttgcctcctccgggttcgcaggtctgatttgacgttggtcgcgtgttctcagaagtgagcatccgactgagcgcattcgtcctagctcttcgacgaaccaatcctcagaaatgcgtctcatggcgctcgacaaggacggcgcagtgaaaaccaacaccggcctctgatttatttccagggtgaagcagggcgtttgccgctctttcgcggcgcggttccgtttttcagcagtgagccgatcccggcccggctcgcgcttcatttcggctcaccataaggaaggacgactcaatcactcgttctgaaacaagcttatagctttatagcgaactgagcgcgacttctttggtgcatcgtaacaaatgcggtggtttttgggtgtgataggcatatcccgccgtggcggtgaatagcgtgaattgaccaactgccagctcacacctttccgacttagtatcgcgctgaaatcacaagataggctgcgcgtcctggagcttggaagacgaacggtgcggcgctctgatacagcgcatcgtagtagcgcttgtcgaagatgttgttgacgtgaaccttcagcttccagttctggttgatcttcgcctcggcaaaggcgtcgaagcgccagtagctcgggatcgatgtgccttggttggcggcgaggaacgtgccgccatataccttcgaacgatagacggcctggccgccaagctcccagacatcagtcacctggtatttgctgagcaggctcaacgactggtgcgccacgttcgcaagcggccggccgacattggttgcatagagcgtggtattggcgggcgggatgttggacttcgtgacctcggactgcatcagcacgagtcccgccatgacgctccatttgtcggtgatgttgccgccaaggccgagatcgatgccgcggatgcgataggccgcgcccgcgctgaggcaggagacggtaccggtggtgccggctgggtagggacacgccgcggtcgcagttgcggccgtgatgttgcgtgactcgcgtgcgttttccttttcggtctggaacagtgcggcggtcagcagcgcgtgccggtcgaacaattcccacttggtgccgatttcgatcgccctgttcttctccggaccgaagatctgaggcggattgccgttcagcaccggtgcaaggccgccatactggatgctggtgccgtcgaactccgcgccgaccgggttcgacgatgtggcgtaggcggcgtagacgcttccgttcggcaagggctttagcgtcaggccgaggttgaagttcggcatccccgtatgctgctcttgctgaccgaagacgttggcgacgccgttgacggtgccgtagccgttcaccttgatgttgtagtcgtcatagcggacgccgccattgaggatcagtaggtcgttgtagttggcggaatcgatgacgtagatgctcttggtgtcgatcgcgatcttggtcggcaatcccgagaggccaaacggcacaccgaaggggaggttggtgaactgcggatagaacacgctcacgcccgccagcgaaccgttcccgctaaagccgccgggcagcgcttccgagctgaggccgagatagcggtcgatcgacgacctctcccggtcgtattcgaagccgcccagcgcggtatgcttgaagccggcattgtccgtaaatttgtaggtcgcctcggtctggttggcaatcacgtcggtggcctggtagcggctctgcgggttggcgctgagcgtcgaggccgagagcggagtggcaatgaccggcgcttccggcagcgtcccgatgtagttctgcgtcga

SEQ ID NO: 180 - DNA, 3135 bp, Bradyrhizobium colbertium
aggaccgttatagttacggccgccgtttaccggggcttcgattcaaggcttgcacctctcctcttaaccttccggcaccgggcaggcgtcagaccctatacgtcatcttgcgatttcgcagagccctgtgtttttgttaaacagttgccaccccctggtctgtgcccccactgcccgcttgcgcgagcaatgggcctccttatcccgaagttacggaggtaaattgccgagttccttcaacatagttctctcaagcgccttggtatactctaccagtccacctgtgtcggtttcgggtacggtctgatgtggaggctatttcctggaaccccttcgaggcccaaccaatccagtaaggtcggacaacacacgggattcgtcaccatccactggctgcagaatattcactgcattcccatcgactacgcctttcggcctcgccttagggaccggctaaccctgcgaagattaactttacgcaggaacccttggactttcggcgacactgtctttcacagtgtttgtcgttactcatgccagcattcgcacttctgatacctccaggcgctctcacgagtcgcccttcgcaggcttacagaacgctccgctaccgcgtagcccttgcggactacaccctaagcttcggctcgtggcttgagccccgttacatcttcggcgcagaaacccttatttagaccagtgagctgttacgctttctttaaaggatggctgcttctaagccaacctcctggttgttttgggatttccacatcctttcccacttagccacgaattaggggccttagctgtaggtccgggttgtttccctctccacgacggacgttagcacccgccgtgtgactcccgcatattgctttcgggtattcggagtttggttgggtttggtaagacggtaagtccccctagcccatccagtgctctaccccccgaagcattcgtgcgaggcgatacctaaatatctttcgcggagaaccagctatttcccagtttgattggcctttcacccctaaccacaagtcatcggagcctttttcaacaggcacccgttcggtcctccagtgagtgttacctcaccttcaacctgctcatggctagatcactaggtttcgggtctaatacaacgaacttgacgccctattcagaatcgctttcgctacgccttcgcctatcggcttaagcttgctcgttaaattaagtcgctggcccataatacaaaaggtacgatgtcacccagaacgaatcttgagctccatctgtttgtaggtgtccggtttcaggtctatttcactcccctcgtcggggtgcttttcacctttccctcacggtactggttcactatcggtcgctgaggagtacttaggcttggagggtggtccccccgtgttcagacaggattgcacgtgtcccgccttactcgtggatacatcatcgcattactcgtacggggctatcaccctctgaggcccagctttcctgactggttcctattgtctttgatgtatcactggcctggtccgcgttcgctcgccactactaacggagtctctgttgatgtcctttcctccaggtacttagatgtttcagttccctgggttcgcttgaaacctcctatgtattcagaagtctcataccttctcttgataaccggaaatccaaaaccttgcggtcatggtcccgatcatttctggtcgaaccccaaaacccaaggtcttggagttccggctatcgaaggtgggtttccccattcggaaatccgcggatcaaagcttcttcgcagctccccacggcttatcgcagcgtagcacgtccttcatcgcctctcagcgccaaggcatccaccgaacacccttaaggcacttgattgctctcattatcaatgtccacacactcggcagaatgttgtctgcagaattgccttgcggcacgcgccctcgatgaacgctatctgcagccggacattgactagaaagaccagcttgcttcgtaagatcgttccgatagcgaggcggtcaagcttcgctaaaaggatcattttacaactcgcattcaaccttacggttgaaggcgagcgccgaaaatgatccggagataatgaaggatccgcgcaacaacctgctgcacgacccaactcggatcgatctcctctttacgatgtcagaaaacacgcatcttgctgtctatccagactagcaggatgcgaagtgatgtttcgcggacgacgataccagatctcggtgatcaaaccatctggtggagccagacgggatcgaaccgacgacctcatgcttgcaaagcacgcgctctcccagctgagctatggccccgtaaccagaagacgaatgctcactcgatgaaagtggtgggcctgggaagacttgaacttccgacctcacgcttatcaagcgcgcgctctaaccaactgagctacaagcccctaacgctatcctcatcaggactagggtcttgcttgcgcacaccggcgaccagcgccgaatgcaatcgcacagcgcagccccggcgcgtgttcgtccgcgaagaaagagaaacgaagacggcgaaatcccgccaatgcagctcaacgatctggcgatctgttggccactgatgtttctaaaacggttcgatagaagcaagcttctgaagaaccatccttagaaaggaggtgatccagccgcaggttcccctacggctaccttgttacgacttcaccccagtcgctgaccctaccgtggccggctgcctcccttgcgggttagcgcaccgtcttcaggtaaaaccaactcccatggtgtgacgggcggtgtgtacaaggcccgggaacgtattcaccgtggcgtgctgatccacgattactagcgattccaacttcatgggctcgagttgcagagcccaatccgaactgagacggctttttgagatttgcgaagggtcgccccttagcatcccattgtcaccgccattgtagcacgtgtgtagcccagcccgtaagggccatgaggacttgacgtcatccccaccttcctcgcggcttatcaccggcagtctccttagagtgctcaactaaatggtagcaactaaggacgggggttgcgctcgttgcgggacttaacccaa

SEQ ID NO: 181 - DNA, 75685 bp, Bradyrhizobium colbertium
ggcacaatggcagaaccaggtggacacgcttccgaacgaaggcttccgcccggtggacctgtgtggctacaccgaagccggccaagtgcgcttcgcctccatatgggagcggacaacgacgccggaatgggtggcacgccacggcatgacggccggagaataccagcagcagttcaatcattgggccacccacggcttcatcctgcaccgggtgagcggctacctggacggcgggcaaacccgctacgcggcactctggagccgcggaccggacctgacctggcaggcccggcacgggatcgacgccgcgcaacatcagacggaattcaacgccctggtgaatcgcggctatcggctggtcaagggaaacgggtatcccgagggcggcacggttcactacgcctcgatctggcacaagcccttcctgtcggatcgtgatgagacgacgatccgccaggcggtgcagaacttcatgaccgctcacaacgtgcccggtgtctcgatcgcgatgacccgcaacggcgcgctgatgttcgcacgcgcctttggcaactcggatagcgccggaacgccggtcctgccaagccacctctttcgtatcgctagcgtgtcaaaaccgatcacctcgatggcggtcttccgggcgatcgaagccggattgctggcgctcaccgatcgggtcttcgggcagggcggcatcctcggcacgcagttcgggacactgccctatccggatcagcgggtcacgcaaatcacagtgcagcatctgcttgagcacaccagcggctggagcggcgcgcaggacccgatgttcggccagcccagcgccacacacgcggatctgatcggccagatggttggcctcacgcttgcaaacaacccgggtgcgatctttgactatctgaacttcggctattgcgtgctcggccgcgtgctggagcaggtgtccggcttgagctacgccgacttcgtgcgacagcgggtgctcgcgccctgcggcgtgacggacatgcacatcgccggagacaccctggctcagcgccgttcgaacgaggtcacctacacccagcagggaacgtttaacccctacgccctgcccgtcgctcgcatggatgcccatggcggctggatcgccaacccgaccgacctcttgcgcatcgcgctccggttcgacggcttcccgtcgaggccggacctgctccagtctacgaccgtcgccaccatggcgaccgccaccactgcgccggctgcaggcggcggagccgccaactacgccaagggctgggccgtgaacagcgcgggcaactggtggcatctcggcgacttcgccggcaccatcagcgaactggtccggacctccgacggcttctgctgggcgatcctcgccaacacccgcaacgacgcccagctcaacgccatgcgagcggcgatcgacaatctcggatggacgatcaagaacggcatcaccgactggccggcgggcgacgcgatttgaggtggtgtcggatcattcactgtgttccacgacccggtgaggattctggcggacgctcatccagttgccaaagcgcgccagcctccaactcgttgctttcatcggcggctcgccggcgcgtcctggaaggggcagatgatgaagtgcgccgacatcatgagcaacaggccgaggatagccaagcacgatctcaaggtgaacgtcccggatggcactgacatcgacgcgacacttgatgacggtgctccgcaatgggaagaccgctgggaagaatagtgctggaaatcttaccggggccaggcgcaacaaggcgctgcgcgaggcttgcgaatgctgatcgaatagggacgcctaattggcgtcgccatgtgcccttcagaccattgaattgaatgaaatggagtggtgggaccccgcgccgatcatggttgagagcccacgccgatgcacaacgagggccaacttggaagataggccggttgcttccggtctacctcgatgagccgacaattgtgggcgccgcccgaacttcgcaatcgggccagcagcggaagtcaatgggactgaaaacgaaaacgaccaccaactgagacggcctcacttctttacggaccgtttcgagtaacaggccggccccggggcgttctgccgcttcgtttcctgcgtacttcgtctggtatctgctccaggctctttagcctgtccggcattcattcatgataagcgggggatctcggagaacgctgtcgcttcacgcgtggggcaggtcaaccctgcgctggtgaaccagaaggtgctggacgcgacagaacaccatggatgcggaacacctttgattggtagactaacggagcctgcccgtgcgccttttgttgagaattatgcttgcaatcgccatcgtgaaccttgcgccggccatcgccgcgacgccgaagggccccgtcgcttctcctgccttacagaaggaattcgatggcttcatggagaagtttcgcgcggcgctgagcgcaaacgactccgccgccgttgccggtatgacgcaattgcccttcatgaatgacaacgcaattcgcgacgccgcgcaattccgtaccaagatctatccgacttcgttcacggcgaagaatcgcgcgtgtatccagcgcggcaaggccttctacgatcgcgatcaacagaacaatgactattactcagtcttctgcggccagctcatcttcctcttcactaagacgccggcgggcttccttttcacggatatcggcgcgaatgactgattaggcacaatgctgtttactgctgcaaccgttaatccgacctgcgctgattgatcaaggctcgcggaatgcgatgtgggccgcttcgggtcatttgcacacgttcccagccggacaggccacgtctgctcgtcccttggaaacgggcagtcccgaatcatgagtgtacgccttggcccgcaattgcgaacgagggggcagaacccataaccccaagcgcgtagttgcttcgcaaagcttgtcactccgcgtctcgcccaaccaatgctgtggcatatgggtctcggatctgcacttcgttgtccgcgacgacggtggagatcgacgcgccatcacgcgccgatctcaggtgaccgcgccgcgcgccgcgatcggccaaagcgcttccacgcgggcattcggcgtatggaagccgcgcacgccgacataccagtcgtagagattgacggtcggttcgcaatggccggggatcagcgtcaccttgtcgcctagcgcgagccgcgacgaagcgctgtcgaaatcgagcaggccatgctcgtcggagggccgatgatagcgcaggtcgggccggccgagcacgaccggaaatccgctgtcgttcgacagcgccttgtggccggcatcgatgaccgcgcgttcgccggcgccggtgctcatcaccgtcgcgatcacgaacagcgcatgctcgaacagattggcgttgtgcgccccgtcggcgaggttcttggcgtagtcggcgtccatgaagatataggagcccgcctgcaattcgttccagatgccgctcgcgccttcgagctcgaatgtgccggttcccgcacctccaatcgtccggcactgaaagcccgcgtccttgaggacgcgcagtgtctccgcggtcgcgttcgcggcaccggcgatggccgcgcggcgctcctccggcgtgcgcaaatgctgggcagagccgtgataggcctgcaagccgccgaacgacaggaagcgtgatgccgccacctgccgcgccagggtggccgccgccggccccggcctgacgccgcagcgaccggcgccgacgtcgatttcgaccaggacttcgatttgcgatcctgcccgctccgcggcgtgcgacaattgctcgaccatgatcgcatcgtcgacgcaaacgctgatgcgcgcgtggcgcgccagcgcagcgagccgttccagcttccgcaggcctaccacctcgttgctgacaagcacgtcgctcaccccgcccgcaaccaggacctcggcctcggcgaccttctggcagcacatgccgaccgcgccgcgcgcgatctgcttggccgcgatgatcggcgacttgtgggtcttcgcatgcggccgcaaccggacgccgagcttgccgaccgccgccgccatcgtctcgaggttgcgctcgaaggcgtcgaggtcgatgatcagcgccggtgtatcgatctcggagagcggcgcgccgatttgggcgggtggaagggacatcgaaaaccggttgattgtgttagggttcgcgcctcgaacgcgctgcggcatttctagggcaacatcggccgcagcaccatttcaggcggcttcgatgctctcggcaggtgcggggaggcgccgtcctcgtgatttcggaatattggcagtctacccctgttttgcccgacgagtcaaaacgggccattgctcggcgcaggccattgatgccacccgccaaggctactgtgcatggggttgttttcgcgttttgttgtgcgggggcggcgcgcgagcccgaaaggtcggtcacccctgccgaaagcccatccggaaggcgccccagtgcctgccgcggatcatgatcggcgaggacaggtccttcatcagcacgaactgcccgccgcccatgtcgcggcggtaggtctgcagcaggaagggcttcgtgctgcctgcgaccttcttcaccgtgcggtcggtgaacaggcggcggttgcggcaattggcgttgttccagaccgggtccttgccctgcggcaggcggtagttcggattgtgggtcggcagatagccgctcctcgcccacgcgacgcagtagacgatgcgcggatccgatttctggatcggatcctggatcgcgggcagcacgcggtcggtgaactcgacatagctggtcaggtactgcttcggatcggtgccgggaatctcgcggtaggtctcgtccatgagctggtcgagagtgatctcgccgcgatcgatcgcggcctcgaactccgtcgagatccgtttcgcggtctcgacgacggtgcggatcagcggtgtgtcggatgtctccacgccgctgtcggcgatcagcgcgatcaggccctcggacgtgtcgagcagcttcgccacccgctcatcggcgtgcttgaggtcgcgcgaagacaggtcgacgcccttggcgagctcgttgagctcgctgatgacggtgtcgcaatgcccgaggttggaggttgccgcgcgcgcgacgctgtcgatctccgcttccacggaggcaaagccctgctggacgcgcgagatgatgccggagatcgcttgcgcgccttcgccggcggtcttggcgcgctgcgaggcgtcgctgctctcgccgatcaggccttcgatctggccgtcgagatcgcgcacggtgtcggagatctggtgcgtggcctggcgcgtggcttcggccaggttcttcacttcgctcgcgaccaccgcgaagccgcggccggcattgccggcgcgcgcggcttcgatggtggcgttcagcgccagcaggttggtctgcttggcgatcgcctcgatcgagccggacaccttcgccacctgtgccagcgccgagccgacggcgctcaggcgcgcctcgatccgctccacggctgcgacgagctccgagatgtggctgaccgcgttatcgacggcgctgcgcgactgggcgatctcgccgaccgcggcggacgtggtcgtctgcaccgcctgcgaggcattggcgatgtcatggttggccgacaccatcgtctcggccgtcttctgcagatgatggaaccgttccgactggttcgcgacgcggtttgcgacttcctggacgttaccggcgatgtcggcgagctccacgccgagaccgccgatgcggtcggcgagctggtcgatcagtcgctcggcgagcgtccggttcgatccggtgtccattactgcaagctgtgcctgggacatgtacgggctctctccagtcagggccgttgatcggctctcggcggcattcccattccagctcggcttagagggtgattcgcagccggtgtcttgcctgagcgtgcactacagtttgtaggcggtgcgaaatccgccccagtgccggccctggacgcggatcgggacgtcgatctcgcgcatcatcaccgtgttcccgttgcccatgtcgcgcgcatagctctggaccaggtacgagcgcaggttgcgggcggcagccagccccgccggatcgttgaacatgcgccggttgcggctgttcgccgtgttccaggcgacgtcgcccggccgctgcgggtgcgaatagatcctgttgtgcacgggcaggaagccgttgcggtcgaccatggcgcagaacgccatgcgcgggtccttggcgaggaacgtctcctggaagggcggcagcgcacggtcggcccagtccagatatttcgtgcgatattgctgcggattggtgcctgcaatttccacgtagtcgacgtcgaagagatcctccatcttgacctcgccgcgtgcaaccgcctgctcgaatatcttcgtcagcgcattgccggcctccatggcgcgggtgacgaactccgtgttctcctcatggatcgaccagagcttgtcctcgatcttctcgctgagcgcggcattggcattgacgaattgcgcgcgggcgccggccttcgattgctcgaccacccgcaggcggcaggtgccgatgtcttcgaggctgccttcgatcgtcgcttgcggggcgagccggccggcatcggcgccgccgatcagcacgccgtccatcgcgatctcatagaccggcatcacgccgcgcgtggtctcgaatttgaggtggcatggcagccgttcggtcttgcgccggtcggcatgctcgctctggcgcagcagcacggcgcagcgcgatttcagcttttgtgcaaacgtggtgaccgctttgccggcactggcgacgttctcgccgtgggtttcggccgccttggttgccgcgtcgatctccgccgcgctctcgccgaccgagatgatgaattccgaagcgctggcggcattgccggagacttcgctggtggtggcgttctgctcggcgaccgcgccgttgacggtgtcgaacaccggacggatcgcttcgattgcctgcgagatgcgatgcaccgcgtccgccgatccggccgcatcgcgttgcagcgcatcgatcttcttggtgatctcttccgtcgcgctctgggtctgcaccgcgagtgccttgacctcggtggcgacgaccgcaaaaccctttcccgcggcgccggcgcgcgcggcctcgatggtcgagttgagcgcgagcagcgtcgtttgccgcgcgatctgcgcgatgaggttcacgacgttgccgatggcagcggacgactcgcgcaagcggtcgacattggcgcgcgcttcctgcgccgcggtgctggcctcgtcggcgagcttgccggcttgccggacctgcgcgccgatgccttgcgcggactgggtgaatttgtcggcggcatcggcgaaggtggatgcggtcgattgcgccgcgttggtccggccggtcagagcgtcggtgcggtcgcgaatggcggccagcgtcgccgcggtcgcctcggctccgccggccaccgaattggcggcgcgctccagctggcggatcatgccgccgagctcgagctcaagcagttccaggatctcccgggccgaatcgccttcggtgggggcgggttcggaatggggcgccgaaagcgcagcctcaggggctgccaagggcgcgggcatttccggcagacgcttccgaaacagtccgaacgccatcaggtctctcttgtcgggggacaggccgaggttattttcgcaggctggaatgaagtcacggttaacgatgcctcacttctaggcatgaaaccgtatgctattaccctaaagtatcagaggctctttcattccggtggggtgggggcctataaggccgcgtttcccaccccattggcgtacgattcccagaacatcccaagagaccacgcatggccggacattcccaattcaagaacatcatgcaccgcaaggggcggcaggatgcccagaagtcgaagatcttcggcaagctggcgcgggaaatcaccgtcgcggccaagctggggacgcccgaccccgccatgaacccgcgcctgcgcgccgccgtgatcgcagcgcggcaggagaacatgccgaaggacaacatcgagcgcgccatcaagaaggcgatcggcagcgacggcgagaactatgacgaaatccgttacgagggctacggccccggcggcgtcgccgtcatcgtcgaggcactgaccgacaaccgcaaccgcgcggcgtcggatatccgctccttcttcaccaaatcgggcggcaatctcggcgaaaccggctcggtgtcgttcatgttcgaccgcaccggcatcatcgaatacgaccgcagcgtcgcctccgacgacgcgatgctggatgccgcgatcgaggcaggcgccgacgacgtggtctcgggcgagagcggtcacgagatctacgcctcgaccgaaggctatcgcgacgtcgccaaggcgctggaagccaagttcggcgagccgcgcaaggccgcgctgatctggaaaccgcagaacaccgtcgcagtcgacgatgagaccggcgagaagctgctcaagctgatggacctgctcaacgagcacgacgacgtccagaacgtctacgccaatttcgaggtgtcggacgcgctgatggcgaaaatgggcggctaggcagctgctggtctggtccacggctgtcatcgcccgcgaaagcgggcgatccagtattccaggcacgccggagcgatacagttacacgcggcgtgatggataccccctttgcggcgtgtgacggcagaacgcgtggtggacagcctcgctcctcaaagcaccccacttcccctgttacttccgttctgtttctgtttccctcagtccggccagccgctatcactggcccatgaccgcgctcccgattcgtggccctgttcgcatcatcggcatcgaccccggcttgcgccgcaccggctggggcgtgatcgaggccgagggcaaccgcctgatctacgtcgcctgcggctcggtggagccgccggatgatctgccgctggcgagccggctgcttgccatccatgaaggactcgcggccgtcctgtccagccacgagccgatggaagcggcggtcgagcagaccttcgtcaacaaggacggcgttgcaacgctgaagctcggccaggcccgcggcgtcgccatgctggcgcctgcaatgttcggcatctcggtcgccgaatatgcgccgaaccaggtcaagaagacggttgtcggcgccggtcacgccgacaagcaacagatcgcgatgatgctgaagatattgctgcccaaagccgagccgccgtcagcagacgccgccgacgcgctcgccatcgccatcacccatgcccatcaccgccagagcaccgcgctccggctgaaggtggcggggatatgatccgtcgtcgcttgtcaccgccgtcatgcccgggcttgttcccggtatccaccttctttgttgcagggggcaaagacgtggatgaccggggcaagccccgccatgacgaaagacaggcgtgtattgcgaccggggacctgagatgatcggcaagctcaagggcctgatcgattcctacggcgaggatttcgtcatcctcgacgtcggcggcgttggctatcaggtgcattgctcgtcgcggacgctgcagcatctgccgtcgccgggtgaggccgccgtgctgtcgatcgagacctatgtccgcgaggaccagatcaagctgttcggcttccgcaccgaccatgagcgcgaatggtttcgcctgctccagaccgtgcagggcgtcggcgccaaggttgcgctcgccgtgctcggcacgctggcaccggccgacctcgccaatgccatcgcgttgcgcgacaaggccgctgtggcgcgcacgcccggcgtcggccccaaggtcgccgagcgcatcgtcaccgagttgaaggacaaggcgccggccttcgccaatgtcgatcccgccgtggtgcatctcgccggtgccgtcgacgaccagcgcgcgccgcgcccggtggcggatgcaatttccgcgctggtcaatctcggctacggccagccgcaggcggctgctgcgattgcatcggcctcgcgtagcgccggtgagaatgccgagacggcgcagctcattcgcctcgggctgaaggaactcgcgaagtgagcgaccccaaagccagccgcatggtttcgcccgagcgccgcagcgacgatgtcggcgataccgcgctgcgtccgcaatcgctgtcggactttgtcggccagcagcaggcgcgcaagaatctctcgatcttcatcgaggcggcgcgcaagcgcggcgaggcgctggatcacgtgctgttcgtcggcccgcccggcctcggcaagaccaccctggcgcagatcgtggccaaggaactcggcgtcggcttccgcgccacgtcggggccggtgattgccaaggccggcgatctcgccgcgctcctcaccaatctcgaagagcgcgacgtgcttttcatcgacgagattcatcgcctcagccccgcggtggaggaggtgctctatcccgcgatggaggatttccagctcgacctcatcatcggcgagggaccggcggcgcgctcggtgaagatcgagctgtcgaaattcacgcttgtcggcgccaccacgcgcgccggccttctcaccaaccccctgcgcgatcgcttcggcatcccggtccggctgaatttctacaccatcgaggaattggagagcatcgtcagccgcggcgcgcgcgtgctcaatgttggcatgagcgccgatggcgccaacgagatcgcgcgccgcgcccgtggcacgccgcgcatcgccggccgcctgctcaggcgtgtgcgcgatttcgcctcggcggccaatgccgacacgatcgatcgcacgatcgccgaccacgcgctgagcgcgctcgaggtcgacgcggcaggtctcgacgccatggaccgccgctatctcacgaccatcgcgctcaattatggcggcggcccggtcggcgtcgagaccatggcggcggcgttgtcggagccgcgcgatgccatcgaggatatcatcgagccctacctgatccagtgcggctatctgcagcgcaccccgcgcggccggctgctgacgtcgcacgccttccggcatctcggtctcgccgaacccaaccgcgaccccgcccagttcggcctgttcggcacggatcaggccgacgaagactgaccgccgcaaccggtgaacccaccggatcaatcccatcactaatccgaacgcgcggcaaaagacgccgccgttcatgcagatggattggagttcggagaatggggctgacggacgacacaggagtgctcgaactcatcgcggccgcgccgcagcttcgcacgcccgatgagaccgaggcgtttctggacccaatgccgatcagtgagctggcgtcgatgtggtgcgcgctccagcgcgtcagccggcgcgaccaggccggcagcatctgggccctgaagctctatttcgatcatctgccccaccgccggcctcaacaggcgctcgatctcgtgctggaagtgctcaagaccgaggctgacaagccgacagtgatgcagctcaacgacaagttcctgctgtcgctgctctatgcgcatggcgaagtcgtgatcgcgcgcatagagcacgaggctgcgcacaatgaccggctgcgctggctgctcggcggcgtgcatgttgcgcccgacgatcccttgatgtcgcgtattgcagaacttgccgacagcgaggcctggcaggccgactatgcggcccagcgcacgccgcgcgagccgctcgattgcgccagcatgccgaccgcagcgctcgcccgcgcttgggtcgagcagtattccaagtccgatcgtgatcaggacgacaatctgttcgcgatcatggatttcgagcgcgatctgcgcgaggacgatcccgaccggatgatcgacctgatcctcgagatactaaaaatcgaggcaaatccggtgttgctgtcgctgctggccgccggtcccctcgaagatgtgatcagtgccgggacgatcgaccgcatcgagcgcgaggcgcgtgtcaatgaacggtttcgcgatctgctcggcggcgtctggtactaccgcgcgcccgaggaattgaagacgcggctggatgcgctgatcggcgagagccgctggtgacgattgtgcaggcctctgcacgcagatgcagacggtctgcacgggcgcaccccaattccgcttcaatcggatcgcatcgagacgctgcatcagaaacgggcttccatgatcacgcgtcgtcacctcatccgttccatcgggggcttgtccgccctcggaatctcgaccgctgcctatggcgtcggcgtcgagccgatgctgcggctccgcgtcacccgctatcatccgacgccgcggcaatggccggcggatcttccgctcaagatcgccgtcatcgccgatctccatgcctgcgatccctggatgccgctggaccgggtcgaggccatcgtcgaccgcaccaacgccctcagggccgatctcatcgtgctgctcggcgactacgtcgccggcctgcatcaggtcacgcggctcattccatgcagcgaatgggcacgcgtgctggccggcctcaaggcgccgctgggcgttcatgccgtcatgggcaaccatgattattgggacgacagggccgtgcagcgggcggggcaggggacgaccatcgcgcatcgtgcgctggaggccgccggcatccccgtctacgagaacgacgtcgtgcgcctcacgaagaacggtcgcccgttctggctcgccggcctcggcgatcaactcgcgttcctcccggcgcgccggttccggaccatggcgcgcttcggtgccgacgatctcactgcgaccctcgccaaggtcacggacgatgcgccgatcatcctgctcgcgcatgagccccacatcgccccacgggtgccatcgcgcgtcgcgctgcaattgtccggccatacccatggcggccaagtccgcctgctcggctggtctcccgccgtgccgccgcagcatggcgtccgcctcgcctatggtcatgtcaggctgaaatgcgacgtcatcatctccggcggcctcggttgcagcatcttgccgctccgctttggcgtgccgccggagatcgtcgaggtgacgctgggtcgggcgggacacctcgtgtcctgacgacgcttgcgccgcggtctgtttttgcgcagaacggaccggtgacgacaagcgaagaggctcgtgacgtgactgcccatctcgatggcgagatccgcgacggccgccaccacatgcaggtccgcgtctactacgaggacacggatttttccggcatcgtctatcacgccaattacctgcgctacatggagcgcgggcggaccaatcatctcaggctgatgggcgccgagcagcaggcgctgttcgagcagaccgagacggaaggcgccggcttcgcctttgtcgtgcggtcgatgcatcttgatttcctcaagcccgcgcgaatggacgacgtcctcgacatcgtgacctggcccgtcgcggtgaagggcgcctccatcatgctggcccaggaggtacggcgcggcggcgacgtgctggtgaaggccgaagtgcgcgtcgccttcatcagtggcgggcgtgcccagccgattccgaagtccatccgcatgctgatgaaggccgatctgatttcgtgatcgcccgatttgtgatgccctatcgactccggcgagtgcagcgatagattgcggtcctaacccatcgatgaggcaccccatgtcccgcccgccgcttccgcccttcacgaaagagactgctgcgcaaaaggcccgcatggccgaggacgcctggaattcacgcgatcccgtccgcgtgtccctcgcctataccgaggacagccgctggcgcaatcgttcggaggtgtttcagggtcgcgaggccatcgtcgcgtttctcacccgcaaatgggaaaaggaacaggactatcgcctcatcaaagacctctgggccttcgacggaaaccgtatcgcggtgcgctttcagtacgaatggcatgatgccggcggccagtggtatcgttcctacggcaacgagcagtgggagttcgacgagcacggtctgatgaggcggcgcgaggcatcgatcaacgatatcgcgattgcggagaacgatcgccggtttcactggcccacgccggggccgcggccggcggatgtgccgggactgggggccgatccgttctgaaccctcaactctcatggtgaggtgccgcgaatcggcgtctcgaaccattcaggccccgcccctccaattggagcctctcatccttcgagacgcgcgcgcgagcgcgctcctcaggatgaggggatggatttgcgtgccagaaaccgcgtaatcgctccacccagcttcgcgctttccatcggctgctgcagcgactgccgcgccgtcgcaacgacgtcctccggcgccttgccgtcacgcatatcgcagcacacttgcgcgaattccacgtcgaattccggatgcggctgcacggtgagggtggtgccgttggcgtagagcaggccggcatgcggggtgaagtcggaccggaggatcgtgagcgcatcgttcggcggttcgatcacctgatcctgatgcgagcagggaattgcgaccgtctcgccgtcgaggactccgttttccggcagcacctgatagacgtgccggccgatgccccagcccttgtccgacttgcgcacggtgccgccgagcgcctgcgcgatcagctgatggccgaagcagacgccaaccatcggcgtcttgtcggcgtaagccctgcggacgaaatcttccagcggcgcgatccagtccagcccgtcatagacgccggcggccgcgccggtgatcaggatcgcctcaagctcgcggggatcgggaagcgcatccccattcgggatgctgacgacgtcgaccgtggctgtggggtcctccgcacggatcatgcgcgcgaacatgtccggaaatgagccgtggcgttcgcgatgctctcgaggaacgagccctgtctcgatgatcgtgatgcgtgccatgcgatacctggtgaaggccaagaggatacagcggaagccacagggcctccaagtcaaccatgcgcaaaatcccgtgcggggttgtcctcgaattccagcagcgccttgcgcatggtctcgaccaggtccagcgccacgggcgacggactgcgctgggccgggaacaccgccgagaattcgaaatcgatgcgcggcaggaaccgtcggaccacgacgccgcgcgtggcaaactcctgcgcggtgaagggatcgcagatcgaaacgccgagtcctgacgacaccatgccgcacatgatctccgacagcgtcgtctcgaccctgagcacgcggcggacgtcgttgcggtgaaagacctggtcgacgagatgccggctggacgagcccgccgacagcgagatgaaggtctcgccctcgaagtcgcgcggctccagcacgtccttctccgcgaggcgatgccccgccggcatcacggcaacacgcgccagcgccggcagccgcaggctcggcaggccggaatgggcgatcggcacctcggcaaaaccgatgtcgcattggttgttcaggacccagtcgaccacgatcggcgagatcacgccgaagaaagcaagattgaggttggggcgctccatcaagaaatgtccggcaagccgtggcagatagccgttcgccagcgcgggcaacgcagcgatgcgcaacgagccggtgcgacggccgcggatctcctcggccgccgcggagatgcgctcgagaccgacgaaagagcgctcgacctcggtgtagagcgccatcgccgctgcggtcgggaccagaccggtgccgcgccgctcgaacagctccatcttgagcagcgcctggaagtcgcgcagcagccggctgacggcgggctgcgtcaccaccatcagcttggccgcctccgtgacactgccggtcagcatcgtcgcgcggaaggcttccacctgccgcgaattgatccgcaccatctccgatccaatcataacatttcggcatgcagaaggtgccattattcattggacgatggaagtataggtctgcgatctttttcggcagagttggagacagcccgctttttcggcagattggaggcgttcaaacctccagatcgcgccaaacccgccgaccgggggccggagccctgatcagagagggggggcgcagaagggaaagcggaaggcgctccggccggagacttgtcggcacgtcacctcattccggtattggagattggtccaaatgaagacacttcgccttctgacagcggtcagcatcgctgcgctcgttgccgttccgtcggtcgcttcggcccagcagaaaacgctgtacgtcgcaggttacggcggctcgttcgagaagacgatccgcgacgaggtgatcccggccttcgagaaggagaacggagtcaaggtcgagtatgtcgccggcaactctaccgacacgctggcaaagcttcaggcgcagaagggcaatcagcagatcgacgtggccatcgtcgatgacggcccgatgtaccaggccattcagctcggcttctgcggcaagctcgacggcctgccggccgatctctacgacactgcgcggttcaaggacgaccgcgcggttgcgatcggcatcgtcgcgacaggtctgatgtacaacaccaaggtgttcaaggagaaaggctgggcgccgccgacctcgtggaacgacctgaaggacacgaaatcgccaagcagctcgtgatcccgccgatcaacaacacctacggtcttgaagcgctcgtgatgctgtcgaaaatgaacggcggcggcgagaccaatgtcgatcccggcttcaagatcttcaaggaacagatcaatccgaacgtgctcgcctatgagccgtcgccgggcaagatgaccgaactgttccagtcgggccaggccgtgatcgcggtgtggggcacgggccgcgtgcagagttttgccaacaccggtttccccgtggacttcgtttacccgaaggaaggcgcggcgacgctgctgacgacggcatgtccgatcaacaagccgaacgcctcgccggtcgcggcgagcttcgtcaagatgctgctcgatcccaagattcagctcgtgatgctgaaggactatggctacggtccggtgctgaaatcgttggtgatcccgccggagctcggcaagatggcgccgatcggcgagcgcgcgtccaagctctataatccggactggaccgtcatcaacgagaagcgcgaggagtggacgaagcgctggaatcgcgaggtcgaacgctgatcggtcgcagcggagacagcgtcatggcctatctcgagctcgatcgggtcgcaaagcagttcggcgcgcagactgtggtcgatgacttcagcctgtcggtggggaagggggagttcatctccttcctcggcccatccggctgcggcaagaccacgacgctgcagatgatcgcgggcttcctcgatcccacccgcggcgcgatccggctggagggaaaggatctcaccgcgatccctccggccaggcggggccttggcatcgtgttccagagctacgcgctgtttccgcacatgacggcggcggagaacgtcgcgttcggcctcgagatgcgcaaggtgccgcgcaacgaacgggccgagcgcgtccgtgccgcactcgcgatggtcggccttgccggctacgaagaccgccatccccgccgcatgtccggcggccagcagcaacgcgtggccctggcccgcgcgctggtgatcaagccgagcgtgctgctgctcgacgagccgctgtcgaacctcgatgcgaagctgcgcgaggagatgcagatcgagctgcgtcagatccagcgcaccgtcgggaccaccacgatcctcgttacccacgaccagaacgaggcgatgtcgctgtccgatcgcatcgtggtgatgagccagggaaagatcgagcagatcggcacgccgcaggagacctacgaaaagccggcttccgccttcgtctcgcaattcctcggcaagaccaacgacttcgccgcgacgatcgatcggacagcggcaccggcgcgtctcgtggtcggctcctgggccgtgccggcgccggccggcttcaacggtgccgtcaccgtcagcgttcgtcctgaaagaatcggctttggcgatgcgggcctcacggccaggatcgtcacccgcatcttccagggcaatcactggctctttcagtgcgacagcgagtgcggcccggcgatcgtgattcgccagaacgacggcaaagcgcagccggccgaaggggacgcggttcgcctcacctggcgacccgaggacatgagtgcgcgcgcgagggaaagcgcatgagcggggttgcggaggaacgcggcgcacgtgcgccgtgggcgctgacggcgcccgccttgatgctcttcgtcggcgtgctgctcattccgctcgcgatgaccgtgatgctgtcgttccacgattggggccaatacaagggcatcgagccggttttcatcctcaagaactggtacgagatcgcggccgatccgtactacgccgagatgttctggcggacgtttcgcatcgcgatcctgaccaccttgctcacggccttgctgggcgcgccggaagcctacatcctcaaccgcatgagcggccgctggaagagcttcttcctgctcgtcattcttggtccgctgctgatctccgtcgtcgcgcgcacgcttggctgggcgctgttattcggcggcaacaacgggctcgtcaacaagctgctgatgtcgctcggggtcatgcgttcccccattccattcatgttcacggaaacaggcatggtcgttgcgctcgcgcatgtgatgatgccgttcatggtgctttccgtatgggcggcgctgcagcggcttgatccgcagatcgagaacgccgcgatgtcgctaggcgccggccccgtcaccatcatccgtcgcatcatcatgccgcagatcatgccgggcgtgctgtcgggcgcgatcatcgtgttctcgttgtcggcaagcgccttcgcgacgcccgcgatcatcggaggccgccggctcaaggttgcggcgacgctcgcctacgatgaattcctcaacacgctgaactggccgctcggtgcggcggtcgcaacgttgctgctgttcgcgctggtcctgatcgttgtcggcagcaacgcgctgatcgagcggcgctatgcggaggtgttccgatgagacggaacggtccactcgcgctgatcttccatacgatcttcgtcatcatcatgttggcgccgatcctggtggtgtgcctcgtcgcgttcacgcccgagggatacttgtcgctgccgaccaacggcttctcgctgcgctggttcagggctatcgcgaactatcccgaattcattcatgccttctgggtcagtcttggccttggcgcgctgtcgtctctggtggcgctgctgtttgcggtgccagcggcgctcgcgatcgcgcgctatcgtttccgcggccgcgatgcgctggcggcgctgttcctgtcgcctctgatgatcccgcacgtcgtgctcggtatcgccttcctgcgcttctttacgtcggccgggctgggcggaagctttgccgcgctgatcatcgctcatgtgatcatcgtgtttccgttcgcgctgcggctgacgctcgccgcggcgaccggcatggaccgcaccgtcgagatggcggcggtctcgctgggcgccggcggctggacgctgttccgccgggtgaccttgccgctgatcctgcccggcgtcatcagcggctgggcgctcgccttcatccagtccttcgacgatctcaccatgaccgtctttctcgccgcgcccggtaccgaaacgctgccggttcgcatgttcctctacatccaggacaacatcgatccgctggtgacgtcggtctcggcctgcgtgatcgcgatcaccatgagcgccctcattctgctcgatcgcttctacgggctcgaccgcgtgctcgccggcaagggcgatacgggacgataggagaacctatgtcaggagaatacgacgtcgccgtggtcggcggcggcttgctcggctccgccatcgcctggggcctcggccggctcggcaagaaagtcgccgtgctcgacgagggcgacatcaccaagcgcgcctcgcgcgcgaccttcgcgctggtctgggtgcagagcaagggccttggtatgcccgcctataccgtctggaccgtgcgggcggcggaagcctggagccggctcgcctcggagctgaagcagcagaccggcctggacgtctgccttcaacagaatggcggcttccatctcacgctcggcgaggaggagttcggccagcgctccgagctggtcaggcgcatgcacaaccaggtcggcgccgccgattacaagatggagatgctctccgcctccgaggtgaagaagtcgctgccgctgattggccctgaggtctccggcggcagctattgtccgctcgacggccatgtcaattcgctgcgcacgtttcgcgcgttccacaccggattcaaggcgttcgggatcgactaccttccggaacggccggtttcggccatcagcaggagcggcggtgaatttcgcctgaccacgccgaaaggcgagctgcgcgccgccaggatcgtgctcgccgccggcaacgccaaccaggcgctggcgccaatggtcggcctctttgctccgatggggccgacccgcggccagatcgtcgtgaccgagcgcaccatgccctttctgccgcatccgctgaccacgatccgccagaccgacgagggcacggtgatgatcggcgacagcaaggaggacgaactcgacgaccgcgcgctgaagcattcgatcagcgccgtgatgacggaccgcgcgcagcgcatgttcccgcatctgtcgcggctcaacgtggtcaggagctgggccggcattcgcgtcatgccgcaggacggctttccgatctacgaccagtcggagacgcatcccggcgccttcgtcgcttgttgccattccggcgtgacgctcgcctcgaaccatgccttcgaggtcgcacgcatggtggcgcagggcgcgctcgagcccgaactggtcggcgcgttctcggccagccgtttcggcggcgcgggcgcggcgaacaacagcggctactagagattcttcagcaaggagccaagaggcatccccatgttcaggcgatccgaacacgaccagcgtccgccggtccagatcttcgtcgacggcgtcgctgtcgcggcgcgtcagggcgacacagtctccgcggcgctcttggcctccgacgttgacgcacggcgttccaccgcagtcagcggcgcgccgcgtctgccctattgcatgatgggcgtgtgcttcgactgcctcgtcacgatcgacggtgtcggcaatcgccagggctgcctcgtgcccgtcgccgacgggatgcaggtcgaaatccagaagggcaagcgggagatcggaaaatgactttggctcccaagcgcgaggattacgacgtcgtggtgatcggcgccgggcccgccggcctcgctgccgctgcaacggccgccgaagccggcttgtcgacgttgctgctcgacgagaacatgggccccggcggccaggtgttccgcgcgatctcatccacgccggtgaccgaccgcaaccagctcggcgccgattattgggtcggtgccgatctcgtgcaggtgctgcgcgcgagcagcgccgaggtgattcatcgtgccaccgtctggagcctcgaccgtaatctcgagatcgcagcctcgatcggcggtgcgtccgccttcgtcaaggccaaccgcgtgatcattgcgagcggcgcgctggagcggccgttcccgattgcggggtggacgctgcccggtgtgatgacggctggcgcagcgcagaccatgctgaagtcttcggcgctggtgccgaacggccgtaccgtgatcgcagggcaggggccgctgctctggctgctcgccgcgcagattctgcgcctcggcggccgtatcgaccgcattctcgataccaccgagcgcggcaattacttggccgcgctgccgcacgccttcgccttcctgacctcgccttatttcgccaagggtctcgccatgatgcgcgaggtgaaggcgaaggtgcaggtcgtctccggcgttactgagctctcggcctccggcgatggccagctcgccagcgtgagctatgtcgccggccgcaggcgcgagaccgttcccgccgatcttcttctgctgcaccagggcgtcgtgcccaacgtcaatctggcgatggcggccggggtcgagcatcgctgggacgatctgcaattgtgctggtcgccggtgctcgatgcgaacgggaattcgtcggtcgcgggcatcgcgatcgcgggcgacggagcaggcatcggcggcgcaaatgcagccgttgtgcgcggccgcatcgcggcgcgcgcggcagtggaggcgctggcccccgcttctgccgcgaagctcgtgccgatggcacagctgcgcaccgatctcgccaaggccgagcgcggccgcgtctttctcgacacgctgttccgccccgcgcggcagttccgcattccctcgggcgataccgttgtctgccgatgcgaagaggtgacggcaaaggacattctcgatgcggtcgcgatcggcgcgaccgggccgaaccagctcaaggcctaccgccgcaccggcatgggcccgtgccagggccggctctgcggcctcaccgtgaccgaactgatggcgcaggcgcggggcaagaccccgcaggagatcggctattaccggctgcgcgcgccggtgaagccgatcacgctggcagagctcgccgccgttccgaagaccgaggccgacgtcaaggcggtggtccgcggatgaccaaaaacgtggatgcgatcgtcgttggcggcggcatccacggatgctcgacggctctgcacctgtgccttgccgggatgaagccgatgctgatcgagaaggactatgcgggacgccacgcctcgggcgtgaacgccggcggcgtgcgccagctcgcgcggcacatccccgagattccgctctcgatccgctccatggggatctgggagaaggttgcggagctcgtcgacgacgattgcagtttcgaaagccacggccaggtgctggtcgccgagaacgaggaagagctcgcggtctgccgcgcccgcgtcgccgagctcaacggactcggctttactcacgaagagctgatcgacgcggctgaactccggcgcctcgtgcctgccgttgcggagacctgtcccggcggcgtcgtctcgcgccgcgacggcgcggccaatccggcgcagacgaccactgcattccgccgcaaggcggagcggcttggcgccaccgtgcgcgagggcgtggccgccaacaacatccggtaccgcgacggcctttggcatgttgaagtcggctccgacaccttcgccgcgcccgtgctggtgaatgccgccggcgcctgggccggcaagatcgccgctgatctcggcgagcccgttccggtcgaaaccgtcgcgccgatgctgatgatcacctcgcgtgtgccccacttcatcgatcccgtcgtgatcctgcgcggccgcaaattgtccttcaagcaattcgtcaacggcaccgtgctgatcggcggcggtcatctcgcgacgccatatcaggatcgcaacgagacggtgctggattggaaaagtcttgcgaccagcgcacagaccgtgttcgaactgtttccggtgatgcgcagtgccaccatcgtgcgcgcctgggccggcatcgaagccaagatgaaggacgacatccccgtgttcgggccgagcagccgtcaccagggtctctatcaccagttcggcttctcgctgcatggcttccagctcggccccggcgccggagccgtcatggcggagctgatcgtgaatggcggcacccagacccgcgtcagcgatctcggcattgaccgcttccatccctccacgctccagaacaagaggacatcatgagcattacccgcagcattcgcacacccatcatgcaccgcgccgtcgaggcgaatggcttcgtcttcctcggcggcaccatcgccgacgacacgtcggtgtccatgggagagcagacccgcaacatcctcggcaagatctccggttatcttcaggaagcgggaaccgacaagagccgcgtcgtcagtgcatcgatcttcgttacggatctctccaagaagaaggagatggacgcagcctggaccgagttcttcggcgacaatctgccgacccgcgccaccgtcggcgtcgccgatctcggcggcggtgcgctgatcgaggtggtggtgaccgcgctcaagggctgatcgctcgttgatcgaacggcagcgcctgcttcgcgctgtcgttccctcgaacaccggcttgatcttgcgctcctgcaagactaattaaaggctctcaatcaggaacttcgcagccatggacttgaccccgaccgcaacgctcatccgccttgctcacggggaattccatgcctgcttccatcatcctgtcgaacctctcgctgtccacgcctgacggccgttctcttctcgccggcatcgatctgacattcggggccgagcgcaccggtctcgtcggccgtaacggggtcgggaagacgacgctgcttgcggcaatctcaggagaccatcttccccagtccggacgcgttctgatcaacggcaccatcggcctgttgcgccaggacgtgcaattgcctgcaggagcgaccgtagccgatctgttcggcgtgcggtcggcagtggaattgctgcgtcgtgccgagcgcggcgacgcatcaatcgacgatatggccgcgatcgactggactctcgaagggcggctggagatcgccctggcgcgcctcggattcgatctgtcgcccgatacggagctctcgtgcctgtccggcggccagatcacgcgggtgcggctcgcggcgctgctctttgcccagcccgatttcctgttgctggacgagcccaccaacaatctcgatctggatggacgcaaggcggtgatcgatttccttgcgacttggcgcgggggtgcgatcgtcgtgagccacgaccgcaacctgcttgaagcgatgaatgcaatcgttgaactgacgtcgctcggagcaacacgatacggtggcaattggagccattaccaggtgcaaaaggccctcgaactcgccgccgtcaggcaggacctcgcgcacgccgagaagagcctgtccgagatcgacgagaaggcacaggaggctgcagagaggaaggcgcgcaaggacgtcggcggcaggaagaagcgcgccaagggcgacatgccgcggatcctggcgggggcccgcaaggaccgcagcgaggacagcggcggcaagaccgtgcaaatcggcgaacggcgacgagcccaggccctcgagtcagtcgatgctgcgcgccgacgcgtcgagattctgcagccgctctccatcaggctggccgcgaccggtctgccggcagccagggaagtggtttggctcgacagcgtcagcgccggttatcggacggagcagccggtgctgcgcggtctatcgttcaccatggtcgggcccgagcgcgtggcgctgaccgggcccaacggctccggcaagaccacgctgctgaaggtcattgcgggtgagttgccgccgattgcgggaacggttcgggtcaggcctgacttcgccttcttcgaccagaaggtcagcctgctcgatcccgctctctcgatcctggagaactttggccgcctcaatccagcggcaggtgacaatgcgtgccatgccgcgctggcgcgcttcatgtttcgtgcaaacgcagctctacagccggctggaagcttgagcggcgggcagatgttccgtgcaggccttgcctgcgtgttgggcggggcggcgccgccatcattgctgattctggacgagccgaccaatcatcttgacatcgagtcggtcgaagctgtcgaagcgggcttgagggcctatgacggcgcgctgctcgtggtcagccacgatgaggcattcctgcaggcgatcggaatcacgcggcggctagatcttatcgccagcatgccgcgcgccaatggcaggatcacgtgatcgatcgcgatccattgttgcagagattttcaaaagcccgacgccctgcccccagcgcgtcgggcggaaaaaacgagtatcaatccgtgatcccaacgccgctgttgtgacgcgtgtcgcgccggtttcctactccgggaaactaccgcatcggaaccgggccgtccgcaagatgctgctgaatgggacgcgccgatcagggcaggcgaggttgagcagcgaacctggtccgtaggccccgaccgtgaacgccatcgcaccgaagcgccgaccggcgcgaggcgaacgatgatgcgaatgatgccgaagaacatctttgcgccgtgtcgaagtaaatcagcggcttcagcccgggcgcggcagacacggttgagatttcccatcgaggagatgccgcaccagggtgcagaagatcaccgcgggatcatcatcttaatcagcgcgatgaagccgtcgccgatcggctttacggctaccgcgctcgggataggcatagccaatgaggaggtcgagcgtgaccgcgatcaggacctggatgcagaggatcttgtaccagggctgatgctggcggaggacggctggctggatcgcgacgcatgtcgtattgtcggctctgaaacgtatcgttgcttgatttgcatgatgtgatggtcgtcgcggaagcgacaatcacatttttgcctgttagcaccaagatcgaacactgggccgcaatcgggggaaacatgtcgaaagcaacaggctccgacgagcacgtgcaaggttattttccgcgttggaaactgaagacctcgggcgtgatcatgccggaggagcggttgtcctggggccagacgatcgtctccagcctccagcattgcgttgcgatgtcgggctcgacgatcatcgcgccgctgctgatggggttcgatcccaatattgcagtcctgttctccggcatcggcaccttgatcttcttcgtcatcgtcgccggacgcgtaccgagctatctcggctcgagcttcgcgttcatcgccgttgttatcgccgccaccggctatgccggacaagggccgaacccgaacctatcggttgcgctcggcggaatcgtgggcgctggggtgctgtacggcgtgatttcgctgatcgtcatgtggtccggcgtcggctggatcgaaaggctgctaccgccggccgtcaccggcgccgttgttgccgcgatcggcctcaacctcgcgcccgtggcggtcaaggcggtgagcgccggcgcattcgacacctggatcgggctcgccaccgtcctgatcatcggcgtggtcgccgttgccgcgcagggcctttggcgccgcctcccgatcattgtcggcgcaatcggcgggtatctcttgtattggctgttcacgaacggcctcggtctcggcaagccgatcgacttcgcacaagtctcggccgcgccatggttcggcctgccgaatttcaccacgccgacgttccaggctgatgcaatcttcctgatcgcgcctgttgcggtcattctcgtcgccgagaatctcgggcacatcaaggccgtcggcgctatgacaggccgcagtcttgacgcctatctcggccgcgccctgttcgcagatagcctcgcgaccatcgtagcggcctttggcggcggcaccggtgtcacgacctatgccgaaaacatcggagtcatggcagcgacgaaggtttattccaccttgttgttcgccttcgccgccgttgtgtcgatcctgctcggtttctccccgaagttcggcgcgctgatcctgtcgatcccgggtcccgtcatcggtggactctcgatcgtgctgttcgggttgatcgcagcgatggcaggacgaatctgggtcgagaacagggtcgactttgccgatcctgcaaatctgatcaccgtcgccgtggcgctgatcgcaggcgccggcgacctcacgctcagattcggcgcgttcacgatcggcgggattggtaccgcgaccttcggggccatcatcctctatcaggtcctgacttccccaatggcgcgccgcctgggatgacgcccggcgatgcgctgacgggatggaacaaaaagcccgcgccgctgatgaagaggtgtcctggagagaacacatgcagcagaccgaccgccgaacctcgttcccctcccgcctcgtcggtcaacacgccctggtgaccggcgcctcacaaggcatcggccgcgccgtcgcggtccggctcgcccaggaaggggcagccgttgccatcaactatttcggcagccccgagggggccgatgagacgctggcgcttgcgcgagcgggatccgccgctcgcggccatgaggggctcgatcacgtcatcgtcaaggccgacgtcggcagtgagcaggagatcgccgcaatgttcgagacgatcctggcgcgctggaagcgcctcgattgtctcgtcaacaatgccggcttccagcgggaatcgccgagcgaggcgctcgacgtcgaaacgtatcgccgcatcatcgacgtcaatctcaacggcgccgtgctgtgcgcgcagaaggcgctcgcccatttcgtcgcacgcggcggaggcggcagcatcatcaactgctccagcgtccacgagatcatcccaaagcccggctatctcgcatattcgatcagcaagggcggcatggccaatctgacgcgcacgttggcgctcgaatttgccggccgcggcatccgcgtcaacgcagtcggtccgggcgcaatcgacacgccaatcaatgcggcctggaccggcgatccccagaagcgcgaggtggtcaccagccacattccgatggggcgcgtcggcacgccggaagagatcgccgccgtgttcgccttccttgcctccgatgatgcgagctacatcaccgggcaaaccatcaatgcctgcgggggcctgacgctgtttccggaattccgggagaattgggcgagctgaggggttgtttcggacccgcgtttcggttgggacgctgcggcgccgtgtgctatcgaccgtggacgatgctgccgccattggcagccgccgacacatgacgggctcgtgagcacaaccatcaacatcaatgcctatagcgacgcgctggtggtcctcgggacggccggcgtcgtggtgccgatcgtccgccattggggcatcaatcccgtgctgggttatctcggtgccggcgccattctcggtccgctcgggctcggctcgctcgtgcagcaaatgccgttcctgtattggttcacggtgacggacgcgcacaatgtcgagggtatcgcgaatctgggcatcgtcttcctgctgttcctgatcgggctcgagctgtctttcagacggctattgacgatgcgacgtctggtgttcgggctcggcggcctgcaggtggtcgtgacgtccgccttgatattcggcgccgcgcttctctccgggcaaaattccgataccgccgtcatccttggtgcgagccttgcgctgtcctcgacggcgatcgtgcttgagcttttgtccagcgaaaggcggcttgcgaccacggccgggcgcgccagcttctccgtgctgctggcccaggaccttgccgtggttcccattctcgtcttcgtgtccttgctcgctgcagacagtggcggctcggtcgtggcgcacatttccagcgcgatcctcaaggcgacggtcgcggtcgtttccctgattctgatcgggcggctgctgatgcgtccgctgttccagatggttgcgggcactcattcaacggagttgttcgtcgcggcgaccctgttcgtcatcgtcggcgcagggcttgccgcgcaccaggctggcctgtcgatggcgctcggagcgttcgttgcaggactgatgctggcggagaccgagtatggcaaggccatcgaggccaccgtcgagccgttcaagggtctgctgctgggcatcttcttcttcacagtcggcatggccatcgacttccgcgtgttcatgcgcgagcccggctggctgctcgccgctgtcatcggcatcctcgtcggcaaggcgatcgtgctcatcgtcctggggcgcctcttcaggctgtcatggccggccgcgatcgagatggcattcttgctgggtcctgtcggcgaattcgccttcgtcagccttggaatggcggcggccggcggcatgatcgagccgagcgtgtcgggctttgccgtggccgtcaccgccgtgacgatggcgttgataccgcttatgggcatgctcgggcgacgactggcggcgaagctgagcagcgaacgcgcgcccgatcctgaactcgcggttcggccgcccgccgaccgggcgcaagccatcgtggtcggctatggccgcgttggcaaggtcgtctgctcgctgctgaccagccatggcctgaactatatcgcggtcgatcacgaggctgtcgccgtggcgcgcgaccgccgcgacggtcacaaggtctattttggcgacgcgacggagccgggcttcctcgaggcgtgcggcctgatgcagacgaccggcgtgatcatcaccatccagtcgcgaccagcgatcgatgctgtcgtcgagcggatccgcgcggtgcggcccgatgtgctgatcgtttcgcgggcgcgggacgccgatcatgcccgtcacctctatgcgatcggcgcaaccgatgcggtgccggagacgatcgaggcaagcctgcagctctccgaagccgcgctggtcggcctcggggttgcggttgggcatgcgatcgcctcggtgcacgagaagcgggacgagttccggctgacgctgcagcaggcggcccgtgttgcgggacacgagaaagctcgtccgctcgatcttgcagggcgcgggcccccgcgatgaccgccctgcggtcgctctgcgcgggatttgtcgcgatctggcaaaacgtgctcgcccgaactacatcatgagcgatgacaaaggcctcgcttgcagactcaccgctccaggatttcatcggccggcacgaacgcctgttcgtgctgaccggcgctggctgcagcaccaattcaggcattcccgactaccgcgacgtccacggcaactggaaacggacccagcccgtgaacttccagtccttcatgtcggacgagcccacgcggcggcgctattgggcgcgcagcctgatcggctggcggcggttcggccaagcccggccgaatgatgcgcatcatgcgctggcgcggctggaggcgaacggccggtgcggcatgctgctgacgcagaacgtcgaccggctgcatcagtctgccggccaccggcaggtgatcgacctgcatggcaggcttgatctggtccgctgcatgggttgcggtcgcaagatgcagcgtgaagagtttcagcatgcgcttggccgcgcgaatgctgcttggctgacgctcgatgccgccgatgcgcctgatggcgacgcggatctggagcacgaggatttctcgtccttcgaagtgcccgcatgcgacgcctgcggcggcatcctcaagcccgacgtcgtgttcttcggcgagaacgtcccgcgcgacatcgtcgccaccgcgaaggatcatctggcgcgagccgacgccatgctcgtcgtcggctcatcgctgatggtctattccggattccgcttcgtgcaggctgccgcgcagcgcaacattccgattgctgcggtcaatctgggccgcacccgcgccgatgatctcctgacgctgaaggtcgaggagcgttgcgaggcagcgcttgcattcctgctttgactgcgcccgcgacggacacaccttgcctattgcataggtgcccagcagaatagctgggcgtggcgttgtcctcgtcgtccatggcatggaaattgctgcgctttcgacctcagtcttgacgatcagcgcggagaatttggaatgcttgagggagccgaggtgcggcttgccgtcgatatcggtgggacgttcaccgatatcgtgctggacgttggtcaagaccgcaagacacgcaaggtgctgacgacgccgcagcggcccgagcaggcagtgctggatggcatgcgcctcatccttgctgacgcgcgcgcacatatcagcgacatcgacgtcttcattcacggcacgacgctcgcgaccaatgccatcatcgagcggcgaggggccaagaccgcgctgatcgcgaccgagggcttccgcgacgtgctcgatatcggcaccgaaagccgctacgaccagtatgatctcagcatcgagaagccgaagccgctggcgccgcgcagcctgcgcttcaccgtgccggagcgtatcgatgcgcacggtgccgttcgcctgcctctggacgaggcagcggtgcgcgcgctcgcgccgaagctgggtgagctcggggtcgagagcgtcgcaatcgcctttctgcactcctatgccaatcccgagcatgagcgccgggccgcagcgatcatcggtgatgagatacccggcatatccgtgacgctctcatcggccgtgtgccctgagatccgcgaatatgaacgcacctccacggcggtcgccaacgcgtatgtgcaaccgctgatcgacggctatctcgcccgcatggccgaggccctgcaggtcgagcagttccgtggcgcgatctatctcgtcacgtcgggcggcggtgtcacgtcgatcgagacggcgcggcgctttcctgtgcgcctcgtcgaatccggcccggccggcggcgcgatcttcgcggcgcagatcgcggcacgtcttggcgagagcaaggtgctgtccttcgacatgggcggcaccaccgcaaagatctgcctgatcgagaagtaccagcccgagacctcgcgcgtgttcgaggtcgatcgcgccgcacgcttcctcaaaggctccggcctgccggtgcgcattcccgtgatcgagatggtcgagatcggcgccggcggcggctcgatcgctcatgtcgacgcgatgaagcgcgtcaccgtcggtcccgagagcgcctcctcggagccgggacccgcctgctacggccgtggcggccagcgcccggccgtgacggatgcggacgtcgcgctcgggatgatcgatcccgacgcgttcgcggccggcacgatcaagctcgatccggagctgtcgaagcaggcgctgctgcgcgatgtcggtgagccgctcggcctgtcggcggaaaccgcagcctatgcggtgcatgaggtcgtctgcgagaacatggcgagcgcggcgcgcgtgcatgcggtcgagcgcggcgcggtggtcggccagcatacgctgatcgccttcggcggcgctgcgccgctgcatgcggcgcgcgtcgccgagaagatcggcgtctcccgcgtgatcgtgccgtcgaatgccggggtcggctcggcggtcggctttcttgccgcgcccatcgcctatgagctggtgcgcagccgccatgtccgcctcgacgatttcgacaccgaggcggtctccgacctcctgcaggaaatggtgaccgaggcgcgcgcgctggtcgagccgggtgccgccggtgcgccggtgcgcgagcgccgcgccgctttcatgcgctatgtcggccagggccacgagatctcggtcgagttgccgaaccggcggctgacttcggctgatctcgccggcctgcgccggaacttcgaggcggattactccgcgatgttcgagcgtccgattcccggtgcggcgatcgaagtcttgagctggtcggtgctcgccaccaccgaggcgcgcaatccgcctgcgatcgcctccgtcgcacgcaagcccgcggccaaggcctccgggagccgcaagttcttcgacggccgcgcaggagaggtgatcgagattccgctctatcgccgcgaggacatggtgccgggtgcgaccattgcgggccccgccgtgatcgcggaggacgagacctccaccttcgtgtccaccagcttcgacgctcatatcgacggtgccggcagcatcgtcatggaacgaaaggcggcctgatcatgagcaaggcaagcggcgcgagcctgatcgaccttcagatcatgtggcaccggctgatcgccgtggtcgaggagcaggcgcaggtgctgctccgcaccgcgttcagcccgattgtgcgcgaatgcggcgacctctccgccggcgtgttcgacctcaagggccgcatgctggcgcaggcggtgaccggcacgcccggtcacgtcaattcgatggccgaatcggtcaagcacttcatcgcccacttcccgcttcagacgatgaaggagggcgatgcctacatcaccaacgatccctggatgggcaccggtcatctcaacgacttcgtcgtcaccacgccctgcttcaaggacggcaagccggtcgcgctgttctcctgcaccagccatctcatggacatcggcggcatcggcttcgggcccgacgccaccgacgtgttcatggaggggctctacatccccatgctgaagctgatcgacgagggcgtcgtcaacgagacgctgatggcgatgatccggactaatacgcggctgcccatcgacaccgagggcgacacctattcgctcgccggctgcaacgatgtcggatgcgagcgcctcgtcgagatgatgaccgagttcggcatcgacacgctcgacgagctcggcgaccacatctgcgagcgctcgcgcgaggcggtgctcgccgaaatcgccaagctgccgaagggcagctggcgcaacaccatggtggtcgacggctacgacgcgccggtcacgctggccgcgacgctgacgatctcggatgaaggcattcacgtcgatttcgacggcacctcggctgcctcgaagttcggcatcaacgtgccgctgtcctacaccacggcatataccgtgttcggcctcggctgcgtcgtcgcctcgcagatcccgaacaatgccggctcgctctcgccgctgacggtgtcggcgccggcgggcgcgatcctcaatgcgccgaagccggccccggtcgcctcgcgccacgtcatcgggcagatgctgcccgacgtcgtgttcggctgcctgcgccagatcatccccgagcgtgtgcctgcggaaggcacttcgtgcctgtggaatctcaacgtccgtggccagacccgctcgggcgccggtggcaattacgggttctcgatggcggtcacctcgaatggcggtaccggcgcgcgcttcggcaaggacggcctgtcggccaccgcctatcccagcggtgtgcgcggcacgccggtcgagatcgcggagacgcagacacccttgatcttctggcgcaaggaactgcgaccggattccggcggggcagggcgcacccgcggcggcctcggccagatcatcgaagtggccagcggcgtcgatgcgccgttcgacatcctcgcggcgttcgaccgcatcgatcatccgccgcgtgggcgggatggcggcggggacggcgaggccggctatgtcgggctgaagtccggcaagaagctgcgcggcaagggctttcagcaggtcccgccggatgaccgcctggtcgtgctgacgcccggcggcgctggcatcggcgatcccagagagcgcgatcgtgcggccgtcaacgaggacgtcgcgagcggtctcgtgtcctcggagaacgcagtcaaggtctatgggtacgcgcgttgaagcgtcaacgcgccttgtaaacggagggggttcatgatcacgcgacgaaacttcaccgcgggcgcagcgacgctgcttgccgcaagtcacatgtccactcgcgcaccggcggcgagcgtgagctgggacatgtcgacggtatggcccgacggcaatttccatacccagaacgcgatggcgttcgcggaggaagtgaagaagcagagcggcggtgcggtcgccatcgtggtgaaggcaggcggccagctcggcttcaagggccccgagcacttgcgcgccgtgcgcgatggcctcgtgccgctcgccgacgtcctcaatatccagcaggtcggcgacgaacccttcatgggcgtcgagagcattcccttcctttgcggctccgtggaggagctgaaggtgctgcacaaatatgtgcggcccgaatacgagaagatcgccgcgcgcaacaaccagaagatcctctacatcgtgccgtggccgacgcagtatctgcatctgaaggcgaaggtggcagacgtcgagggtctgaagaacatcaagatccgcgtgcctgacaagaacgcggtcgagatgctgaatgcgatcggcatggcagcggtgatgatcccctggggcgagacgattcccgcgctcgcctccggcgcggtggccggcgtctccacctcgtcggtgtcgggcgtcgacggcaagttctgggagttcctgaaatacgtctacccgaccaaccacgtctggtcgtcgcagatgctcaccgtcaacctcgatgcctggaaggcactctccggcgatcagcagaagctcgttgcggatatagcggcaaagatggagccgggcttctgggccaactcgctcaaggccgatgtcgacagcctcaaccgcctcaaggaaggcggcatggaggtggtgcctgtctcgcaagccatgatggcggacatccgcgccaagacggcgccgcagctcgacgctttcctcaagcgcgtgccggcggccgacaagccggtgcgggcctatctggccgaaatgaagcgtggctgagggtggccgcgtggcgagcgtctcgaccgaagctccgcaaagtctcaacgcagcggcgcccgcgccgctgcgtatcctgctcgacggcatcgaccggctcggccggctcgacggctggatcggcggcttctgtctcttgatgctgacgctgctgatgctgtgcgaggtcgcaacgcgattcctctcgaacttcctgccgttctttccgccgagcatctcgatcgcctgggaatactcgtcctacctgatggcggcgtccttcaccttcggcgccgccatgacattgcgcgtcggcggccatatccgcgtcgtgctgctggtgaagaacgcgccggcgccggtgcagcgcgcgctcgagattctcgctgcagcagccggctttgccttcatggcgttcctgacctacgcgatggccaggttcgcctttgctgcgtacacgcgcggccaggtctcgacctcgagcgacacgccgttgtggtttccacaagccgtcgtcaccttcggcatgctgctgctgacgctccagttcctggcgcgcgcgatccaggccgcgctcggcctgccgctggaggatcaccgcatgaaggcctctcccgtcgaatgaccgccgtgttctgcaccggattcaagatcgcatgaccatcgaagtcctcgccttgttcgcgatcctgtttgcgctgctggcctgcggcgtgtggatcggcctcacgcttgcgctcaccgcgacgctcttgctcgcgatgttccgctcgatcccgctcgaaaaactgctgcctcaatatgcctggaacatcctcacaactcaggagctgcttgcgctgccgctgttcatcctgatgggcgagctgttgtttcgaacccggctgtcgcgctcgttgttccagggcctcgcgccctgggcggggctgctgccaggtcgtctgctgcatgtgaacgtgatcggctgcaccatctttgcggcgatctcgggctcgtcggcggcgaccacgcaggtgatcggccgcatgtcgctcaacgagctgctgcgccgcggctattcccgcgacatcgcgatcggctcgctggccggcgccgggacgctcggctttttgatcccgccgtccaacatcatgatcatctacggcgtgctcggcgacgtctcgatcctcaagctgttcacggccggcgtgctgccgggctttctgctcgccgccaccttcatggcctgggtgatgctgcattcgagcctcaatcccgcgatggtgccggaggcggaggccaggctttcgcaggtgccgtggggcgaacgattcgtcgcgctgaaggacctcgccccggcgctgttcctgatcgcctgcgtgctcggctcgatgtatggcgggctcgcgacgccttcggaggccgccgccgtcggcgtgctcggcgccgggctggtggcctgggcgcaaggggcgatgtcgcaacaggtgatccgcgatgtcctgatcggttcggtcgtgacctgctcgatgatcgcgctgatcgtgctcggcgcttccatcctcggcaatgccgccgcctttctcggcatcccgcagtcggtcgctgccttcgtcaaggccctcggcctgtcgccattcatgctgatcgtggcgttgatcgtcttctatctcgtgctcggctgctttctcgacggcttctcgatgatcgtgatgaccctgccgatcgtgctgccgatcgtgaagggggccggcttcgacgaggtctggttcggcgtcttcctcgtgctcgcagtcgaaatggcgcagatcacgccaccggtcggcttcaacctgttcgtcatccagggccttaccgacaacagccttgcctacatcgcccgcgtgacgatgccttttctcatcatcatggttggattcgtgctgctgatgacgctctggcccggcatcgtcaccgtcctgccgcgtgtgctgtacggataggcttgcgccgccccggctgagcggccgggacgggctttcgatgctcaaggctcacgccgccgccttctttcgcgcgagctcggccttgtacatctcgaactcctccgcgatcgcgcgtgcgatcgagggccgctggcgcagacgctcgtgataggccttcaggttcggccatttcgcaagctcgatcggcggcgtggccaccgtccagttgatgaccgtgacgagataggcgtccgccacgctgaaatggtctagcaggaattcgcggcctttcagatacttgtcgagatagtcgagccgcgacaggttcttctccagcgcataggccttggcctcatgcggcgccttgctgtcgagcaaggggacgaaaaggcccttgtgcagctcggtgccgatgaagcaaagccattgatgcagacgcgtgcgctcgaggccaaccgcggcgccgagccccgattgtgggaagcgatctgcgacatattgcaggatcgccgcgttttcggtcagcaccaagccatcgtcggtacgcagtgtcggcaccaagccgatcggattgacggcgcggaagtcggacccgttgctcagcaccgtcttggtcggcggatcgacttcgagataattcgcttcggcgccggcttcatacagcgcaacgcgagtcgccatcgagcaggcgagtggcgagaaataaagatccatcttgggcctccttgggcaattccttttcgggtgtcgctcaacctggccagattgatttatgtaccatcctgcataatatatccgcggtcaaggaataatttgcgagatggtacaaaaatcgaagccgccagctgctgccagccagcccaagcgtcgtggccgcccgcgcagctacgagcccgacaccgcgctcggaaaggcgcttgacctgttccgcaagcaaggcttcacagccacctcgctcgacgatctcagcgcagcaaccggcatgaaccggccgagcctctacggcgccttcggcgacaagcgtgagctctacatcaagagctatcagcgctatcgcgacgaggcgggcgcggccatcggtgcgatcttccgcgaggagatgccgctgcgtcagcggctggagcgcatctatgctgccgcgctcgacatctatttgtccggcgacaccggaccgcgcggttgcttcacagtcgtgactgcggcgtccgaagccgtcggcgatcccgagattcgcgccatggtgctggacggcctcaccgggctcgataaagcctttgccagttgcttccgccgcgccaaggacaagggagagttgccggagagcgcagatccattcgcgctggcgcagatcgcatccgccaccattcacaccattgcgatccgctcgcgcgcccgcgtgccgcgcaaggagctggaggcgatcgtgaagggtgcgatcgatgtgatgatcgggaccaaagggtagcttggaagcgaagcttcaatatccccttgctcgatccaccacattctccagcgccccgccggcctcgaaccgcgcgatctgctccgcgacataggctgatattgcgtcggcatcggtatcggctgcgttgtgcggggtcagcaccacctttgggtgggtccaaaaccggctgtccaccggctgcggttcctgcacgaagacgtcgagcgaggcggcgcccagcgtgccgtcgtcgaggcaggcgagaagatcggcttcattctgcaggccgccgcggccggcattgatcagcacgggcgcgccgagcgggctgttgcggttgagctttgcaaagacgtcgcggttgaggatgccgtgcgtgtcgggcgtcagcggcaacaggcagaccaggatgtcggtcgtgcgcaggaacgcgtccatcccggcggcgccatggaagcattcgatgccgtcgatcgtccgcgggctgcggctccagccggcgacacggaagccgagccgccgcagcacatcggccgcatcggctcccagcgtgcccaaccccatgacgccgaccgtgatcgcgctcgccgaccactgatatctgggctcccaacgtctcgcgcgctggcactcccgcaagtacagctcctggcggtggtgcatcaacacgtgcagcacgacatattcggtcatgcgattggtgagatcgggcacggcgacgcgcaccagcggcacttcgggcaggctcttgtcggccatcagcgcgtcgacgccggcgcccagattgaagatcgcacgcagattggggaacgcgccgagagcgcccggcgccggcttccacaccgcggcgtagtgcacctccgccggatcgagcccggcatcgggcagcagcaccactcggcggtccccgcagaccgtttcgaaccgggccttccatcgctccggcagccagttctgctgcgtgctgttgatcaggacggccagtgtgcccggggtcattcgaagtgcctcttaggttccgctcgagtaggctctccttggcacgatctgccggatttttcttgcaaattttttccgcagtcctgtcggcacggggcatattggcgcgtcttcagaacagacgaggaaagtgccgcccatgctctacgccattctttgctaccacgatgaggatttcgtcggctcctggagcaaggaccaggacgaggccgtgatgaagaagctcgccgttgtgcaggagaagctcaccaagcagggacggctcggtccggtggcgcggctgctgccgaccaccgcggcggcgacgctgcgcaaggaggacccgcccctggtgctcgacggcccctatgccgagaccaaggagcagctgctcggcttctacatcgtcgattgcaagaacctcgatgatgcgctcgacgtcgctcgcgagctgggcgcagccaatcccggcggtgcctatgaggtgcgtccggtgggcgtattccggcccggaggaaatctaacgtgagcgaggccgacaccgcctggatcgagactgcgctgacctcggcgcgaccgcaggcggtgggcgcgctgctgcgctattttcgcgatctcgacaccgcagaggaggcttttcagaacgcctgcctgcgcgcgctgaagacctggccgcagaacggtccgccgcgcgatcccgcggcctggctgatcatggtgggccgcaacgtcgccatcgacgaggtgcgccgcgcccgcaagcagcagccgctgccggaggacgaccaggccatctccgatctcgacgatgccgagggtgcgctggccgagcgcctcgacggctcgcactatcgcgacgatattctgcggttgatgttcatctgctgccacccgcaactgccggcgacgcagcagatcgcgctggccttgcgcatcgtctcgggcctcaccgtgaagcagattgctcgcgccttcctggtctcggaagccgcgatggagcagcgcattacgcgggccaaggcgaaggtcgccgaggctgggacaccgttcgagacgcccggcgcggtcgagcgttccgagcggctcgccggcgtcgcggcgatgatttacctgattttcaacgaaggctattcggcgggtggcgacaccgcggagatcaggaagccgctctgcgaggaagcgatccggctggcgcggctgctgctgcggctgtttccgagcgagccggagatcatgggcttgacggcgctgatcctgttgcagcacgcccgcagcgccgcgcgctttgccgcggacggttcgctgatcctgctcgacgatcaggatcgttccttgtggaacggcacgatgatcgccgaaggtctcgcgctgatcgacaaggcgatgcgccaccaccgcagcgggccctatcagatccaggccgcgatcgcggcgctgcatgcgcgcgcatcgacgccggaagagaccgactgggcgcagatcgatctgctctacggcgcgctggaagtggtgcagccctcgccggtggtgacgctcaatcgcgcggttgcggtctccaaggtgcgcggggcgcaggctgcgctcgatctgatcgagccgctggcaacgaagctcgccaactatttccatttctacggcgtgcgcggcgccttcctgatgcagctcggccgcaacgctgaagcccgcgtcgccttcgaccgggccatcgcgctcgcgaatacctccgccgaagccgctcacattcgtatgcatctcgatcgcctgatccgggacagccagtcgaagaaggaaagcgccaaggccaagtgaggcgaagaccatctccgccgtcaggcccgggcttgacccgggtatccacgacttgccatcgaggttgaagaacgcggatggccgggacaacgcccatgacgtgggaggggcggtgcgccaaaaatttcacgtcgccttgtcggccccggctcctcgccttcgtcctagttccgtatcgggggagtcatccatgctgaaagtcttttccatcatcgctatcgtcctcgccgtcggagtcgctgccgtcctcgtcttcgccctgaccaaacccgacacgttccgcgtcgagcgaagcctggcagtgaaggcgccggccgatgcgatctatccgcaggtcgccgattttcaccgttggaccgcctggtcaccgtatgagagccgcgatcccgccatgaagcggacgttcggcggacctgccggtggcaagggcgcgacctatgcctgggacggcaacaacaatgtcggcgccggccggatggagatcctcgaggcgagcggaccttcgaagctccgcatcaagctcgatttcgagcggcctttcgaaggccacaacaccgccgagttcacctttgtgccgcaaggcgatgccacactcgtcacgtgggcgatgtacggtccggccccgttcctgtccaagctgatgcaggtgttcatcaacatggacagcatgatcggcaaggatttcgaggctggtctcgccagcctgaagaagctcaccgagaagcactaagcctcactggaagcgaagaggagagaaacgatgctcaatccctatctgttctaccaggacacctgcgaagcggcgttcacctattacgccaaggttctcggcggcaagatcgaagcgatgatgcgctcatcggaggcgccgccggaggtgccggccgcgcccggccgtgagaagatgatcatgcatgcgcggatgtcactccccgacggcggcgtgctgatggcctccgacgcgcccgcggagcactttcagaagccgcagggtttctcgatctcgctcacggtcacggaccccgcggatggcgagcgaaagttcaatgcccttgccgacggcggctcggtcaccatgccgttcagcaagaccttctgggccaggggctttggcatgtgcgtcgacaaattcggcattccctggatggtgaactgcccggcggagggaatgtgacgggcgcgatcgagcgcattccgttgagcggcgatcccgcttctccaatgccgcgggagaggggatcgccgtcaacggactgaaccggtgacgtcctcgcgcagcggcgacgagtgcacgcagcgaggacagatcacgagcttgctgccgagctgccggtcattctccgcctgtatttcgtcatggaccgcccaccatgcttcggaatatgggcgcaatgtgccgagcaccctttcccgctcctgattcggatcaggtgctgcgggcgcgtgattcgtggcgcgccgcttcgcggcatgaggacgattgggatccttgccaagaccgtcccaggcgatggagcgacgttcctgggctggagcgtcggcgcatccgatcagcgctgtgcaaaaaataagcaagatgaagccgtgtcgaatcatgccgcgcctttgttacgtaggggacgcgcagaatccgcgtgaaatgcgcgccaccgcgtccgatcgttggaactcaagacaaagcaaatgcgccggcatggccgaatggagcgtgcttcgcatcactttgcgggcgcagtgaggccgcttcgtgaaaccaactgcgccgcacaacaagtggcgcaatattgggctgtgatccgcgcgtcagaatcgctaattgtgcttcacaaaagctacaaactggggtggggcgacttggaagggagcgaccgatggcggcggcgctgcagatcaatttcgcactttgggggatgctcatctgcgtcagcatgaagctggggccggtggttcagactctcttctgaaaacggttctgaaacaatagcgtgacgtggttctcgcgaaagcgggcggaactagccggacgctcggaaggccaggccgaagagccgaactggctggcgagctcgtcaccggcaccgcggatagatcgcggcgagatcgcgccccttcaacagcaacagccgtgagctcaggccgccgcggcggctgatccagtcgcgcaccgggccgggataggcagcaagcaccgcaaccgatgcctccggctcggcatagaaacgtccgcgccgatctaccgagcgcgcggcgtggaagcccagcacggcgcgcttggtgacgcagatgcgctcgcccggcacgatgctcagcaccagcgtgcaggcggacaggcagggaccgtcgatcaccacgcgctcgccgctatcacgcaccttctcgaacaagtcgaggaatgggccgacctgcccgcccggagactggatgatgcggatctcggcggcggccggcgtggcggcgattgccgatgcgagcatcagggccttaaggcaggtgatacgtcgcatgaagccaccagctcgctcttgtagatgggtcagccgcaggcgcaactccaccatctgtctctttccagcgatcgcaatgaggtggaatacgcctgcggctaatccaccctgctattgcagacctacccattccgtcgctggccacgcagcgtcggcaggccgatgcccgccgcatcgaagccgccatcaacggccaaaatttggccggtgatgtagctcgcgcttgccgaggacagaaaatagatcgcttccgcgagttcctcttccagcccgtagcggttgagcggaatggcgtcgtgatagtcggcgcggatctccttggtgtgcacctgctttgccatcgcggtatcgaccggtcccggtgcgaccgcgttgacccgaatgttgagtgaggcgagctccacggcgagctgtttggtgaggtgcgcaagccccgccttgctggtgccgtaggccgagcgcagcgtcgaggcgcgcaccgccgagatcgaggtgacgttgacgatggcgccgccatggccctcgcgcatcaggggcaccgcggccttggtgcagagaaacgggccggtgaggttgacgtccagcacgctccgccaatcggcctccgatgtctccatcagcggtgcgaacaccgcgatgccggcattgttgacgagcgcatcgagccggccgaaccggccctcgatctcccccatcgcatcgctcaatgcggctgcgtccgagacatcgcaggtcagcgccagcgtcgcctcaccttgaccgatctcggcgacggcgcggctgagcagttcaccctcgatgtcgagcagcgccacacgccagccctcggccaggaatttcttcgcggtcgcaagcccgatgccgcgggcggctccggtgacgagggcgactttgtgcggggcttgcggcatttgctgatctgtccttctagcggaaacggaagcttgtcgggcggccagcgccttttacttcgctttcgtcccgacgaggaagggcctatgccggagttcgcgcttgcaccgtcaccctgagggcacccgctgttcagcggtcccggaagaatggccgagatcgcggaaggtcgcgcctatgccagctccgccgaggcgcgctgcatgttggctgacatgtcagccgtcacgatgctctgctcctcgactgcggcggcggtggacgcgatgaactcgttcacgccggcgatcgcggccttgatcgccgtgagcgatccggcgacgtcgccagagatgacgttcagggcatcgatctccgaggtgatcgtgtcggtcgcctgcttggcctggctcgcgaggttcttcacctcggaggcgaccaccgcgaagccccggccggcctcgcccgcgcgggcggattcgatcgtggcgttgagtgcgagcaggttgatctggctggtgatgccggaaatcatctccacgatgccgctcattgcttgtgctgccgtggccagcttctgggcctgactgtccgcggactcgacccgcgctgtcgcgaccttggaggtctcgcgcgatttcgccatggtttcggaaatctcgcggatcgaggcgctcatctgttcgctgccggccgcaaccgcgtcgatcagcccgcgcgcattgtcggccttcttgcggccgatcgcctgggcggtgatgtcggtggcgtatttcaccaccttgtagggcctgccgttgagatcgagaatcgggttgtaggatgcctggatccagacctctcgcccgcccttggcgatccgcttgtattcggcggcctggtattcgccgcgattgagggtctcccagaactggcgataggccgccgaagtcctctcattcggctcgacgaacatcgagtggtgctggcccttgatctcggccagcgaatagccgatcgccttcaagaaattctcgttggcggtgcggatcgtgccgtccatgttgaattcgatcacggcttgcgatttctggatggcggcgagttgaccgtcattgtcggcggccctcatcttttgggcggtgacgtcggtggcgaacttcaccaccttgaatggcttgccgttctcgtcgaggattggattgtaggtggcgatgatccagatttctttgccgcccttgcccagccgcttgtattcggccgcctcgtactccccgcggttcagcttggcccagaaagcggcataggcggggctggcgcggtcttccggcgttacgaacacgctgtgatgcttgcccttgatctcgtcgagcgagtaacccatggcgttcaggaagttctcgtttgcggtgatgatggtgccgtccatgttgaactcgatcaccgcctgcgcgcgattgatggcggcgatcttgccggaatcctccatggtcttgatcttgtacgccgtaatgtccgtcgcgaatttgatgaagctgacgaccttgccgctttcatcgcggagcggcgcgtaggaggcgtggacccagacttccttcccgcccttgccgaagcgcttgtattgagtggtctggaactcgccgcggttgaggctggcccagaagtcgcgatagcaggcactctcgcgctcggccgggctgacgaacatgctgtgatgcttgcccttgatctcggccagcgtgtagccgctcattttcagcaggttctcattggcgtcgagtatggtgccgtcgaggtcgaattcgatcacggcctgcgaacggttgagcgcctcgacctctgcgatagcgtgcctgaccttcttgctctggaaattgaacacgtgagctccgcaatattactggcaaactggaggaccgtgataccggcttccttgaagaaaaagttgcatgctcttcttgagcatctgtaaaccttgcgaacgcttggccgaggcccgcgcttttacggtgcgttgtccaagtcattcaactaacaggcgtttccgttccatatgcacgatgacgttcacaaggcgaccggtagttgtacgggaggatcgcgcattatttttccttgcaggtgcgccattcgaccctctggctgctgaggatcgattgctggcggccgcctgattgggcccaagcataatctcgtggcataagcttcgcagctcagttcccgacccggaactagttgcgcggcgcaattcctttggtgtcgcgagccggcgggccatttcttcgggcagccgagcctgttgcgtcccagaaattctcgtccgcatgtcggttccttggacgtctgttcgtcttggaggcgagggcggacggttccgccgccgctctccccgacgacgagggcaaggaatactcatgcgattcatgatgctgatgatcccgctcggctacgagagcgcaccgccggacgtgcagctcgatccagaacgcgttgccgcgatgatgcgatacaacgaggcgctgaaggatgccggcgtgctgatcacgctcgacggcctgcatccgccttcgatgggcgcgcgcgtctcgtttgcgaccggagtgcccgtcgtcaccgacgggccgttcgctgaggccaaggaagtgctgggcggttactggatgatcgaggtcgcctcgcgcgaggaagcgatcgcctgggcgacgaagtgcccggctacgccgaacgaaatcatcgagatccggcaggtgcaggagatgagcgactttccgcctgacgtgcaggcggccgccgcgggtctcgacggcctgaaggcatagccaccacggtcgcgatgagctcgcggccgtcatcaagacttcaacacgggagagaccgatgagcaccggacatacattccttgccgtctacctcggcagcatgagcggcgaaaagatgaaggcctggcatgcgaggcccgaggcggaacggaaggcaatggagcgcgagggcatggccgcttggcaccgctgggtcgagaagcacaaggacgtcatcgtcgagatgggcggcccgctcggcaagacacgcaggatcgacgcgaatggcatcacggaggtcagcaacgccctgacggggttcaccgtggtgcgcgccgcctcgcaggaggaagctgcaagactgttcgagaaccatccgcattttgcgatctttcccggcgaggcgatcgagatcatgcccgtgctgccggttcctcagatgtagtgttggcaaggggctgtcattccgggcggttcgcaggatcgaacccggatttcgagaatctcaggttcgcaagcgcgcagcgtagttcgatgctggcgcatcgccccgggtggctgcagagaataccgggttaatcacgccccatcggcgctagtgacgttcgcgtccggctcatgtaaagctctttcacatgagctggcgcaaggagcagcgccgcgccgagcgcggctatcaccacggcaatctgaaggaggccctgttgcaggccgctctcggcctgatcgccgagaaaggcgcagcgggcttcacctttgccgatgccgcccggatggccggcgtcagcgcggcggcgccataccggcatttccgcgaccgagacgaactgttgtcatcgatcgcccagcgcggctttgagcagttcgaggcgcgccttggcgcggcctgggacgacggtcgccccgatacggtcaccgcgttcgaacgcgtcggcaaggcctatctcgcctttgcccgcgaggagcccgccttctacaacgcgatgttcgaatcgggcgtgccggtggatgtgaatcccgcactccaggcggctagcgaacgggccttcaacatcattcgcgctgcggccgagcggctcgcggccctgacgccgccgggcacgcctcggccgccggcgatgatgatggcgcttcacatctggtccatggcgcatggcgtcgcctcgctattttcccgcggcgacgccgcccgacgaaagctgccgatgtcgcccgacgagctgttggaggccgaggtgctgatctatctgcgcggcctcggttttccgaccgaccgtcgtccggcaggcaagagcgccgagccgccgcccgtgccacctgaggcatcctccggatcgggcctgccgccgggcggtccctggggcaagccgaaataagattgcgcaaataatcacgcgggcgtgtctggcggccagcttgacaaaatcgcgggatggtctagctatgtaaatgttatttacattcacaacggcgctggtgccgtgatggagagggaaatggcctacaccgctgatgtcaatcgatggcgcggcccttcggaccaataccaacgctacgatcgtccccgcatgctcgatacgccctggcatccgggctggatcgccgtgaccattctcgggttcatcatctggtggccgatcgggcttgcccttctctttttcacactcgggagcagaagaatgtcgtgctggagccatccggatcgttggcagaacaagatggaaaagatgcagtacaagatggaccgcatgcgcgaccgcatggagcgtcgcggcttcgggtttggcttcggcccgccgtcctccggcaaccgcgccttcgacgaataccgcgccgagacgctgcagcgcctcgaggaagagcagcgtgagttcaaggactttctgacccgtctgcgtcacgccaaggacaaggaagagttcgaccagttcatggcgcagcacaagacgcgtccgaccccgccgccgaccgaccagcagcagggctgacacctctcaaagccttcaggcgcatgcccccaaagtcctgatggccccgagccgcccgcctgcgcaacccgcaggcgggcggttcggcttgtagcgccaagatgccagacagagctcgttcgcaggcattctcgtccatctgcgactcgcgagcgaaagctcgcccggatgcaagactggcgcctcgccctggatcgcctatattcgccgccacagatgcacgcggagcggaggcgacgatggcgcaagttgcgacactggcgagcgacgccgtctggcaggcgatccgtggcgaggctcagcgcgcgacgattgccgatcctgtcttcggccgggctcttgcgggcgccatcctcacccataacgatttcgccgccgccctggccgatctgatcgggcagcggctcggcggcgccggcgccgaacgcacgcgcttcacatcctttgccagcgatgcctttcgcggcgaggcggacctgatcgaagccgccggacgagacttgcaggccgtctcgcgcagcgaccccgctgcggcgggcctgctgcagccgctgctgcattacaagggttacctcgcgctgcaggcctggcgcgtctcgaactggctctggcggcatgaccatcgtgacgcggcgctgctgtttcagaacgaggcgtcgaacgtgctccaggtcagcattcatccggccgccagcatcggatccgccgtttatctcgaccacgccaccggcatcgtgatcggcgccggcgccgtcatcggcgatgacgtcaccattctccagaacgtcagcatcggccgcagcagcgaactgccggcgcgctcgccccgcatcggctgtggcgtctatatcggtgcgggcgccagcatcctcggcgacatcagcatcggcgctcatgcgaaaatcggcgccggcacccttgtgagcaaggacgtccccgccggctgcacggcggtcggcaatcctgcgcggctgaccaactgccccgagcccgcctcggcggcctgacgtgccgctcgctcaggccgcgcggcggcgaccttcgccgccatgatgcggcgtgacgggctccgagctggtctggcccggcgcatccagcaccgcgacgtgatgccgatacaccatttcccagcccttccaccccgtgaacagcaggatgccgaccacgatcagggacagcaccacgccccatggcttgatcgcagcttccgcaccttgtgcgtaacggaggtagaaattgacgagggccagcacaactgccgcaaggttaccgaccatgtggtaccaggcatcgttgagactgcggatgcggggttcgccgaagaagtccacaaagccggcggcggcggcaaccagcgccatgacgatgccggcgccgatcagccacatcgcggcgcgggcccagaaagcgtcgtcggttccaatgaaggcgagatcggtgatgggtgcgccgaccaggcatgcaacggggaacggaatcagcatgggatgcaggggatgatcgccgaccgcggcggtcgtcttggggttgatgctcatggaaagacctcgccaaaggtgagtttcccagacaattttccgccctctggctggttcctaccggcgccggggcggacgctctccttctgatgcgcgaacggcagggctgaaatcccatgaccgggcggcagcgggccgccccatctccctgcgctgcctgcctttcccggagccaaattcgccgccggtaaccccgcattaaccaacgccgggctctggtaagagtggacagtcgcgcccgaagccgtgtcgaggcccttagttttgacatcttggcggggaatgcaggcgaccggctttggacgagcctttggacgagccctgcaccccaaaaagacgaggctttgagcgggcttgccggccgcgccggttctagcgcggcggttggggaacaccggcggcgatttgctggccgaggacaataggtaacgatcgccttgagaggatactgctcatgaatccggccgacgtggctcagtcagccctcccggttgctgcctccgccgacgtatcgctgattgcgctgttttggcaggctcactggatcgtgaaagcggtgatgctggggcttctggcctgctcggtctgggtctgggccatcgcgatcgacaagatctttctttatgcgcgcacccggcgctcgatggaccggttcgagcaggcgttctggtccggcgagtcgatcgaggagctctatcgaacgctctcggccaagcccacgcattccatggcagcctgcttcgtggccgcgatgcgcgagtggaagcgttctttcgagagccatgcccgctcggtcgcgggcctgcagatgcgtatcgacaaggtgatgaacgtctcgatcgcacgcgaggtcgaacggctggagcggcgcctgctggtgctggcgaccgtcggctccgccggccccttcgtcggcctgttcggcacggtctggggcatcatgtcgagcttccagtcgatcgcggcgtcgaaaaatacctctttggcggtggtcgctcccggtatcgcggaagcgttgtttgcgaccgccgtcggccttatcgccgccattcctgccactattttctacaataagttcacctccgaggtgaaccggcaggcccagcgcctggagggtttcgccgatgaattttcagccatcctgtcccgtcagatcgacgagcgtggctgacggacggcatgtatagtgtgaagggcaatttgggcaccagaccatgggcatgaacgtcgcaagttcatccggaggcggcggacgccgcggccggcgcaagcccgtcgtggccgaaatcaacgtcacgcccatggtcgacgtcatgctggtgctgctcatcatcttcatggtgtcggcgccgatgttgacggtcggcgtgccgctcgatctgccgcagacccaggccaagagcatcgagaacagtgatcagaagccgatccagctctcggtcgacatcaagggcaaggtgttcatcaacgactccgagatcgccatcaacgagctggtccccaagctgaaggcgatcaccgacgcgcgcggcgggctcgaggaacgcatctatctgcgcgccgacaagaaggcggattacggcaccgtggccaaggtgatgggccagctctcgggcgccggcttcaagaagctcgccctcgtcacagaagcggatcaggggtcctaggccggtgaaggtgaacgtcgacaagacactcgttgcgtcgattgctctccacgtcctcgtgctgggatggggtctgctgacctttagcagcaaggcctatatcgcgccggaggagtcgcttcccgtcgatatcatttccaccgatcagctggcgcagatgatggcggggcagaagaccggaaagaaggaagagccgaagccgaaggtcgagaagatcgcggaagcgaagcccgaagaggacgccgtcggcaaggtcaccgagaagaaggagctgatcaagaccaactcgcaaccggagccgccgccgaagcctgccgagaagccggtggagaagaagcccgagccccccaagccggtcgccgaggcgaagccgaaggaagagccgaagccgcaggaaaagaagcctgatccggccaaggaagatccgatcgctgagctccagaagaagcttgagaccaagaagccgccgcccaagcccgtggagcaaaaggttgcggcggtgcaccctcagcagcagcccaagccgaaggagcgcaccttcgatcccgcccagatccagcgcgacctcgacaagcgcgccgcgacccggcacgagctcgccggctccgcgctgaatgcgtctgcctcgctgggagcggccaccggaactgccgccagcaatgtcgcgacctggcgcggtgctttccagggcgcggtcaagcgctgcttcacacccacatacaacgggcaggacgccgaccagtacgaagccgatatcgacattcccatgaagatcgatggatcgctggcttcggagccgattgtcgtcgcagtgcgtggaccgtcgcgctcgattgctcaggccattgccgagagtgccaagcgcgccatcgtgcagtgtcaggtctattcgttcatgccgaagcagcaatacgagagctggaagctcatcccgatgactttcggcctgaaagacatgttgtgacatccgaacaaaagaattttgcaatgaatgacgtccgatcgatcaaccgccgccgcttcatgaccctggctggatcggggcttgcaatgctcggaggcgggcgggtcttcgctcaaggccaggacggccgcatccgcatcgatcctacggcgttccagccgatcccgatcgcgatcaccaattttctgccgggatcgccttccgatggcgaagtcggcaacggcgtcacccaagtcatcaccaacaatctgaagcgctcgggcctgttcgctccgatcgaccaggccgccttcatcgagcgcatcagcaacatggacgttgcgccgcaattccagaactggaaaaccatcaacgctcaggccctcgtcactggtcgcatgacgcggcagccggacggccgcctcaaggccgaattccgcctgtgggacgtggtctccggccagcagctcaccggacagcaatatttcacctcgccggaatactggcggcgtatcgcccacatcatctccgaccagatctacgagcggatgaccggcgagaaggggtatttcgacagccgcgtcgtgttcgtggacgagaccggacccaaggagcgccgggtcaagcggctcgcgatgatggaccaggacggcgccaatgtgcgctacctgacccgcggctccgacctcgtgctgacgccgcgcttctcgccgaattcgcaagagatcacctacatggagttcggccagggtgatccgaaggtttatctctacaacatcgagaccggccaacgcgagatcgtcggcaatttccccggcatgacctttgcgccgcgcttttcgccggacggccaacgcgtcatcatgagcctgcagcagggcggcaattccaacctgttcgtgatggatctgcgctcgcgctcgaccacgcgcctcaccgacacgccggcgatcgacacgtcgccgtcctactcgccggacgggacccgcatctgcttcgaatccgatcgtggcggccggtcgcagatctacgtgatggcggcgggcggcgggcaggcgcagcgcatctccttctccaaggacgacaccaatgccagctattcgacgccggtgtggtcgccgaagggcgattacatcgccttcaccaggcagggcggcgggcagttcgcgatcggcgtcatgaagccggacggttccggcgagcggctgctcacctccggcttccacaacgagggcccgaccttctcgccgaacggccgcgtgctgatgttcttccgcgatcccggcggcaacggcggaccgtcgctgtacaccgtcgacatttcgggacgcaacgagctgaaggtgccgacgcctggcttcgcctcggatcccgcatggtcgccgctattgtcctcgacgtcgggctgacgatcgcagttgaaacatcgcgcattcagacgcgcgatgttttcgaaaaagcgcgccgattttttcgcgttccgcgcgaacagcaacacttccttcaccctgtgcccggcagagcttgcctagttgcttgatttgtaagcggaaatagcttcgccattgccgaaaaacaactcgactttaacgatgttccctcagaaaagcttcatctcggctcggtaagactacgcgctgaacaggacgcgcgtacaaaccaaaatgcagttcgcaagccagagcggagagcaggggcaggcctcgccgacgatttcggcggcgctgaccgattcgctgttcgaggctcccggcacggtgcttaccggcattgtcttctcggcgttctcggcctccctgacggcgctcaagaccggacagatgctgctctggggctttgtcccgctcctcattcttgcgggcgccatacgcgccttcgatctgagccggtaccaggcccagaaatcggttctgagcgcggaacaggccgcgcgttggcagaagcgctatcagatcggagcgctcatccaggccgctgtgatcggtctgtggtgttccacgacgctgatgagcaacgatgatgccatcgctcacatgattgcgctctcggtcacaacgggaatcgtggcgggaggcgccggaagagcttatggacgacagtcgatatttcgtctgcaagccactttgatatttggaccggccgtgatcgcgctggcgctgcaccgcacgccttactacgtcgcgatgtccgtcgtgtgcgccgcgttcctcttctcggtcatgcgcctctccggcaatctgcacaagattttcttgcgcgccgttgtcgcacgcgaacgcgaggccgcactcgccggccagttcgacacggcgctcaacaacatgccgcacgggctctgcatgtttcgcatcgacggtcagctcgcggtgatgaaccaccgcttcgccgccatgatgagcctgccagacgatctcgcccaaaacggcacgactgcgcgcgatgtcgtcgccgcatgcgtcgaagcgcgatcgatctcggccgcgagcggccaggcgataattgccgacatcgaaaacgcgcacgcgaaggagatcattaccaccgaccccgatccacaaaggaaccgttcgctgtcttggaccgtccaaccgatggctgatggcggtgcggtggtgctgctcgaggacattacggagcggcgcacggcagaggccaggatcagccatatggcccgcttcgacgatctcacggcgctgccgaaccgcgtcagcttccgcgacgagatcgagcacctgttggccgtctcacacgacgcggagcagctctccgcgctgctgttcatcgacctcgaccagttcaagcaggtcaacgatacgctcggccatccctgcggcgaccagctcctgtgcgccgtcgccaaccgcctgcgcgagatgcttcggccggaggatttcgtcgcccggttcggcggcgacgagttcgtcgtgttccagcagaacctcaatgcccccgaggacgccgcagcgctcgcccgccgcatcgtcgagcgcctgagcgagcgctatcgcatcgacaatcacctggttgagatcggcgccagcgtcggcatcgcactgacctcgccggaaggcaccagcgccgacaccctgctcaagaatgctgacatggcgctgtaccgggccaaggccgacggccgcggcacctattgcttcttccgcgacgagatggcggcgaccgtcgaggcacggcgcattctcgagctcgacctgcgcaaggcgctcgccaacgaggaattcgagctgttctatcagccgctggtcaatctgaaatccggcaagatcaccacctgcgaggccctgctgcgctggaatcatccggtgcgcggcacggtctcgcccgtcgacatcataccggtcgccgaggacatgggcctcatcgtcgatctcggccgctggatcctgcgccgcgcctgcatggaatgcatgaaatggccggagggcgtcagcgtcgccgtcaacttctcgccgcagcaattccatcagcgcgacgtgctgagcgagatccgctatgcactcgaagtgtcgggcctgccggcgcatcgactggagatcgagatcacagagtcctcgctgctgcgcaacacccagctcacccacgacatcctgtcgcaattgcatgcgctcggcgttcgcatctcgctcgacgatttcggcaccggctattccagcctcagctacttgcacaacttcccgatgcagaaggtgaagatcgaccgctccttccttgaaggcatcgactcggaccgtccgctcacactgctccgaggtgtggcgcggctgtccgccgacctgggcatgtcggtggtggtggaaggaatcgagaccaacgagcaactcgaactcatcaatgccgacgggacggtgaccgaagctcagggttatctgttcagccggcctgtcccggccgtgcgcattcgtcagctactcaatgcctcctacggcgttcgcggcggcaacgatcaggccgtcgcagcctcggcgcgatcgatcgcctgaccctccatcgacttctcaaggtctctgccgggttcttacgggcccaaaaggttaaccctaacaattctaacactttgcaattgcgttaaggaaccattaatctacgctcactcgcggaagttgctagcagcgtaggggttatagatgaagtccggggccgaaccgcagacggcgcttcttccacgcggagccgcgctgtttgagcgtctcgattatcggctcatcgaaacgccggaagacaaggatcgcctccatctgatgcgttaccgggcctatttgcaggccgggctgattccgccgtcggaatcgcagcgggtgaccgaccgtttcgacgacgcgcccaacgtctggaatttcggagtctacgtcgacaacgaactctgcagttccgtccgcatccacgttctgacatccgaatggcggatgtcctacacgaccgaggtgttcggcgacgtgctgcatccccgcctggaccgaggcgaggtctttatcgacccatgtcgattcgttgctgatccggaaatgcagcagcgtttccccgaactgccttatctgacggtgcggcttcccttcgtggcctgcgaacacttcaacgccgatgtcgggctctcgatggtgcgaaccgatcatcaggcgttctaccgccgcgtgttcctgtccgagacgctcaccgaaccgcgttcctttccaggctggccgacgaagaaggcggtcctgatggcctcggattaccctaaggtccgggacaggatcctgacgcgtttccccatcatgcgatcgagtgcgtttgagcggcggatgctgtttgaacgcagcacgcagcggatcgcccctgcgcgaccgattcgccttgccggcgcagccgcgcaggcctgaatcctcggtctgtgagcgggacttcagccgccctggccgccaggctatcctggcggaacgggggttttcgtcatcaacccgcttgccttcaccttggcgccacatttacaaatcattaaccatcacggttgcttttcgctggttgggggcatttgactggctgcggcaaggttccgtcaaggttgacggaacgttcgcttaaccaaccccctgtagaccggacagcagtggactaacgtgagcgtggaggctccggaatgaaacatcctatgcgtatcctccagggattgaagttggccgcggtgctcgccgtcgcgctgtcgatgggcgcctgcgccaacaagaatgccgcgacggatgcgatggccaatgcggcgacgccgggcagccagcaggatttcgtcgtcaacgtgggtgaccgcgtcttcttcgaaagcgaccagaccgatctgaccccgcaggcgatcgtgaccctggagaagcaggcacagtggctccagagttatccgcgctacagcttcaccattgaaggtcatgccgacgagcgcggcacccgcgaatacaacatcgcgctcggcgcccggagagcccagtcggtgcgctcgttcctcgcctcgcgcggcatcgatccgaaccgcatgcgcacgatctcctatggcaaggagcggccggttgccgtctgtaacgatatctcctgctggtcgcagaaccgtcgcgccgtcaccgtcttgaacgcgagctcctgatattcggtcaggtctctggcagttcagtcaggcgccgttcagctttcgaattggatgatgccggcgccctctcgggcgccggtttcgtttcagcattctgtgacagaaacccctttgtaccagtcacatttttggcgtactgcacttcgatgtgtggcgcgtcgaacgttccgtcgcaggccattccgcttttgtcgtcagggcaagatgtcatccagatttaaggtctttggcggtaccgtggcgaccgtcgcgctgctctccttgtgctcgcccgcgtttgcgcagtcgatctttgcgcagtcggacgatggcgacgccgagttgcggatcgagcggctggagaatcggctgcgccagctcaccggccagaacgaggagctgcaataccgcaaccggcaactcgaggagcggctgcgggcgctcgaaggcggcgcgcaggccgcccccggacaggcgcccaacgtcgcggcgatgccgcccgcgcagatcgcgccgggccagattgcaccggggcaagccgcgccgggccatcggcagccgccggtgcagccgaactacgagcagccgcagatcgcatctcccgccccgatcattcaggagcagccggcgcccggcgctcccggcacgcgccgccgtggcgatgcgttcgacccgaaccagaatccaaatgcgcccggtgcgccccgcgcgctcggcggcgggcagcagccgatgccggcaggagctccgagcgggacgcccggcggccgcaatgccggcgagccgctcgatctcgccaacaccagcccccgctaccagcaaggtgtgccgtcagcagcgcagcccggctacccgccggcgcaatccggctatccggcgccggccggcggcgccggcttgaccaccttgccgccgtcggcaacgccgcgcgacgagttcgacctcggcatcggctacatgcagcgcaaggactatgccctggccgagcagaccatgaagaacttcacgcagagatttccgagcgacccgcttatcggagacgcgcaatattggctgggcgagagctatttccagcgccagcaatatcgcgattccgcggaagccttcctcgccgtcaccaccaaatacgagaaatcggccaaggcgccggatgcgctgctgcggctcggccagtcgcttgccgcgctgaaggagaaggaggccgcctgcgccgccttcggcgaagtcggccgcaaatatccgcgcgcctccgccggcgtcaaagccgcggtcgatcgcgagcagaagcgggtgaagtgctgacctccaggggcatgacaagcatgacaagtcggagtgcgctgcgctaaacacgcaaccgtccgtcggcgagtgtcagggccgcgtcatgtcagacgacgacaattcaccgatctcagcgcgcgaggcgaggcggcttttcgccggcctgaaagctgcgccggcgctggtgctcgccgtctccggcggccccgactccgtcgcgctgatgtggcttgctgcgcgctggcagcgcagccttgcgcggggtccacaactcaccgtcgtcacggtcgatcacggcctgcgcccggaagcggcccgcgaggcgcgcgaggtcaagcggctcgccgccgagctcggattgccgcaccggaccgcgcgctggcgcggtgcgaaaccgaagaccgggctgcctgcggcagcgcgcgaggcccgctaccgcctgctcgctgaggccgcgcgtgccgcgggtgcgagccatgtgctgacggcccacacccgcgacgaccaggcggagaccctgttgatgcgcctcctgcgcggcagcggccttgccgggttgtcggccatggcgcccctcagcgagcgcgacggcatcgtcctggcgcgcccgctgctcgatgttccgaaatcgcagctgatcgcaaccttgaggcgggcgaaggtcggcttcgtcgacgaccccaccaaccgggacaccgccttcacccggccgcggctgcgcgcgctgctgccgcttctcgccgccgagggcggcgacagcagaaatctggcgcggctcgcggcaaggctggcgcgcgccaatgcggcagtcgaggtgctggccgacggcgccgagcgctttctccgtttgcgggatcgcggcgatgcgccgcaggcgggcgtccggagcttcgaggcttcggcctttgccgccctcccggaggaggtccggctgcggcttctgctgcgggccatcgacgcgctcggacatgagggaccggcggaactcggcaaggtcgaaaccctggtgtccgcactggacgaggccatggccgcaagtctgcgcgcccgcgccggccggccggccctgaagcagacccttgcaggagccttgatcagccttgccggcgggcgtatccacatcgcgccggcgccggcccggcggcgcaccgggcgatgagcgcgaatgcggcggatcatggcaccggcggtttcgcatccacgccgtcaggccaccttaaccaggccggaaaaacccgccatagggcgccattatttccgcgggaatcgctctaggatgggataaatagtcccatctcgttctcttggcagcgaccgggacggcacctaaattgtatccgtctaacgatgaggattccttgggatttcctcgcattgaccaaatcaactgcccaaggatcacggccgcgatccgcgcgaccacgaaggaagatcgatgaacgccaatctgcgcaatttcgccctctgggtcatcattgtcttgctgctgttggcgttgttcacgctctttcagaatccgggtcagcgggcgtcctcgcaggacatcgccttctcccagctcctgagcgaggttgaccgcggcaatgtgcgcgacgtcgtgatccaggggccggacatccacggcaccttcaccaacggctcgagcttccagacctatgcgccgaacgatccgacgctggtgaagcgcctctacgacagcaaggtgcagatcactgcgaagccgccgggcgacaacgtgccctggttcgtctcgctcctggtctcctggctgcccttcatcgcgctgatcggcgtgtggatcttcctgtcgcggcagatgcagggcggcgccggcaaggcgatgggcttcggcaagtcgcgcgccaagatgctcaccgaagcgcatggccgcgtcaccttcgaggacgtcgccggcgtcgacgaagccaagcaggacctgcaggagatcgtcgaatttctgcgcgaccccggcaaattccagcgtctcggcggccgcattccgcgcggcgtgctgctggtcggccctcccggcaccggcaagaccctgatcgcgcgtgcggtcgcgggtgaggccaacgtgccgttcttcaccatctccggttcggacttcgtcgaaatgttcgtcggcgtcggcgcgagccgcgtccgcgacatgttcgagcaggccaagaagaacgcgccctgcatcatcttcatcgacgaaatcgacgccgtcggtcgtcaccgcggcgccggactcggcggcggcaatgacgagcgcgagcagacgctgaaccagctgctggtcgagatggacggcttcgaggccaacgagggcgtgatcctgatcgccgcgaccaaccgtcccgacgtgctcgatcccgcgctgctgcgtccgggtcgcttcgaccgtcaggtcgtggtgcccaatcccgacgtcgtcggccgcgagcagatcctcaaggttcacgtccgcaaggtgccgctggcgccggatatcaacctcaagaccatcgcgcgcggcacgccgggcttctcaggcgccgacctgatgaacctcgtcaacgaagctgcgctcaccgccgcccgccgcaacaagcggatggtgacgcaggccgagttcgaggaagccaaggacaaggtcatgatgggtgccgagcgcaagtcgctcgtcatgaccgaggaagagaagctcttgacggcctaccacgaaggcggtcacgccatcgtcggcctcaacgttcccgcgaccgatccgatccacaaggcgaccatcatcccgcgtggccgtgcgctcggcatggtcatgcagctgccggagcgcgacaagttgtcgatgtcgctggagcagatgacttcgcgcctcgccatcatgatgggcggccgcgtcgccgaagagctgatattcggccgcgagaaggtgacctcgggcgctgcttccgacatcgagcaggcgacgcgcctggcccgcatgatggtgacgcgctggggcctgtcggaagagctcggcacggtctcctacggcgagaaccaggacgaggtgttcctggggatgtcggtgtcgcggacgcagaacgcctccgaggcgaccgtccagaagatcgactccgagatcaagcgtctggtcgaggagggctacaaggaagcgacccgcattctcaccgagaagcgcgccgacctcgaagcactcgccaagggcctgctcgaattcgaaacgctgaccggcgaggagatcgtcgatctgctcaagggcaagaagccgaaccgcgagtccgtgctcgagcccaccgcgccgcgcgcctccgccgtgcccccggccggcaagtcgcgcccgcggcccgatccggatcccggcctggagccgcagccgcaggcgtaaccgatcagcggcacaccgaattgaaaaacgcggcgggaacgccgcgttttttgttatgcgagcgcgcgtttgcgccggcatcgggatggctgcttccggcaatgcgagcaccgccgaagcagagcgcttctgttccggccgtcgccgttcgggcctaggccgttttgccacagccattgcggctgaatcggttgcggtcgatcaagaaagagcacctccacggcgttaggcttcgacttgtcaaaggagggatacatggctttcaaggatattctgttgaccctggcgagctatccggaaccgacgccggtttcggtgatcgacgatgccgtttcggtcgccgccgtcctggacgcgcacatcgcggccatttcgtgcgaagtccatgcggaagtgcgcgcaagcctgctcggggatgccatcctggacatacccgcactcgttgcgcgcgaggccgccaagagccgcgagaatgcgaaggcgctgcttgcggcgttcgaagcctcggccgcgaaatccggcgtccggcacgagaccatcttcgagcaatgtgcaaccgccaccgaggccgcgctgctggcagactatgcaaggcttcgcgatctcacgatcatggcggtgccggactcccatgatcgatggtacgcagaagaggtgatcttcgaatccggcaggccgacgctgatcctgcccgccgctccccgatcgcgtccattccagctcgatgctgtttgcgtggcctgggacttcagccgcaccgctgcgcgagcggtttccgatgcgcttcctttgctcgaaagcgcaggaagcgtgcgggtcgtaacggtcacgaacgaaaaggccctggattccaagcattccggcgaagagctggcgaagaacctcgctcgtcacggcatcgaggttgtgtgcgacgagatcgacgccgcgggcaaggggatcgacgaggtcctgacatcttacgtgttctcccatggcatcgacgtcctcgtgatgggcgcgtacggaacgccgaggtggcgggaattcgtgcttggcggcgcgaccagggggctgctgtccaagccgccggtcccgattctgttctcgcattgacgcttggtcatgcaggaggccgcgtcgctcgggtccaccaggctgatcaggtcgctcacgctgacgcacgccgtgctgtacgggctcggcgtgacgatcggcgccggaatctacgtcctggtgggagcggccgctgcgcgaagcgggatgcatgcgcccctggcgttcctcgctgccgcggtcgtgatgggcgtgacggccgggagctttgccgaactgggcacgcgatggccggttgcggcgagcgaggctgcctacgtccaggccgcgtttcatcgaaaatggctcagcggtgccacggggctgctcgtggtggccgcagcgacgatttccggcgcgaccatcaccgtggggagcgccggctacatcggcgtgttcctgccgctgcccgccacctggatcatcgccggcgtcgtgcttgcgatgggagcggtcgcctgcctgtccgcggttcagtccatcggcttcgccggcctgatgacggtcgtggagatcggcggattggtcctcattgtcggggccgggctgtttcagggcgacgccctggtctcccggctgcccgaactgctagctcccctgagcgacaaggcggcgtggaccgggatcgcacagacgtcgctgctcgccgtgttcgcattcatcgggttcgagcacctcgtgaacatctccgaggaaatgaagaatccgtcccggacgctgccatgggcgctcttcatcaccctcggcgtgacggcgttcctctacatgactgtcgtctgggttgcggtggtcgcggtgcccccggccgagctcgcgcactcctcggctccgcttgcactggtctttcagcggttgaccggtcttccgctctcggtgttgagcgtcatcgcgatcgttgcgacggtcaatggaatcatcgttcacatgctgatgatcggacgtgtgctgtacgggcttgcggaccaaggcagccttccggcctttctcgcaagggtgaacgcgagaagcggcgcgccgatggttgcaaccctcttcggcgtgggcgccatcctgatcctcgcccttggcattcccttgaccggattggccgaatggacctcacgcctgacgctcggggccttcgtcctggtcaacctggcgcttcttcgcatcaagacgagagaatccgaacctcccgccggcgtgttcgtcgtgcccatctgggtgcctattgcaggactgctcacaagcgccgccttgctcctgatcgacctcctcggatagtgcgcgccttcgcgtttcggcggacgagccaggcgccgcgatggcggtcctcgtctttggcgaaacgttccatctgcggcttcaggcgcggttcgcgccctcacttgcgcacgcgccagacagtcatgccggctcgagacacggtctcgactcgctccagataatctggcgcctcatcgcggccgagccttgcggcgaggccctcgggcgcgatgcggaccagatcctcctgatcggcagagccgttgcacgtgatgatgtaatcgaccttccgcgaggtgagtattgcgcgcgcggcttgcggtgtcgccgtcatcgcatgcaccatggcaaggttgccgtcgttgttgcgatggtaggggccggcgaacacgaaatgaccggtcgctgccaggatcgaaggacccgagtcgatcggcgccatcacccgaccgggcgtcagagcagcgagcggcgcggcgttggagatggtctggcaggacacgttgcgctcaggcgtcgcgatctcatggctactcgtcccgccggcgagtacaggccaaactgcaaagccgacgccgccgagagtggctggcgatacaagcagtgcggcacgcaccagcccccaatcggtcgcggcacgcgtgcgcaagaccgagattgccatgacgctgagcggagccgcaacgatgttggcagcggcggcgccgcgcagttcccacaggctgacaccgaacagcgctgcgagcgtgaaggtcgaaacgatccagagaaagcgcgtctgcggtctgttcctaatcgtcgccgcgaggcacaggccgagcgtcaggaatggaaacgcatagtatccgagcagcttctgcggttgcacccgcgccagctccgtcactggcatggtctcgctgacccgatcgagccagaagcttacaagcaggggatcgacttgcgcatatggcgaggccacgcagttcggataggatctggagaacgcacccaggaggagcgcaccggcaaacgcggccgaaccgagccgcgtccagatggagcggccgagatggctgacgccggctaccgcgagcagcgcggcgccgccgcccgccgacaagagaaggacggggccgccgaaggcgtcgcagacgggccgcgtgagactgtttatcggaagcagcagcagtgccagcagcagcgacgacgcagagaggccggctccgaaggcgcaggcggagcgccgggcctcggcgcccttccagatcagcagccccatcaccgccgcgctcgccacggcgatcgcaggcagcatttccagtccgattgccagcgacagcgccgcgagacctccggccagagccgccctggctgcagagtgttcgagattggtgatggagagcatgaagccgagcagcagcacgatctggacgctatgatgatcgatcgcgccagcgcgaaagtggatcagggcgggtatcgacagggccgtgaccagaaccgcggcgaaatgtagccatgggcgatcggccggagtgcttgcctgacttgcgatggtcgctgagagccagagcgccacggccatcagcatcgacggccacgcgaccagcacgagcgcttccgaagcgtgttggccgaggagaggacgaaacaacgcaatcagcagggccaagggcgcatcgacgacgcgtgaccagtgcatcgcaagtcccggcgggtcgagccggtactgaatcaggtcgaaccaaccttggccagccaggagatcgcgcacctcgaccagccgcatcaggtcgtcggtcgacaggctgtcgagaacgcccgtcttgatcgcgggaaatccgagcgccatcacaatcgccgcccaggcggtggtcagcacgatcgcagggttgggcgcagcatcggatccttgttcggtcggtagcacgagggacgacatcgccctgcgcctcaattcgaggcagcgggcattgacctgccgcccgcgctctgcccgtcctcgcgcacatggaccacggcgatgtcgtccgcatagatccgcttccagcccttgagttggtcgaggatctgcggccccggcgcgtccgcgaccaggagcgtcgcgtcgatcttgtattcgtccaagaggcgcggcagcagctcgggcttcttgccctcggtggccttgaagaagtccatcacgaacttctcgccatagagctcggcgcggccgtcgacgaaaacgggaatattgcgcgagatcagatagccgccgaactggtaggcgttgaagatgcgctgtgccttgcgttgctcgagcaggtcgactgccgcaaccggcgtctgcgtcatcgtgaaggtgaagcggtggtgtcccatgtagagcgacgtcgaggtccagcttgccgccacgatcatcagcgcgccgagcgcggtgacgtagtgagccggccagcggtcggcgccgaccgcctcggggaccgcgcgcggaaacatcgcgccgagcggctttgccagcaccagcggtatgaggaacgcaaaggcttcgatgcttctgacgtgggtcagcgcgctccaggtcaggaacaggatcaggaagatccggggggccgacagcaccaggccgcgataatagccgaatgcgatcaaggcgagcagggcgccctcgaacggggtgaacgtggcgaagttcgccggcatccattcgaagatcagcgacagcaactcgccgaggctgaggatgttggtcgcaccctgcaacgttcgccagccgtacggcgtgaagcagctcgcgatcagcgcggcgattccgaacagcacccagcgcatgaacagggcaagccgccgtcccttctcggcatgctcgaccgcctccagcgagatcgggccgatcagcgcaaggcccagcacgaagccgccgtggaggttcgcccacagcgccatcaacggcagcagatgccaggagggggcgcccctgcggtcagcggtcgccatgagcagcccgacccacgccaccatgaccggcagcgcgagaatatggggacgcgccagcacgtgatgcagcgacagcagcactgcaagcatcgcgaacagcaccgcgcgcggcgcctcgatctgcacgtcgagcagatagacgaagatcgcgattgcgagcgcgaaggcgacggccgtcagaatgacggggccggcccagccccattgcgcttgggagaaggcgaatgcgacctgcgacagccaagacgtcgagatccagggcgcgcccgctcgcgtgaacgaatagaagtcgttggtgggcatggcgctgtggtcgaggatccattgcccgatcttgatctgccagaacgagtcggagtcacttagcagcgtgtcgccgaggaaaaggaagaacaggtaggcgccggcgccggcgcacaatggcacgagggcccgcgcgcggtcctgcaccgcgatgctgttggcaagggataaagacatgccggctcgtcgtcctgttgctgttcgcgatcgagcatgatccggacccggacgaccgcgtcagcacatgcggtcctccgagaagatcatgcccaggcaatcacctgatgcgcgatgaatgattcatctcatcgcgcgccggcccctgcgggcggcattggatcacgggcggtcataacttcgggtaaaccggcagcgacagccggtttcatgttgccgacaatttaacggattgttttggaattcgatttaccatgggcgaatactcgcaaaccgcccggtgtttacgcagtcgaattaactgcggcgaaattctttgtctctacgttccggttccatggtcgggcggcgctgggaagccgaaaagaccagatcagttgtagcctcgtgtactcatttggagcactctatgaagaacctcgttgcgcgtttcttgaaggatgaatccggcgccaccgccattgaatacggcctgatcgccgccggcatcgcgctggcgatcatcaccgtcgtgaacaacctcggcaccacgctgaacaccaagttcacctcgatctcgaccagcctgaagtaaggccggcacgatctgacagtttcgagagccccgtcctcggcggggctctttgcttttggggcgacgtcagcacgctgctgacgaagccggcgtggcagacccgcgcaccgcacggctccggccgagataaagcttcgcggcccagatcgaggccatagcgagcgcgatgccggcaaggacgtcgacgatgtagtgcgcgcccatcaccggggttgctgcgatcatcagcaggctgagtgcggctgcgatgccgccgatgccgcgtaccggccacaaggcccagatgtagagcacggccgatgccgcgtgaaagctcgggaacgaaacgatgcctgacagagagaacagccggagttcacgcaggctgccgtcccgaagcgcgaggatgtcccgcagctgtccggcgtagaccgtggtgttgatctccggcagatgggcggccggcagctgcagtgcgtaataggtgccgatcgccggcacgatcgcgatctccgcgatcgtgactgcgagcgcgaggctcatcgctagcatgaacaattgcagccgcacataccgtgccgtcagtgccagcacgatgggaacgccgagcagcggaaacttgatcagtccgtagccgctcgcgagggttctcgcgagccatggatggttgttgacgtagcgtgcgatcggttccggatcgagccccaacgtgcggtcgatcgccagcaatgcttgatcctcgagcggccagttcagcttgcccgcgacgtagctcagcggcccgacgattgcgcaggtgagaatgacctgtccgatggtgccaagcgaaaacaccagcttcggatccgcaagctcgcctttcgcgattcggtagccataggcgagcacaagcagcagcgtggcgatcgccagggcgacgccgtaggcgaccggctcgagcctcagtcccgtggcgcgaaggccgagcgcgagcaggattcccatgccgaggatcggaagccaattgaggtgaaaaagctgccaggcggtccgggagtccgtgtcgagcatgggtgtaagcgcgtggaattgcattgcctccgtacagttacggacccgtgttaagatcgcggtaagatgtgtggttattgattatacaaccacagagcgttcttttttaagtgtctggaacgcgcagcctgttacggcttggcgccccaatccgcctcatgacgcttcacgcatttgcatcttgtcattcaccctgaatagttgttcagtccttgcggggtgatttgcatctttcgacgtgagaagcgttcggccgcagggcgtgcggctggcgtgtgggacaggaagcgcgccatggtttatcggcggacgcatcaagtggttaagcgccttgcggcgcggcgcagcgcgattctggcggcggcgcgggaggcggcggcagaaggcggcatggccgcggtgcagatcgcgccggtcgcagtccgggccaatgtcgcggccggcacggtctaccgctatttcccatccaaggcagacctgatctccgagctcattgccgaggtgtcccgcgacgagctcgcggcgatccggcgggcggccgatgccgcgccgggcccttcctcggcgctggcggccgccgtgacgaccgtggcggtccatacgctgtcgcagcgccggctggcctggggcatcctggccgagcccgtcgatgtcgatgtcagcgcctccaggctggccagcaggcgcgagatcgccggcgaaatcgctggccggatcgacgcggccgtgcgtgccggccatttgccggcccaggacaccgcgctcgccgccaccgccttgctcggcgccctgcatgaggctctcgtcggcccgctcgcgcccgacaatctcgatgatcccgtcaagatgcgcgatgcggtgcagacggtgactctgctggcgttgcgcgcggtcggcgtcatggatgcccgtgcccgcggcttggtggtgcagcagacgctgctgccgacgaccaaggctttggttggagcgtaagaccgcctcagcggcgaggtggcgcgctgatcgcgccgacgtcattgccgacgcgggccttttcgtgacatccgagcaagtccgccggctccggccggctactgtgcatggggttgttttcgactttttgctttggccgcgcgggcgggcctacatgtttgcatcgccctcggggccgaccgaggcgatgcgtaccatgttggtggtgccggggatgccgagcggcacgccggcgacgatgatgacgcgctgaccggcgcggacgaagccgtcgcggaacgcgatctggccggcgcggccgaccatgtcgtcctggtcgcgggcatcttcggcgacgacgcaatgcacgccccagacgacggccagcctgcggccggcggtgatgttcggggtgatcgccacgatcggcggcttcggccgttcgcgcgccacgcgcacggcggtcgagcccgacgaggtccagcagatcaaggccggcaaatcgagcgtctcggcgatctgccgcgcggcatcggcgatggcgtcgcctgcggtggattccggcgccgggcgctgggctgtgatcaccgaccggtaggtggggtcgcgctcgacctcctcgccgatgcggttcatggtcgagaccgcctcgaccgggaatttgccggccgccgattccgccgacagcatgatggcgtcggcgccctcatagacggcggtggcgacgtcggagacctcggcgcgggtcggcaccggagactggatcatggattccagcatctgggtcgcgaccaccacgggcttgccggcgcggcgcgccatccgcgtcatctgcttctgcaggctcggcacgcgctccagcggcagctcgacgccgaggtcgccgcgcgccaccatcagcgcgtcggacgcctcgatgatgtctgcgaggcgatcgatcgcctgcggcttctcgatcttggccatcaccgcggcgcggccgcggatcatcttcttggcttcgagcacgtcgtcggcgcgctggacgaacgatagcgcgatccagtcgacgccggtgacgagcgcggcttcgaggtcggcacggtccttcggcgtcatcgccgagaccggcaggtccgtgtcgggcaggctgacgcccttgcgatcgctcatcctgccgccgaccacgacccgcgtcaccgcgtgctccttcgaggtctcctccgcgatcagccgcaccttgccatcgtcgagcagcagagcatggcctggccgcagcgcggccaggatttccggatgagggagatggacgcgcgtggcatcgcccggcgtcttgtcggaatcgagcgtgaaggtctggccgttctggagctgcaccgcgccctcggcgaaagcgccgagccggagcttgggaccctgaaggtcgaccaggatgccgatcggccggccatagctgctctcgacgttgcggatcgtcgccaccagctcccgcatcttgtcgtgcgaggtgtggctcatgttgatgcggaacaggtcggcgccggcctcgaacaggcggcggatcatcgcgaggtctgaggaggccggccccagggttgcgag

SEQ ID NO: 182 - DNA, 17787 bp, Bradyrhizobium colbertium
cggtggttcgagcccacccaactgtaccagcgatttccagtattcgatgggatattgcccagatgagttgcgaggctcaatcacgctgagagccatcatctcgaatttgtagtctcggtttcaagaggatccagcaggtctgcttcttgctcatcgatcgggtacttggcgagcataaatcgttgcttcagcgcgagatcagcaaggacccatctatactcaggggctaaatctaagaagagcgctcgggcccagtccgccttttggactatgaatacgctcgcttggaagtcgcatcgcgcccataaatagtctagaaacgcactcttcagttttgacaacgactcatgttgtctacgttcgcattgggcttcgatgtgaacgaacgctcgatcgatctccgcgaccgtgcgcgcgaccgcatcgtcaactgtttcattctcctttatggctgcgaattgtggagctatcaaaaggtcgtagtactgtttctcgaactggtccgtttcgcgaccttcaaagccgaagtcctcaatcaactgattgaaaaccccgcgcagggttgggtgcccctgcatgctacctgtcagttcgagtgcattcttgtggcccatcaaggtgaacaagccctcgggatgaaaggctgcgagccctgatcactgcgagcatgtcttcgcgctgtcccatgttaccctccctgcaacacgtatccggccagtctaaccacctttgcgtgcaaaggcaaaatgatcgagtggcgccggcgccccgaagcgggatcgttcgttttcgttccccggttctggaagaaaacggcgggacgcaccgcgaaccttttcatgatcccaggtgtttctagctgaggcaggactgacaacgctgagggagctgaactgtgaacggtattatctatatcatcgggcttgtcgtcgtgatcgccgcggtgctctcgttcctgggtctgcgctgattgctgattgggcgcggcgaggccgtgaggcgtcgccgcctaagccttcgacgccgcaccgcgtcaccacccacaccaccacgggcaacgtcaccgccgccagtgttgcagcaccacgcgcctgacacaccgataggcggcaggtcgagcagtcttgcgaactcgaacccgacccgcacctccggcagcttcagcgcgcacatcgccaagatgctcagctcgcacttcgccgcgaagcggggcaggttgatgcccagcgatcggtgcggctcgaagcggggcctatccgcaacgttgctcaaagccggctttgtccgccgccaccgtagctcctccgttcgcaatgcgctatcggtagcgagccaatgacgtttgatggacaagcaagcaggcggaagagatcgtgggttttttcgagcgtctcaagacagccgcgtccgctgagtggcgggcctacactgagcatcccttcacgaatggattggcggacggctcgctcccggaagctgcgtttcgtcactacctcgttcaggactatctgttcctcatcgagtttgctcgcgcctacgcgctcgcggtctacaagtcccccaggcttgccgacatgcgtgaagcagctagcggcctctcggccatccttgatgtcgagatgaacctgcatgtgaagctctgtgccgaatggggcctgtccccgagcgaccttgaacaggcccctccggcggccgagatgctggcctatacgcgctacgtgctggatgcgggaatgcgcggcgatctgctggcgctcaaggtcgcgcttgcgccttgcgtgatcgggtacgcggagatcgcgacgcggctcgcctcgcaccccgctgccgacgcgctgagcaacggctatcgcgtctggatcgccgaatatgccggcgcgccgtaccaggaggtcgctgccagggcgcgggcgcatatggagcatctcgccgatctctacgccacgccggcccgcgaggccgagctgattgcgatcttcaaggaagccacccgtctcgaggcagacttctgggagatggcctggcgcgcgggccaggctgtcgcatagcggtgtcggcaatcggcacgccccctacctcacccccgtcaccacccacaccaccaccggcaatgtcaccgccgccagcagcgtcccgagcgccaccgcgcccgacaccggatttaccagccgctgatactgcacggcaaaaatgtacgcattcgcgccggtcggcatcgccgcgaacagcacgatgacgccggcggcgatcggcggcaggtcgagcagtctggccagcacgaacgccgccaccggcatggccgccagcttcagcgcgcacatcaccagaatgctcggcttctcgcccttcacctcgaagcggaacaggttgatgccgagcgcgatcagcgccgtcggcgcgcccgcctgcgccagcagctcgatggtgcggtcgacgaccggggtgaggccgaggccggtgaagcgccagatcacgccgaagccgatcgccagcatcaaggggttgcgcgcgaggtctgcgatcacgggccagacgatcgcgagcggcgagcccgcctgcctgcggctgacgaactccatctgcagcgtgccgcacagccagagcagcggcgtgttcaccgacaggatcagcgccatcgggcccgccgcctcgttgccgagcgcggagagcacgagcggaatgccgagcatcacgatgttgccgtagaccgagccgatcgcgcacacgacgccgtcctcgctgccgccgcgctggcggcgcagcagcgccgagaccgccatcgccgcgatccaggtgatggcgagcgcgccgtaataggcgccccacatccggtaaggactgacatcggggaattccgagacgacgatggtgcggaacagaagcgcagggatcgcgatgctgaaggcgaattcgctgatgcccttgtgcgcgctctccgagacgaagcgaaacagcaccgaggcatagccggccgcgatcagcgcgaacaccggcgcgacgatcagcaaggtggccatgcgcgctcaagaccccagcgcgatgatccgtcgcgccatccgcacattggcatagtcgatcatcttgccgtcgagcgtcaccgcgccctggccgttcgcctccgcgctctccatcgcctcgaccacccgccgcgcctgggccagctcctcggccgacggcgtgaacgcgcgcagcgtcggcgcgatctggtcggggtggatcacctgcttgccgtcgaagcccatcgcagcggccttctgcgcgctggcctcggtcagcctggtatcgcggaacgcgccgcaggggccgtcgatggcgcgcaggccgaaggcgcgcgcggccaccaagaggcgcatcatgggataggcgaacaggtcgagcggcgcggaggcgtagccgctttgcgccgacccgacgtggcgatagccgtccggcgagatgccgacgtcggaggtgcgggcgccgagcgaggccgcgaagtcgccgacgccgagatgcagtgacgccacgctcgagtgcgcggcggcgagcgcgtcgacattgacgaggccgagcgcggtctcgatcagcaattccagcgcgacgggttcggcgcgatccggcgccgccgcgcgcaactggccggcgatggcggcgatgtcgccggcgcgctccgccttcggcacgatcaccgcatccagccgcggcagcgccgccagcgcgcggatctcgtttgcgatgaacgggctgtcgaccacgttgagcctgaccgtaacgtgcttgctgccccagtcgagcgaggacagcgcgccggcggcttccgcaagcgcagcgcccttctcggcgggcggcacggcatcctcgagatccatgaacaccgcatccgcgcttgacgccgccgccttggcgacgaggcgggcgcgatgggcgggaacagccagataggcccggctcggccgcagcacagccaccgtcacgtctccctggccaggccgagttcagcgaggatggccgcgttgtgctcgccgacatcgggcaccgggtccatccgcggcgtcacgccgggaagggtgagcgcgggcaggaagctcatcagggggccgttgggagagccgacgcttctcacgcgcccgcgcgcgtgcaactgctcgtgcttcaggaaggcctcgaccgagttgagatgcgcattcgcgatcgcggcttcgtccagcagccgcagcacctcttcgctcgtcatcgacgcgaagcgctgctcgatatgcgcctgcaattcgtcgcggttctgcatgcgcagcggattgatgcggaagcgcgggtcgtcggcaagtgcggcatcgccaagcacgatgcggcacaacgagcgccattcccggtcgttctggatgccgaagaagatggtgttgccgtcgccgacgcggaacgggccgtagggcgcgatcgtcgcatgcttcgccccggtgcgcggcagcggccggccggtgctctcggtgtagaacgcgggatagctcatccagtccgtgatggaatcgaacagcgaggcctggaaggcggtgcccttgccggtgcgctcgcggcggaagagcgccatcagcacgccgttgaggatgtacatgccggtggcgatgtcgaccacggagagcccgaccttcgcaggctccgcctcggtgccgttgatggcgagcacgccggcctcgcactgcaccagcaggtcataggccttcttgtcgctgtagggaccgccggtgccatagcccgagacgtcgcaggcgatcaggcgcggatgcctgcgcagcagcgatgccgcatcgaggccgagccgctccgccgctcccggcgcaaggttctggatgaacacgtcggcccgcggcagcagggcgtcgaggaccttgcgcccctcggggctcttgatgtcgatggcgaggctttccttggagcggttggtccagacgaactggctcgacatgccgttcatcacgtgatcgtagtcgcggcagaagtcgccgctgccgggccgctcgatcttgatcacccgcgcgccccaatccgccaggtgccggctggccagcggcgccgcgatcgcctgctccagcgacaccaccgtcacgcccgcgagcggcagctccgcctcattcccatccatgcgatcgcctccatgcccgctcagcttttgacccagcgcaggagaacgagccgaccacccacgcgatttttgatggtgccatcatgcccctgttttgcccgacaagtcaaattcggcttcgaaaaatcctaagaatggggagggcgagcgtttgcagccatttggctactgtgcatggggttgttttcgcattctgtgcgggaggggccaggaaccctgaacgccagtccaccgcccctgttgccgagaccgcacagctccgacctttcgcatgccccctcggttgccaacgaaccgtcgttcacccactattcccgcctgttcgacatgtgggggaatcaatgccggcgtttcgcttcaagacctccttggccgtcgcaagcttctcgcttgccctggccgtcctggccctgccgcgcgccggcttcgcctacacccaggaggagcagcaggcctgcacgccggatgcgatgcggctgtgcaacgagttcattccgaacgtcgatgccatcaccgcctgcatgatcaagaagaaggcgcagctgtcgccgcaatgccgggtgttcttccgcccgggccccgagccgcgccagctccgcgccggcaagccgacccagatcgcgcccaaggccgcgaagaagagcgccaagccggcgccgaagaagaaagccagccagggctgagcgcgaggcaaggaggcgcgcaagcgccggctcgaagacgtggcgtgcgcccagctgccgcagcgtgcatgtgttcgcccccgcgtggggagctgcataagctccgcgacagcttccggactctgtttgttctcgcaacggcgcgcagacctgcggcaattacgggcgcgcgcctgacggaaaagagtcgcccgcaggtttgcgcggttaggttgcgctccgacttggcccgtctctgctcaaaaaacgcacgattgcttgcgcgtgaagcgcttcgttgccgttcgtgtgtgacgtcacactggttagtgtgactcaaaagccagtgcgcattgttatttcatggcctgagcgcagctcgcgataaatttatctttcacgaatcagcgcgctgattcattttcgcggcctggggtcaatctggaggccgaaggtatgaacgttattgtttttgcatcgcgtaagggcggctcgggcaagagtaccctggctgcacatcttgccgcgcagatcaaggcaagcaagcaggtcatgctcgtggatgccgatccgcagggctcgctcacgctgtggcacaagctgcgtggcaccaacgagccgccgatcaaggctgccgtgaactccgtcagcggcatcgtctccgctgccaagcgcgacggtttcgaatgggtgttgatcgacacgccgccgaacctgtcggccgtcgtcgacgacgcgatccgcaatgccacgatggtgatcattccggcgcgtcccggcgtgttcgacgtcaacgcggtgcaggaaaccatccagatgtgccgcgccgcgcgcaaaccctacgcggtcgtgctcaacggagctccggccaagcgtgacgacgccgaaagcccgatcgtcaccatcgcccgcgaggcgctggcgaaattccgtgcgccggtgtggggcggccagatcaccaatcgttccgacctgctgatggcgctgagccacggcgaaggcgcgcgcgagtatcaggccgagagccgtgcggcccaggagattgcaaggctgtgggcggcgatcgagcgttcggtgaaggctattcgcggcacggcgtcggcttccggcgcaatgcacaagcaggctgcttaagtttcattgttcatttccccggacgagaaacgcgcggacgagccgcgcgttttgcgtttctgctgacacgtcatcgccgggacggcgcgcaggcgccagcgcatcgctggggatttgatggcgctacgccaccatcagcatgtagaacacgatgaccggcgacaacgtgaggatcaccgaccagatgccggtggcccagagaatgtcctcggtggtgaagccctgctgtccggcgtcgtaatgcgacgccatttcattctgactattcacaaacgcctccgcgatttcttcgcttatggacgtccgtgttagcctcgatgttttaaaattccggatcgccgatcgcagcgcatttggagacagccgctaccacgggttaactattccggcgggcttcagccgacttgccagactcgaaacagcagcaccgggatcaggccgagcatcaccgcccagaacccgaacgacgacaccaccagaattccctgcaggagatcggccggcgcgaattgccgcgcagccgtaggctggatgcgatgcctcatggtcattccccctttggaaggctctcttcaaaacgataggggcgatcacgtaaacgagacgtggatgcgccatgcggtggacgcggacgccgttggggtgcggttaaccacgcggcacgctgcgccgtctctccccaccgtcattccgggctcgcggcttcgtcgcgccccggaatgacatgcgagcggcgtgagacaaccgctttacgccgcgaccttcgtccgccgctcgatctcgcggtcgatcgacgccgcgagctcgctgctcacctccaccatcggcaggcgcacttcggggctgtcgatcaggccgcatcgccacagccagtactttgccggggcagggctcggctcggcgaacaacagccgcgtcagctcggcgacctcctgccagcgcgcctgcgcggcgtcatggtcgccgcgcttcagctcggcatcgatggacgcgaacgtcgcggtctcgacatgcgccgagagcacgatgccgccgtcggcgccgtcacagagcgcctcgaaataattcgcgtcctcgccggtgaggacgcggaaatccttcggccggtcgcgcagaagcgcgatcgattgctcgcggctcgcgccgcaatccttcagcccgacgatgttcctgtgctcggccagccgcagcagcgtctggttggtgatgctgaccgcgcagcgatatgggatgttgtagagcgcgatcggccaggcggcgtgatcggcgagcgcctcgaaatgcgcaagcagcccgcgctgcgacggccgcacataataggggcttgcgatcaggtagccgtcgatcggccagtccgcggtctcgtcgaggcgctctttcagccgcgaagtatccgcccccgacagcccgaggcagaccggcaaggtgcggccgcttgccgccatctcctcgcgcacggtggcgactagacgttcgaactcggcctcgcgaagtgtcatgccctcgccggaggtcgcgccgaggatgaagccgtcgaccgcctgcgcgctgtagtgccgcgtcagccgccgcagcgatctttcgtcgagcgcgccgccctgaaacggcgtcaccagcggcagccaaagcccgtgcaaatgatcttcaagaccggtcatgttccatctccttctcgggaaaaatgcctgagacggagggcacatgaaaaaaccccgtccaggcggcggggttttcgggattgcagcgacgacgaagtcagcctagtgcgcgcaacattccgaggtccccgaatgggggccttttttcgaaacggatgcgcacgacttcgtgatcatgtccagatgatgctgggtatgcgtggaactgtcaatacacgcggagggcgaagcgacactttgacgaaaaaaagccggacccgaaggcccggcttaggtattggccacgtgaggccgacacaatcaccttccaagagggattactgaactcccgcgccactggaggagggggacaaatgcgcgacgcgaaggctcagcgtgtaaacattatgggcttgccgagtgccctgcagcaacagccgaggccgcatgtcagtcatgcggaaatcacgacggccagcgctgtgccttgctcaccacgaaatcgcggaacacctgcacgcgtgcgaccgtcttcaattcctcgggatagacaaagtaggtgtcgagctggatcgaatccgactcgccgaacagctgcacgagtttgctctgttcctcgaccagatagtccggcagcgcggcgatgccgaggccctgctgacacgcgcgcacgagaccgaggatgttgttcaccctgaaataggcctcgcgcggacccgagccattgcggcccgcttcaaccagccagttgcggttctgcagatgcggcgcgaagttgccgtcgctgagcgtgatgatgcgatgggagtcgagctcctcgagcgtccgcggcgtgccgaagcgcttgatgtattccggcgagcaataggcgtggaagcccatcgcgaacagcttgcgctggatcaggtccggctgcgtcggcttgcgggtgcggatcgcgacgtcggcctcgcgcatcgacagatcgagctcctcgtcggtgacgatcagcgagatgcggatctcgggatagagcccggtgaactcgccgagccgcgggatcagccagttgatgccgacgccaggcgtggtggtgatcttgaggtcaccgctcggccgctcgcggctgtcggtgagtttcgcgcgcgccgcctgcaactgcatgaacacgtcgtgcgcggtgcggaagagcaggtcgccctgctcggtgaggatcaggccgcgggcgtggcggtggaacagcgagaccgagagctcctgctccagcgccgagacctggcgcgacaccgcagattgcgacaggccgagctgctctcccgcatgcgtgaagctgcccgcctccgccgccgcgtgaaacaccttcagcttgtcccagtccatatccgtaaatccgtcgcgtgatcgaggcatgattctattccgctgccgcgcgctcgctggcgcgcagggccaagaaacgttcggcttcgagtgcggccatgcagccgaggccggcggccgtcacggcctggcgataagtctcgtcggcgacgtcgccggcggcgaacaggccgggcaccgaggtggcagtcgagttcggggcgacctcgacatagcccgacggtttgagcttgacctgatccttgacgagttcggtcgccggagcgtggccgatggcgatgaagacgccgtcggccttcacgtcagtcagcgcgccggtcttgacgttcttgagccggacatgggtgactttgttggggttctcagtgccgcagatctcgtcgacggccgagtcccagataaccttgatcttgggatgcttgaacagccgctcctgcaggatgcgctcggcgcggaaatggtcgcgacggtgcacgatggtgacctgcgaggcatggttggtcagataaagggcttcctcgaccgcggtgttgccgccgcccaccacgatgacttccttgccacgatagaagaagccgtcgcaggtggcgcaagccgatacgccgccaccctggaacttcgcctcggacggcagcccgagccagcgcgcttgcgcgccggtggcgaggatcacggcgtcggcgagatagacgtcgccgctgtcgcaggtgaggcggaacggtcgctgtgccgtctccagcctggtaacgaggtcggagacgatcctggtgccgacatggagtgcctgcttctccatctgctccatcagccaggggccctggatcacgtcggcgaagcctggatagttctcgacgtcggtggtgatggtgagctgaccgcccgtctggagaccctggatcaggaccggctcgagcatcgcacgcgccgcgtagatcgccgccgtatagccggcggggcccgagccgataatgacgacctttgcatgaacaggagcggacatttcgatggacgcctttcacgggggatttgcagcgcggacgcggaaagtgccgggaggcctagcgcaggcgctgaaatatcagagctaatctaagccttctggtgagctatgcaagaattgcattccctcacggcggatttttccaacacggaacaaaagtcgattgtgctgcgcgcgcaataaaattgcgcttagcgcgcggattgggctatgaggatttcgacaaatccacccgatacctccgcaaatgccaggagttccaatcacgtgtcgcggaacctagacgagatcgaccttaaaattctcgccgagattcaggctgacggtcgaatcacgaatgtcgagctggccaagcgcgtcggcatctcgccgccgccctgcctgcgccgcgtccgggcgctggaggaggagggctacatccacggctatcgcggcctcctggacgcccgcaagctgggcttcgacgtcaccgtgttcgccgccgtgcatctgtccagccaggcggaagctgatttgcgcgccttcgaggacttcgtccgcgccgagcccttggtgcgcgaatgctggatgctatcgggcgaggtcgatttcatcctgaaatgtgtcgcacccgacatggctaccttccaggatttcgtcacgcatctgacagcggcgccccacgtgcgcaacgtgcgcacgtcattggtgctgcacaattcgaagtacgaggcggccgtgccgctggaggtgaagcgacggcggtgatcgcgctccgctctcgtgctccggacgcagcgcagcacgcactggtgtgtcgctgagccggggccgatctcgccgtgtgtacttgcgttgcctctctggggccggctccgcgcagcaacgctacgcgttgcagcgtgttcgggacacgaaaacgtggacgctgatgtatcaacaccgctcgcagtgacgcgcggtgaaagcgtgcttcgtcacatgcatcaggcataccgaaacaaaaagcccgcgcaacgcgcggcctttttcaaaatgtcagcgctgcggccaatcctaccgccactccaccttggtgatctcatacgccttggcaccgccgggcgtgttgacctcgaccgaggcgcccttcttcttgccgatcagcgcgcgcgcgagcggcgaggtgatggagatgcggcccttcttggcgtcggcctcgacctcgccgacgatctgccacaccgtcttcttctcggtgtcctcgtcgaccagcgtcacggtggcgccgaacttgatggtgtctccggaaagcttggagatgtctatgatgtcggcgcgcgcaagcttgtcctcgagctcggcgatgcggccttcattatgggactgctcttctttcgcggcatgatactccgcgttctccgacaggtctccgtgcgagcgcgcctccgcgatatgctcgatgatccgcggacggtcctccgactgacgcctcttcaattcttccccgagcgcgacaaagccggcctgggtcatcggaaccttttccatcttttctctcgtccttcagctgcgcgcccccagaaaacgaagggcgcgacaaccttgattcgtcggtgctccccggggctgaacacgcacccaccgggatctcatgtgggtctggcgccggaacagaactaccacatggccggacagttcctctggccattgtgggttcattgccaattacttagcggaaacttcgctgccgccagcaatcaggtttccgaaaagtagctctgcagggtacgaacctcaaggtccccgcccagataggcgcggatgccctgcgcggccgccacggccccggaaagagtggtgtaatacggcactttatgcaagagggccgcgcgccgcagcgaacggctgtcggccagtgcctgcgggccttcggtggtgttgaagacgagctggacgtcgccattggtaatggcatcgacgatgtgcggccgcccttccagcaccttgttcaccttctcggtcgggatgccctggtcggtcaggaagcgctgagtgcccgaggtcgccagcaccttgaagccgagcgaatgcaattcgcgaactgcctcggcaatgcgcgtcttgtcgctttcgcgcaccgagacgaacaccgtgcccttgcgcgggacccgcgtgccgccgccgagctggctcttggcgaaggccaccgcgaacgagcggtcgatgcccatgacctcgccggtcgagcgcatctcgggcccaagcaccgtgtcgaccccggggaagcgcgcgaacggaaacaccgattccttgacgccgacgtgattgagcttcgccttcttcagcttgaagtcggcgagcttctcgcccgccatgatgcgcgcggcgatcttggcgactggcgtaccgatcaccttggcaacgaacggcacggtgcgcgaagcgcgcggattgacctcgagcacgtagatctcgccgtctttgatggcgtattgcacgttcatcaagccgacgacgtcgaggccgagtgcgagctcgcgggtctgccgctccagctcctcgatcatgtcaggctcgagcgagtgcggcggcagcgagcaggcgctgtcgccggaatggatgccggcttcctcgatgtgctccatgatgccgacgatgaaggtatccttgccgtcgcagaggcagtcgacgtcgatctcggtcgcgtctgacagataacggtcgaacagcagcgggttcttgccaagcacggtgttgatctgccccgtcttgtcgttcggatagcgcgccttgacgtcggccggcaccagctccggcagcgtgccgagcagatagtcgttgagctggttctcctcgcggatgatctgcatggcgcggccgccgagcacgtaggatgggcgcaccaccagcggcaggccgagatcggctgaaaccagccgtgcctgttcgaccgaataagcaatgccgttcttcggctgcttgaggcggagcttgtcgagcacgcgcttgaatcggtcgcggtcctcggcaagatcgatggcatccggcgatgtgccgaggatcggcacttcagcggcttccagcgcgcgtgccagcttcagcggcgtctggccgccaaactgcacgatcacgccgtgcagcgtgcccttgctgcgctccttggcgatgatctccagcacgtcctcagcggtgagcggctcgaaatagagccggtcggcggtgtcgtagtcggtcgacaccgtctccggattgcagttcaccatgatcgattcgtagcccgcgtcgtgcagtgcaaagcaggcgtgacagcagcaatagtcgaactcgatgccctggccgatgcggttcggtccgccgccgagaatgatgaccttcttcttgtccgacggggtgctttcgtccgccagcgcacccgcgaacggcgcttcgtaagtcgaatacatgtaggcggtcggcgaggcgaactcggccgcgcaggtgtcgatgcgcttgtagaccgggcgaacgccgagcgcgtggcgcttcgccgtcacctcggcttccgtggtctcggcgagcactgcgagtcgcgcgtcggaaaaacccatggccttgagcgtgcgcatcccgaaggcgttgttgggcaggcccttcttcctgaccttctcctccatgtccacgatgccgcgcatctcgccgaggaaccacggatcgatcttgcaggacttgaagatgtcctcgttcgaccagccgagccgcatggcctgggcgacctggagaatgcggttcggcgtcggcgtgccgagcgcggcgcggatcgcgttcttgtcgtcgtcgcgaccgaggccctcgatctcgatctcgtcgaggccggtcaatccggtttcgagcccgcgcagcgccttctgcaggctctcctggaaggtacggccgatcgccatgacttcgccgaccgacttcatcgacgtggtcagcgtggtcgaggcgcccgggaatttctcgaaggcaaaacgcggcaccttggtgacgacgtagtcgatggtcggctcgaacgaggcaggcgtggcgccgcccgtgatgtcgttggcgatctcgtccagggtgtagccgacggcgagcttggcggcgaccttggcgatcggaaagccggtggccttcgaggccagcgccgaggagcgcgacacgcgcggattcatctcgatgacgaccatgcggccgtcctcgggattgacgccgaactgcacgttggagccgccggtctcgacgccgatctcgcgcaacaccgccagcgaggcgtcgcgcatgatctggtattccttgtccgtcagcgtcagcgccggcgccaccgtgatggaatcgcccgtgtgcacgcccatcgggtcgaggttctcgattgaacagacgatgatgcaattgtcgttcttgtcgcgcaccacctccatctcgtactctttccagccgagcacggattcttcgatcagcacttcgttggtgggagatgcatcgagcccgcgctcgatgatgtcgaggaattcctccttgttgtaggcgatgccgccgccggtgccgcccatcgtgaaggaggggcggatgatcgcgggcaggccgatctcggacagcgccatcatcgcctgtccgagtgcatattcctggtagcgtttgcggcgctcgctctcgcccagcacccattgccggtcgagctcttcgagctcggcgcccgaagcttttgcgcgcgcggcctgatacttgtcgcggaacgacttcttcagctcggaggcattggcgagccgcgatttcggcgtctcgagcccgattttggtcatggcctcgcggaacagctggcggtcctccgccttgtcgatcgcatcagcggtcgcgccgatcatctcgacgtcgaacttttccagagtaccctgtctgcgcagcgacagcgcgcagttcagcgcggtctgaccgcccatggtcggcagcaacgcgaagccgccgggaatgacgtgacgttccttctcgatgatcttggcgacgatctcgggcgtgatcggctcgatataggtcgcatcggccaattcgggatcggtcatgatggtggccgggttcgaattgacgaggacgatgcgatagccctcttccttcagcgtcttcaccgcctgcgtgcccgaataatcgaactcgcaggcctggccgatcacgatgggaccggcgccgatgatcaggatggtcgagatgtcggttcgtttgggcatcaccgctcacgggctgggatctgggcacaaaaaaagggcgcgcttgccgcgcgtccccatttggcgagagcgcggggtctccctcgcgcgcggggtgggtcttaaaccagtttttggagcggcgaaaccccgaaaaacgcccatcaaccggcaattttcaggggtttgggcaatctgccgagcgtgcccggcttcgccctccggcttcgtcgcggcagccttcttcaggtcaggcttgccgagccgaagctggcgaagccagcgaaggctggagacccggcctggatttgaaccaggatgaagagcgatgcaccgcccccgcgtagacatttccgccaccgggccatcaggattattcccgatcagcgtgcgccaagccacctcagctgatcgttatgcttaacggaccagaggcggccgcgcgatgaaggtcatgcgccagcgattatggccgatgttgctgtgggcgcgctgggtcgcgaagcctgctgctttcagcttggcggtgatctcgtcctcgctgtagcgttgcagcccgatcttcgagcgcaactgccggtaatccgacagcgcggtgctgatcagcccgatcagcgcatccttcaggaaaccgtggcgcaggccgaagccgagcagcgccgcgacgtccctgaccatgccgacattgggctggaggatgtcgccgaggaccagcttgcccgagggcttcaggatgcggcgaatgttcagcagcgcggcatcgagttcggccggcgtcatgtattgcgcgaccgagttcatcacgacgaggtcgatcgactggtccggcatcttgcggacgtcgtcgagcgagcggacgcggatcttggtgttcggggcgaaccgcgctatcagccgcccgcgcacgcccggcgcgggctctgccaggatcagctggccgcaggcggctgccacctggctcgccgagagcgcttccccgcaggcatagtccagcacgaccgcctcgggcgaggggatatagccgatgatgtcccgcgcaatgatctggaaatgcaagtcgcgatgcagcttgctgacatagatcgtatgcgtggagtcgtaataatcgatccaatcgtccatggtatcccgtccggcggttcctatctaggaaccgtgctgtccgcctttgcgttaggggtgcgacgctgcgccgtcaatctcccgcgtcctaacaggaaggtttcccgtgagcaaaaccagcaacaagatctcgcccgatctcgatacccccaccgatctgtcgtccgacggtgccaaaaaggtttcggaggcgctcaacgtgcttctggccgacgcgttcgcgctgtatctgaagaccaagaatttccactggcacgtcagcggccggcatttccgcgattaccatctgctgctggacgagcagtccgaccagatcttcgccaccaccgacgagcttgccgagcgcgtccgcaagatcggcggcaccacgctgaagtcgatcggccagatcgcaaagctccagaccatcaaggacaacaacgaggactacgtcccgccgcgcgagatgctgcgcgaactgatgcaggacaacaagcagatggcagcggcgatgcgcaaagcgcatgatgtctgcgacgaagccggcgatatcgcgagcgccagcatcctcgagaacttcatcgacgagaccgagcgccgcacctggttcctgttc

SEQ ID NO: 183 - DNA, 39330 bp, Bradyrhizobium colbertium
ccccgccgcgagccgaccgcccgtccttcaacgtcgatgaccagggcgagaccccgcgcccgccgcgcgctccccgtttcgacgccccgcgccagccgggccccacggccccgccgccgacacctgagccgccggccggccgcgatcgcgcgggcgggcgccgtccgcccgatgtcggacctgccccgccgctgccgccggcaccgggcgtgcgcggcttccgcgacatcacggccgacgccaatgatctcggcggtgctgccgcgcaggcgagccgcgccgcgcgccgcacctatgccaacgtcccctcgccctcgccggaattcgaccggctggagccgagcctggaaagccgcgccggcgagtccgaggcgccctattcctacgacgaatcgatcgaggaagccgagcgctacgcgccgcagccgccctcgccccgtgcgcgcgtcgcccccgagcgcgacgtcaagaagcgcgtccgcaccagctcggcgttcccgttcaagagcgcgattgccgtcggcatcgtgctgatcctggtcggggccggcatcctctggggcaggcagctggtccaggtcgtcaacggcttcttcaagccatccgcaacgcaggtggtggaggcgccgactccggcgcagccgcagagcaagccgaagatccccgatcgcgtcggccagccttcggcggatcagccggtcgcgcccgtggcgcagaaggtcgtgctctacgacgaggatccgtccgacccgaagggcaagcaatatgtcggctcggtggtgtggcggctcgagccgatcaaggcgtccggcaaccagaagcccgacgtcgccgtgcgcgccgacatcgagatccccgaccgcaagttcaagatgaccatgtcgttccgccgcaacaccgattcctcgctgccggcgagccacaccgcggagctgaccttcatcctgccgccggattttcctggcggcagcgtctccaacgtgccgggcattctgatgaagtcgaacgagcaggcgcgcggcacgccgctcgcaggcctcgcggtcaaggtcaccgacggcttcttcctggtcggcctctccaatgtcgacgccgaccgcgcccgcaacatccagctcctgaaggagcgctcctggttcgacgtgccgctggtctactccaaccagcgccgcgccatcatcgccatcgagaagggcgctcccggcgaacgcgccttcaacgacgcgttcgcgcagtggggcgattgagttaggcggccgccacttccgtcatcccgcggcatgcgaagcacgagctatgatgcgcaattgcgcatctgagaagccatcgtgcagcgcgtgacgtcgagacatggattccgggttcggtgctgcgcaccgccccggaatgacaccccatacggtcactaccgcgccgaagcttcccgcttgcgggatgccgcggcggctgcgtgctcgcggtccatcacggcgcggcagccggggctgacctgcgacttgttccgcaccatgcaggcggtgattcgcggaatatccggaatttcactggagcacagccgcatcgcatcgcccgagcacatctgctgtgcttcggacgtgaaggcgaggccgggtgaggtctggagtgccaggctggtgacggcgaaagcgaagagcgaagcgatcgtctgattgcgtgtcatgcgagattggtccccgagtttccgcgggcttgagccgcttggtttcttggggcgccgcacgcggcttgatctgccgcatgtcacagcctccacgccgggaacttggtcccgcatgtggtcgctcgatttctttgatgttgttcgaatcgaaagtgctgcgccgcccgagcgaagtatgcgccattggcgcgcacctgcaatggtcggcgcaaaggaattcgcaattgttgcgcgcgagtcacgtcgcgggcggtcagatcagtcggtcggaggatgcgttcgcttgttccgcatcgctcatgccgagagcggcgtgctcctcgacggcggtgacgcccttggccgtgagctcgaacagatcgccgtccttcatgacgtagccgtcggcgatcaattgccccatcttgccttgccgatcgtccgcaaacgcaatggattggctgatgtcccgcaggattgagagttcttcgtcgtgcaacatggcttcactctccattcgcggggcggggtccgatcctcacatgccgtggctctgaaacaccttgctgcacgacttcgacaacttggcccgattggcttgcaggcagccttgcaccgccaggtcgttgccgaggttcttgcggcagaaacgttgcgcgtcgcgcgagcaggccttctgctcctgcggcgtgcccatgtggccttgagcgaaagcaggcgcgtcggacaggccaagggctgccagcgcgatcgtcgccaggagaagtttgcgggccatcagggctccagtctgccagggttaaattcaggtccagcatgaactcgtcgccttgccacttgttcccctgatgcggacgcctggtgccccgctgttcaaggttccctccgcgctgctataacgctggcaaagggtgaggtgcttgatgaaacgctatctggtgtttgcgctggtcggcccgttcgtcggcgggttcctgctgctgctgacgaccacctaccagtccggctattggacccagaccaatcttggcgaggtcggcaaactgttcgccgtgttcttcaagaccctgcaatacagctacctgttcgggttcctgcccgcgctgatgatcggcgcaatcgatgacatcctgatccacatccgccggatcggcccggttttgcggatgctcctggtcggcctgttcgccttcgctctggcctcgttcacctacagctcgcgcgggccggattcgggcgcggtgcagttcatcctgtatgggctcgtcggcttcgtgccggcagtgatctcatcctggctcgtgcatcgttatgtcgaggagccggaagccgcggcggcgccgacctgagcgcgaccttcgggcgcggcgcggcaacctccgtcgcggcggcgcgttgtgtggaggccatgaccatgtccgacgacgacatccttgcgccgcgccgagctccttcggggagcagttcgcgtacgacctccttcggcaaggaggcgcgcgggccgatcatcgatcaggaggggcacgaaatcaggcccgaaacgctggagcagggatttcgcgagtttcggttcgagttcgggcaaggcaatccgttcggcaatctgacgcgcgagcagcggatcgcgcggctcgaggccatcgccaagctgctcgacgtcgccttcatcctgcccggcaccaacatccgctacggcatcgacgggctgatcgggctgatccccgtcgtcggcgacatcatcacgactgcgatctcgctatggcttgtgcgcgaggctcgcgcgctgggcgcgccctggcacatcacggcgcgcatgctcggcaatgtcgcgctcgatggcgcggtcggcctgatcccattcgccggcgacgccttcgacgtgatgttccgagccaacatgcgcaacgtgcgcctcctccagcgctggctggagaagcagccgcggatgtaggccgcttcccgcatatccatccggtcgacaatgcgccggatgtctccggcgggagaggagcctcgacacacaaaaggcacgacgacctttcggccatcgcgccttctgcgcacatcgaactgttttgcgaaaagcctatgccgcgtcggcgtcggtctcagcggccggggccggcttgggccgacggggcagcgggaaggcatcgctttcgtacagcgagcggatgccgttctggtcgaagcgtgcttcctcgacctggagataggcgccgttcagcgaatccgtcggcaactgctccatcgcgaactgcacggcctcggctgcggtgccgaaccggcgataggtgaagccggcgcgcttcttcttgcgaatcgcggcggggaagagttcggcggaggtgttgaagttgaacggacgcagtggacgcatggtcaaagacctcgtgatcttctctggggctttaagcgcgtggggttggggagggcagaggccgcaatcaagcgggcccgccgcatgtcattttcgtcctctaatataggccgttttgacagaaatgcgacccctgcgatgcgagatgatgaatccgcgcatggcagctctacgggtgatataaatccagcaatatcaacgacttattgcatcataacttgccaagaagcagcagcacgatcagcacgaccagcaccaccccgccgatccccatgccggaatggcccaggccatagccgtagccgccgaaccggccggagagcccgccgatcagatagatgatgaccaggatgatcaggatggtcccaagcgtcatggcatcctccctggcagccgccgaaacgtgaggatcggccgctccgccagaagagaaaagcacatcgcgggatcgggttccacgtcggaacccgatcccgcgccgctcatttcggctccagcttcagcgctgccgagttgatgcagtagcgcaggccggtcggcccgggcccgtcggggaagacatggccgagatggccgctgcacttggagcagagcacctcggtgcggatcatgccgtggctcgtatcccgctcctcgtcgatatggctctcgaccgccggctgggtgaagctcggccaaccgcagccggagtcgaacttggcgtcggattcaaacagcacattgccgcagccggcgcacacataagtgccggcacggtgctcgtgctcatactcgccggagaacggccgctcggtcgccttctcgcgcagcacggcgtactgcatcggcgtcagttcgcgccgccactgctcctcgctcttgatgactttgtcatccgtgatcttcgtcttggtgtcgggcatggatctcccgttgctttggtgatctttcgatcagttggtggccttgccggcattcaccagcgtcggcttctcgatatagttatccgcgaacagctttttcaggttctcgaccttcgggatgtcgttataggcaatgtagggctggttcgggtgcagcgtcagataatcctggtggtaagcctccgccgggtagaacgcctccagcgcaccgaccttggtcacgatcggcttcttgaagaccttcgcgccgttgagctgggcgatataggcctccgctaccttcttctgttcgtcggatgacacgaagatggccgagcgatattgcgggccgacatcggggccctgccgattgagctgggtcgggtcgtgcaccacggagaagtagatctggaggatcttgccgtaggagatcttcttcgggtcatacttgatctcgaccgcctcggcatggccggtgcggccgctcgatacgctctggtagtcggcggtcgccttggtgccgccggcatagccggagattgcgttgaggacgcccgcggtgtgctggaagacgccctgcacgccccagaagcagccgccggcgagcacggcggtctggatgccgctcgcaggcgccgcgtccattgcgggaggagggatcacgaccgcctcctccgcggcgcgtgacggcacggcaagggccagcgtcagggcggtggttgcggcgagcaggaaggcgagggcgggtcggcgcatggcggatcctctggcaagggtgggcagtctaaggcgagccggcccgggcgaatagcctcgccggcgtcggtcgttgccgaagatacgactgtcccgccccgctgttacaggcggccggacacgagtccgtgagggcgcccgccgggccgggggtcccgctcacagcagcgtattgaaccagtcgaacgccgtcggagatccgttcaggacggtactttcgccatagaggctcgccaggaacgtgccgcggtggctcgcgcccttgaccggaacgccgtcggcgaagtgcccgccggcgacgatggccggctgcaccaggcgcggcggcaaggcctcgtcggccattccgtagtagaacttgatcggggaatcgtagtcccagaacgtcgtgccgttgtcgcccagccggcgcatgaacttgctgttcgtgtcgttggtgaaacgatcgaagaagccgtcggtcaggaaatcgcccgcaggaggaatgctcttcgcgatctctccatcgaggctgtaatcggtccagtacttttccgcgaaggcccgatattgcggcttgatcgccgtcttgaacaaatcgttcagcccgtaatagcgccgatagctgccgagcaggacgatgatgcaaggcgtgatccaggccggcggcatcggatacgagctttccgaggccggaatataggcggcggggttcgaccaatagtggaagctctcggcgagattgttgaacggactctcagccgcggccgcccgcaccttgatgtctcggcgctgcatctcttgtttgagccactgcgtgttcagcgcgccttgcgaccacccgttcaggaacagggaggattggcgcaggcccagcgtccgcagttcgcgctgcccggcgctcagaacgtcgaggcagcattgcacggtcgcgcccttcaccgcgtaggcttcgctccggccgcggcgataggggcccttgccgacatagtcggccgcgacgaccgcatagccgttgccggcgaagcgctggatgttgaacagggtctcgatcgagtcgacattgtcgcgcagctcatatttctggtcgtccaggcgcagaagattcgaggggacctcgtcgaacgacaggatcgtgccgtgctgccacgacaccagcggcaaggcgccgcgcgcgccggccggcacggcaagcaggccgctgacctcaacgcgttctcccgtctcggggatgcgcgtgaaagtgacgatgcgcctcagctcgacgtcgttgcgcgcggcgaatttgtccgggaagggcgccggcagaatattgccctcgttgaagacggcatagaacgtcgcggccagcttatcgagccgttccttcgagacgcgcaccggcccgctcgggttcgtacgcgtcgccggcgccgcaagagcggttcccggaatcgcggtcgacagtgcgagggagcctgctgccacactcgcggacttcaggaagctccgtcggctcagtgtacaatcggatcgggtaacgagttcatgagatcttgttgcgcgtgcagtcataacgttccgctccgatgcagatcgcaagctgatacactgaaaagcctagcgcgcggtgaatgtacctcggcgcggctgccctttgcgggcgggttcgcagtcagtatgagcgcagcgacaggcgggtcctttcttccgggatgtcgctacgctcatccgggttgcagcatcacaccaccacgctcagccgcttcgcggcgcgcgtgatgccggtatagagccaccttgccctggactcctggaacgcaaagctctcgtcgaacagcacgacatcgtcccattgcgagccctgcgacttgtgcacggtcagcacgtagccgtaatcgaactcgtcatagggcttgcgttgctcccacgcgatctgctcgatgccgccctcgaagcaatccgcgcgaaccgagaccttcgtgaccttgtgaccgaaatcctcgtccggcatcagccgcatgctgaggatgcgtgacttcgatcgcgatgtgttgcgcgacttcacgcgccacaggccgccgttgaacaggcccttcttgcgattgttgcgcaggcacaccagcttgtcgccggcgactggaaactggtcctcgatgttctggcgctgacgcacccgcatgttgtaggcgcgcctcgtgttgttgcgaccgaccaggatctggtcggcgcccatcacgcggtcgggatcgagctccttccgcgacaccacctcgctctcgccgtagcggccgatgtcgagctcgcgaccttccctgacgtccatcgacatccgcacgatcggatcgtcctgggcctgacgatgcacctcggtcagcatcgcatccggctccgaattggtgaagaagccgccgccctggatcggcggcagctgcgcgggatcgcccagcaccaagagagggcagtcgaacgacatcaagtcgcgccccaattcggcatcgaccatcgagcattcgtcgatgacgatcagcttggccttggaggccggcgcatcgtcccacagctcgaagctcggctgctcctcgccggattcgcgggcgcggtagatcagcgagtggatggtggacgcgtcgtcgcaacccttgttgcgcatgacgagtgcggccttgccggtgaaggcggcgaacttcacctcgccatcgacgccctcggcgatgtgccgcgccagcgtggtcttgccggtgccggcaaagccgaacaggcggaacaccggcggcgtgccgccccggccgggcttggccttgagccagtcgccaacggccttgagcgcggcgtcctgatgcggggtgaaggtgggcatgtccgtcttgagaaggaaccggcgattcgccgcttcgcggaagctaaccattgcggccagccgttcaagcggcgttcaggccgtcctgcccgtccccggctatttgtcgatccggtcgtgcagctgccagaatcgcagtgtgcgctcggccgtcgcgggggacagcttggcgaaatccgtgcccgcgagcttcagggtggcctcgtcgatgcggtacttggctggacgattgcagaggattctttcgaccgtcggccagccgaggcctgccgatttgcacgggatcagcacgagatcggcacgcggcccttccagaaccttcgccatcagctcggttggcgcgctgttgttgagaagcccgagcgcggcggcaacctcgtcgaatctcctggtttccgcgaaccgggcgatggcggcatcgttgagttcgttgaggcccttcatccgcttgacggccgcttcagccaggctgaaatcccgcttcggctctggcggggccgccttgctggtgatcgcggcgaggatgcgcttgatctcggcctggagctccggcggggcaatggtcgcaaggcgcgcgcgcacggcttcggtcgcgcgctgcagcaggtcgcgaagatatttgatgggaagatcgatgcgcaggccgagcgattcggcgagcgtttcgtcggcttccgcgtgcgcgatcatgccgccatagccgtcctcggaaaagcgggcggtcgtgttgacggcaaggcggcggatgaccttgcgctcgccgcgctcgaccaggacgtcggtgacgacctccggcaggtcggcgcggccggaaatggcgaacaggtgatcctgtcccttggctttcgcgatctcgaccagcgtcggggtgctcaggcgattggactcggtcagcaccttgcccgcgacggcgatctcgtcgtcccaggcgaggcgttcgagcacgccggcaggtgcataatccagcggcgccagacgatcgccaagctcggccctgacacgactttccacccgcgtcaccagatgcgagagcacatgatcgaagacctcgacctgatcgtcgctgaggcgctgcccctggtcgagaaacaggtctgtcacccgtcgcaacgtctcgatccgtttggccgaggagccgttacggaccgcatcttcgagctcgtcgatgatggaattcgtctgctgcatcatgcttttctggccatcgcagtaggactgggacggcttacgccgcgcctgacatgatcggtcctgcgatttaagcccggcataacgcggcggtataatgaaactgccgaggggaactttcgctatcagaattcggcatgtctgacgttgtccgcccgccgcgcccggcgagcggtgcgcctggagcggagcttactgccagccgggaacgccgcgcatgtcgggcagctggtgggcgatgcccttgtggcagtcgatgcaggtcttttccttggtgaacaggaagcgctggtgcgccaccgaagcccgcggcgattgcttggtgacgtccatggaatcggcgctgtggcagttgcggcattccagcgaatcgttggccttgaagcgcgcccattcatgtgcggcgagctcgagccggtgatcctggaatttctcgcgcgtgtcgatcgtgccgaagatcttgccccagacctccttcgaggcctgcatcttgcgtgcgatcttgtcggtccagttgtgcggcacgtggcagtccggacaggtcgcgcgcacgccggagcggttggtgaagtggacggtcgacttcagctccgcgtagacgttgtccttcatctcgtggcagccggtgcagaacttctcggtgttggtgagctccagcgcggtgttgaagccgccccagaagatcacgccggcgacgaaaccggccagcaccagggtgccgagcgcgaacaccgagctcggccgggtcagcacccgccagagctcgagcgcaaagtcccggcttcgcgccaggaaactgcgccttgcgttcagcccggcattgggatcgtcagcggtcgtcgtcatcgccggccacctggggtggcgcgcgacagcagcgtgtcgatgtcgatgaagtcgttgctgacgggcggagtggcggtgctctgcggcacgtggcactcggtgcaaaagaaacgtcgcggcgagaccgacgccaggaactggccgtcgcggtccatgaagtgcgtgatcgaaaccatcggcgcctgcgattccgcggtgcgcgcccgcgcatggcaggacaggcatttgttgccgttgagatcgacctggtagccgtcgatcgtgtgcgggatgacaggcggctgctccggatagttgcggacctccttctcggaggtgttgcggttcggcagcatcggcggcgccgggccctcgtcgttgagcggggtcgggccgcgcaggccggacgtcacggtctgcgccgtcagcgaactcgtgcccgctgcgatcgcgaaggcgagcaggatgattgcggatcgtttcatcatgacatgttcacccgctcgatgcgcacggcgcatttcttgaagtcggtttgcagcgagatcgggtcggtggcgtcgagcgtcaccttgttgatcagcttggattcgtcgaaccacggcacgaacacgaggccacgcggcggccggtcgcggccgcgggtttcgacgcgggcgcggatgaagccgcggcgggagacgacctttacttcatccccgcggcggagcttggcctcctgggcatcgtcgggatgcatgaagcagacggcttcggggaatgccttgtagagctcgggcacgcggcgcgtcattgtgccggaatgccagtgctccagcacacggccggtggagagccagtagggatattccttgtcgggcgattccgccggaggctcgtagggcagcgcgaagatacgggccttgccgtcggcgtggccatagaactgcacctcggtgccctgcttgacatagggatcgctgccctcgcgaaagcgccacttcgtctcctggccgttgacgacgggccagcgcaggccgcgctcgcggtggtaggtgtcgaacggcgcgaggtcgtggccgtggccgcgcccgaactgggcatattcctcgaacaggcccttgtggacatagaagccgaacgccttggactcgtcgttggcgtagccgggctcgatgtcgctaacggggaatttgtcgacctgcccgttcctgaagagcacgtcgaacagcgtcttgccgcgatattccggcttcttggcgatcagctcctccggccagacctccgcgatcttgaagcgcttggagaattccatgagctgccagagatccgacttcgattcgcccggggcggagacgagctggtgccagaactgggtgcgccgctcggcattgccgtaggctccctccttctccacccacatcgcggtgggcaggatcaggtcggccgcaagcgcggtcaccgacggataggcatccgagaccacgataaaattgtcggggttgcggaagcccggataggtctcttcgttgatgttggggccggcctgaaggttgttgttgacctgcacccaataggcgttgatcaggccgtccttcagcatccggctttgcagcacggcgtgggcgccgttcttgtcgggaatggtgccctcgggcagctgccagatgtgctcggcgtgatcgcggtgcgccttgttggtcacgaccatgtcggcgggcaggcggtgcgggaaggtgccgacctcgcgcgcggtgccgcaggccgacggttgaccggtcagcgagaacgggctgtttccgggcgcggagatctttccggtcaacagatggatgttgtagacgaggttgttgcaccagacgccgcgcgtatgctggttgaagcccatggtccagaacgagaccacttttgtcttgggatcggcgtagagctcggcgagtgccgtgaggcggttgagcggcacgccagacatttcggcggccttctccagcgtgtactcggacacgaacttgacgaactcgtcatagctcatgtcggtagcgtcgttgggcttcgccgcacccgtcgccttcttctgcagcggatgctcgggccgcaggccgtaaccgatatcggtctggccgcgcttgaacacggtatgcttggcgacgaagtccttgttgacccggccggtcttgatgatgtgattggcgatggcgttgaggatgtagaggtcggtctgcggcttgaacaccatgccgatgtcggcgaggtcgaacgagcggtgctcgaaggtggagagcacggcgacgcggacatgcggagcggacagccggcggtcggtcaggcgcgtccacagaatggggtgcatctccgccatgttggagccccacagcacgaacgcgtcggtggcctcgatgtcgtcatagcaaccgggcggttcgtcgatgccgaaggtgcgcatcatgccggccactgcggaggccatgcagtgccgcgcattcggatcgatgttgttggtgcggaagccggccttgaacagcttcgatgccgcgtagccttcccagatcgtccactgcccggagccgaacatggcgacgccgttcgggccgcgcttcttgatcgcctccttccatttctgttccatgatgtcgaaggcttcggtccagctcacaggcgtgaactcgccgttcttgtcgtacttgccgttcgtcttgcgcagcatcggctgggtcaggcggtcgtggccgtacatgatcttggagaggaagtagcccttgacgcagttcaggccgcggttcacctcggccttggtgtcgccgtgcgtggcgacgacacggttatccttggtggcgaccatcacggagcagccggtgccgcagaagcggcaggcggccttgtcccatttcatttcgcttgcgttgcgctcggcaacgaggttggcggcgagcgccggagccggcatgcctgcggcggccgcggcgatcgcggcggcctcgagcttcagcatctggcggcggtcgagctttggcgatgtcatgatggctcttcctgactcaggcggtttcgatggcgtggaaaaccagcaccgcggaatagacgtgttgcagcgactggatggtgttgagcaatgtgccgaggctgccggagtcgggcgcttcggtgacgatgacgagcttgccgcgggggtcccgcccatggatctcgcacccgggcagcgccgtgatctcggcttcgacatcggcgagccgctcgggccgcgcctgcacgatgatgctggtgatctcggcgcctggcggcgcgatgacgcggtcggcgctgagcacccggccggtgatcagggcgcggcgattgagcgtggcgtgagccatgatgcctgtctttcgctggttggggatcaacgaggggagggcggcgggcccggagggccggccatcatctggtagatccagacgccaaggccgtaagtgccgacggttccaaccgcgagcacaggcatcacgatcgcggtcaggaacaggaaggcgaaaatctccatgcgcttacggcgcacgcgcgacatcgcgtcgtcaggggccgacatattcggtctcacagataaggatgttggggagtggacggcatccgggccgttgccttgctgcagtttagatgctgtctaaccgacagcgcgttgatttggatcaatcgtcagtcggctgcgtcttcctgcgccgaaggatggatcgtctcccatggggcggaattgcgaatgcgtagacagcaccgcttcacgcattaagatgccgtcaacaacaataagcgggagagcgacgccatgaagttcggcattttctatgaactgcaattgccacggccctgggtggcgggcgatgagctccggctctaccagaacgcgctctcgcagatggagcttgccgacaagctcggctatgaccatgcctgggtggtcgagcatcacttcctcgaagaatattcgcactcgccctcgccggagtctttcctggcggcggccagccagcgcaccaggaacatcaggctcggccacggtatccttcagctcaccaccaaccatccggcgcgcgtcgccgagcgcgtcgcggtgctcgatctgctctcgaacggccgctgcgagttcggcatgggcgagagcgcgtccatcacggagctggagcctttcggccgcgacatggagaccaagaaggaggtgttcgaggaggccgtagctgcgatcttcccgatgttcaaggatgccggcagcgagcatcacggcaagtatttcgacatccccttgcgcaacgtcgtgccgaagccggtgcagaagccgcatccgccgctgtggatggcctgctcgcagctgccgaccatcgaacgcgccggccgccacggcttcggcgcgctcggcttccagttcgtcagcgccgacgccgcgcacgcctgggtgcacgcttactacaatgcgatgaccaagcggctgcacaagctcgccgattacgagatcaatccgaacatggcgctggtctcgttcttcatgtgcgccaagacggacgaggaggcgcgcgcccgcgccgacggcgccaccttcttccagttcgcgctccgcttctacggcgccgcgcagaaccgccagcgtcccgcaccctacaccgtcaacatgtgggacgagtacaacaagtggaagcgcgacaatccggaggcgcaggaggcggccttgcgcggcggcctgatcggctcgcccgagaccatccgcaggaagctgaagcgcttccagtcttcgcatatcgaccaggtcatcctgctcaaccaggccggcaagaacagccacgagcacatctgtgaatcgctcgagctgttcggccgcgaggtgatgcccgagttccagaacgatcccgcccaggccgaatggaaacgaggcgtgatgagcggcgagatccagctcgaagagatcgacacgcaggccttcaccgaccgctacggcaggctcgcgatcaacgtggcccgcgcggggtagaagcacccatagcccttgtttccgagccggcgcgcgcgaactcagcgacgcgacatgcttttgtttgatctaacgcaacgcaagttcgcgaggccggccgcacaaatgcgttcggctggcacgtcgatggtcgtgcccttggagggagccatctcgtgcacaaaggcttcatgctcattctggcgagcatcttgattgatgtgctgcccgtttcccatgcggcggcggtcgaaatggagccgggcctctggcagctcacgaccaggatcgagcgcgacggcgtcgggacgacgcggccgcggtccggaagatgcgtcaccgcggaccaggcgcgtgccgcgcgcacagcgtccgctctcgatatcggcaccggcttcaagacggctttgggatcgtcgcccagccaggagagctgcaagctttccgatgcgaagaacgacaagaacctgatgacgtggcggctgctgtgcactggcggcaccagcgccgagagagagttcaccgcccgcttcgacaatccccggcattacgtgacggtcaccacgacgcgtgtcaccaccggcagcaagaccgtcacgatcgtgacgaccaccgaggctcaacacaagggcgagtgtccgcgatgagcgccatgaatcgtgctgtcctggcttgccgcttgcgatcgctgcccggtgtgggccggcgcctccggacttggatgctcccgatcctgttcgccttgacggtgctgctgtccgcatcgccggtccgcgccggctgcaatttcgaagatatggtggccgccttcaagcaggcggtggcgacgacgatcgagtgcgagcccgtctgcaagaaccagtacgaatgctacgcggtcgccgtgctggccgccgcgctcaccttcgacgtcaagcagggcgtggacgtcagcccgatttgcgtcgacatacccgccaaggtcgaggacctcatggccaagctcgcgccgttcctgtcgcaacaggacatggccgatctgtcccaatacgccagctatatttcggacgctttgcagttcgtgcgctgcgcgtgcaagaccaaggacctcaacattgccaacgagtccagcttcgggcagtgcgtcaatgacgtggcggaagccgtcggatgcgagccgatcgtgatcgcgggtttcacggttcactacgactgcttgccgggcaaccccgccgcgagggcgtttgacgcgatcgaggcttggacctgcaagcatctttcactcggttgcgaggacagcgattacgtcgaggcgaactacaattactcctgtccctctgggcaacagtccgacaggaacggcaattgcgtgccttgcgagagcatcgccaatgcgacggtcggcaacaacggggaatgcgcctgcaagtcgggctattcagaggatgccttctggctctatctccccggctattccgatgccaagatgaaggtcttggagtcctgcacattctcgtgcaacgcgccgttcgtctattccggcggcttctgtcaatgcccgttcggcacgcaatcggactatgccggaggctgcaaagcctgcggcgccaccgagagatacgtgcccttcaaggtgcagggcggcgttctgacggagggacggtgcgaggcctgtccactctgtacccagccaagcgcgaacaagctcacctgcaacccaccctgcaacaacgcggcaggtgagatcttcgagaagggcaaatgcgttgcctgcccgtccaacagcaagtcggtctatttctccggcagctgcggtcagtgcgaggcctgcgcgttcggtcagaaggtgtccgccgatcacaagtcctgcattccggcctgcgcaccggggcagatcatgggcgggctgatgctcggcaaggaccaaatgtccgatccgaccgccacgcaatgccagacctgcccggacaacaccgccccaagttatgagagccccgacagcagcaagggcgtctgtctgccgtgcccggacggtacgtactcgaaggccggcgcgacccggtgcttcgatctcaactgtgcgcccggttcctaccaggacccggacaatccgcacgcctgcaagagctgcccgccgacccagatctacattccgaccgaaaagaagagtgtgaccggcccgtcgccgggccagggcggcatgcaggtcgtgccgggtcattgcggttgcggcgagaaccaggtgctgcagggcgaggtgtgcgtctgtgcaaaaggagccaccaaggtcccgttgccgggagctccaggcacggtcttcgcctgtgcctgcccggccggggcgcatttcgacgcggcatccggtgcctgcgcgtgccctgccggggcaacgctcaatgcagccaagaacgcatgcatctgtccgacagggcagcgtctggagggcggcaagtgtgttgcgccgagccttcagcatctgccgctgaaagactgctcgaccttgggcccgaactacatcaatgaccccaagaatccggcggcctgcatgcgctgcccgggagggagcgttgccaatgcggagcgcaatgtctgcattgccgccggtcggcccaccgggcccgcgatcgttccgatgttgcccgggcggaccgcccgaccgccgcttcgatgccggccaggtctggtgccgaacgctgccgggaccgcctgtatccgcttgcctgcgccgccgagggttgcgcctccgggaccgaggtttgctcctccggctgcaaggcctgctcctcctgcgggagtgcgtcggccagcgcctgtgcgcgaagcaccgatgcgactgaggccaggggcggccgctccccggaactagcaggagtccgttgatgcagcgacgagaggtaggaaccgtcatgacgcgatggaaacggatgttggccgtgtggcccgtcctctgtgcagccctgttcggtgcgcctgcggcggccgaaacgacgcgtgcagaaatcgaggccgtcgtgaaggactatctcgatgcgcaccccgaggacgtgcagcgcatcgtcaaggactatctgaaggaccatcccgaaatcctgcgggacgcgctgaccgagctgatcaccaaacgggcgcccgcggcggcgcgccctgcgccggcggatcgaaaggcagcgatcgacggcaacgcggcggcgctgttcaattcgccgcgccaggtggtgctgggcaagcccgatggccgggtgacgctggtggaattcttcgactacaattgcggctattgccggcgcgctctgtccgacacgttggtcctgctgcaggaagatcgagacctgcgcatcgtgctcaaggagcttccaatcctcggtgctgcctcgaccgaggcagcaggcgtcgcagtcgcggtccggatgcaggatcggaccggggagaagtacctcgcgttccaccgccggctgctcggcggccgcggcccggcggaccgtgcgagcgcgctcgccgctgcccgcgaggaagggctcgacatggcgcggctggagcgggacctctcgagcgaggaagtccggctgaccttggaggagaacgccgcgctcgcccgggcggtcggcatcaaaggcacgcccgcttatgtcatcggcgacacggtcgttgcaggcgccatcggcgcggcaggcctgaaggaaaagatcgcggcggagcgatcgagataggcgcgggggccctgcgccgctgtctgagatccgtcggcacctgtgaagacacgcgccgatcaatcccagtatggaatcgccgggcgtgcgatcatgagccagaagatgatcagcacggctgcaaaggccgggaagccgaatgcgaaccacaatcggaagagctggtgataccgggccggcaattcgctgttgctcgcgaccgccgcgacggcgagatcgcgcatctgcatctgcatccacaccaccggcagccagaaggcgccggtcacgagatacagtgcgatcgaggccgcaatccaaccgtcgccgagggagtacccgctcgaccaggcgagccatgtgccggtgatcggctgcaggatcaccgcactcgcggtgaacaggaagtcggccagcaccactgtccgagcgacgcccgcgatttcgcgcggatcgccgcgcagatgcgcgacgagcatgaagaaggcgatgccggccccggtgccgagcaggaccgcagcgccgatgatgtgcgccatcttcaccaggaagtagagcatcagcgatcctcccggatcgccatggcgaccaggttgagcatgatcaccggccagatcttcagcatcggtcccaacggatcggcccacagccgcggcaccagcgccgtgccgatcacggcatagctgagcgaaatgatcaatgccgcccacaacccgtagcggctcagaggtcgccagagaatggcgaggccgatagcgatgtcggctagcgcgcctgcagtgacggtgagcgccgcggcgttctcctgcagcccgccttcccgcagcaacgacatgccgatgttccacccggcgctcagcgaaatgatgcccgtggcgatccagaacaggccgaagacgccgaagatcagcggcttgagcgcatagaggcgcgcaaaccagcgttcctgcaccgaggcgggttcgcgtgcgagcgcgacctcgagatcgcgcggcctcaaaccggtcatctggcgccagggctcgggatcgcccgccgcgccgcgccgcatttctgcctgtgcggtggcgttgatgggcgttcgccagcccagcacctgcgcgacgtcacccgcgcggtaggcggccgaggccagccaggacggcaggtgcaggcggtaggccggcctccagcgcagccaggcgcgaaacagcgcgacggcgtcgctgaaggcgatctgccgtgggccggcaagatcgagcgcgatacgggagggagcgccgggttgcaggaagaacagcaccgtctcgacgacatcgtccagatgcaccggttgaatggctgccgtctcgggcatgaccggcagaaccgggagcgccgcaagacctcgcagcagcgcgctgccgccataggcgggccggcccaccacgacggaaggacgcagcacgacccagtcgagatcccgcgccatcaaggcggcttcgccatcgcgcttgctgcgcgaaaacgcgctcggagcatcgacattgctgccgatcgccgagaacaggatcacccggcggacacccgcgctttcacaggccgcgtagagcgccgcgctgccggcgacatgaacgccttgcatgtcctgaccctgcagcgcaccggccgcattgatcacggcatcgacgccggagagaagccccttccatttggacggatcggtggcctgggtgatgtcgagcgtgatgtggcgtcgatcgcgcgctgccgccggatgacgcgacaccaggatgcaatcgtgcccctccgctgacagcttggcgtggattgccgacccgataagtcccgttcccccgacgagaagaatgcgcattgcctcgtgcctccaatagcaacctgggtagcgacaaagggccggccggaatgaggatgcgacgacaaagcgggcccgatgcaatcgttcctcgccgcggaacccggggcaccgtgtccaccctggacgacgatctcccgccgagcgaggcgcagggaaaaataaaccgcaaagatctcaaatgataacgcctcgcgtcccggtcgtgtgattgatgaggcatcacacagaagagcggacattatcgaaatgctcggaccgaatgttctttcacccgaagaactgtcgttgctcggagcgacctacgatctggtcgttgactcgcttccaagccgaatgcgcacacctcgcaaccggcgccaggtcgcgctcaacctgctctatctcactcggcgcggcgagcgcgacccgctggagctggagcttggcgcggctgctggattgacctgctgagtgcacgctgcctcgcacgggccgatgagttctgacgcgcttcctgtgcttgcgccggtgcaccgaaaaagacggcgtcgaggcagacatcgaagccgtctttaacaatgtaaatgtccgagcggggctgtcccggtacagggtgatgagccatcccgagaggggccatgttcaatcggcaaacaacggcaatgctgcgcctggtcctcgacgaggtctgcgccgaccttggcaagtatgaaaaggcagtgcgggcgcatgtcgctcggccgcttcatcgtcgatcgaatgggccaccgcatcggacagaacaaattcctagtgagaacgtgatcatgcaagaccgaaccaagaaacgccgacgggtcaaacaaacgcagagcttgaccgaacgcctgcttgcgtccgccaccctcgccaaatccagggcacaagggatggcgccgggacacgatcgcgatctcctgctgcaaaaggcccgcgaggcggaagctgccgtcgcacttgaaagctggattcgcggcccgagctcgccccgctgatcgagaaggcttccgatccctcgcttgctgtcgtaacgccaccggcttccggcgcttggcagttgttgctagaatgcgcggcaaagctgaaggaggaagcgatgcggtcgcgcgggagaggctcatgctcggggttggcggaaggggacgtcgcgcccgcggtgctggccatcggtcgccctgatttcccgaaagtcctgatcgacacgctgcgccggcaggccggcgtcggccattgcatggtgttcgcgctgagccgggccggtgcggcgagctgcatgctcgacgcaggcagcatcgcgatcggcggcgatctcggcgcggcctatgccggacagttccatgaattcgatcccaaccgcgatgccctgttcgaaggcgagggcaatgcgccgatcatgcttccggcgtttgcgccgcgcatgtacggcgcgcgctaccggaagatcttcttccaggattccggcatcgtcgacaaatgcgcgaccgcgatctgggtcagcggtacctgcttctatgtcaatttttaccgcatcgcagcgcaggggcgcttcagcgctgcgcagcgcgagcggctcgagacgatggcgccggcgatcgctgcgagtgttgcgcggcattttcagcatagcgcagcacccgagcgctctctcgccgaaatgttcgccacctgcgctccactcgccggtcttacgccgcgcgagcgggatgtctgtcgccgcatcctcgaaggcttcagctccgaggcgatctccaacgagctcggcatcagcctgcattcgaccctgacctaccgcaagcgcgcttatgagaggctcggcatctcctcgcagagcgagctgtttgcgatcgtgcttcgcctgctcgcccctcggctgaactgaggcgtgaacctgagctccgcgatgtcttcttgtccctgtgcagtgggcgcgcgcccgctcagggggccggttgtcgacttgggaggaaaggaggcggcctcaacccagagttatgagctgaggccgcgaacgcttcggcacggaggcgaatccagccgaggccgcgaggttaggctggttccatgtcggcgcatgttcacgtgtgaacgcttgtgcgatggtgttcggtccgatgctttgcgtctcgtgaatcgatgttgcccggcgcgctgtcttgtcgcgcacaattgcgcgagacgagccgaaagcaatcagttcgcgatcctctgaagcgaccagtcggccggctcgcacgagctgtcagccaaatgctcgggccattcgatcggcctgcagaaaagcccgcgacgctcgatttccctgaaaagatgatctgcgcgacgcctggcaggcaggccgaccagccgggtgccggccaacgcgtcggcttgcacctcgttgcggatgaactcgtacattcgcaagatgaaatggtcggaaagcccttcaaactcactcatggtgtgaccggcgcacttcctactgaaatatccacgcgatcaggtgccagctgacccaaacgattgcggcaatccaggctgtcatgacgatgcccacggcgccgaaaaatgccaacgcgagggcatagccgctagcgttgcggcgatcggccttcagcagcgcgtgctggtcggtcctgtcgagcatgtcattccctgcttgtctcacgagtacccaggacggccgcgatgggcaaacgccggcttgaattaacctcaccgatcaaccttacctgggcggcgccgcagctgtggcccgctgcaggcgaggcacgcccttgaacacgtgcggttcagaagatgccgcgtgtaagggtggctgactcccgagtggagggcgcctcgccgagcggcccaggcatctccgccactcgcgtggccataggaacgatgagaacggcagagcgctaatacacgacagagcgatgacacatgaaagataggagcgcatcgttggctcgcgacgaacacaacaattcaatggaaccgcaatacgccaacacggcacaagtgcggggatctgatcaagtgcttctgcccggcatcgcgggccgagaagacgatctcggcgccgatccggcgtctccatccgttgctgacgtcaaccagccggtcggggctcggccgaggagcgatgtaaccgggcagccccagcccggtatgggagcgaacgagaccaccgacggactgagtgagacagaagaagcggtgcgtgctgcagcagaggacgaagaggagagcctcgacctggaggagccggtgtttgaccgagccgattcgatgccaaagatcatctgaggtgcgggcatcatgaccgacgatctggaacagagaatacgtgaccgcgcgcatcgcatgtggtgcgacgaaggccaaccggagggaaaagcagacgtccattgggagctcgcgcgcatggccatcgcattcgaagacgccaaaccggcgatgcagagacccgtcataagtgacaccgtcgagccggtggaagcctgggcgaaccagggcgagtttccaacgctcaccgaccagggcgagcagcacattccgggcgagatggccgatccagactgaggctccccgactgcagccgaacgccgctcgcccggcttcggagctgggcttgcccggcctacagcggccgtaccggccgctgattgtgggcaatccaaagtgacggcggcgagctaccggcctgtcagcgtctggatagactccagaagtcgctcgagacggtagggcttgtggagcatgatgcttcctgacaccggtcgcggagcggagtgggtgtgtcccgttgagtagatgacgggaatgccgggatggctctcccggcatcttatggcgacgtcccatccggaaagcggccccggcagctttacgtcggtgaaaatcaggtccggagtgacttcggcgcagagctgtagcgcgcgctccccgctctcggcctggagaacttcgtggccctggctctccagaatgtccacgaccacgtcgcgaatcagatcttcgtcttcgactaccagaatttgcaaatcaatctcccggccggcaggttctctttatctgggctcgccaggctgagagatggtgaggcatcttgatcaaacgccgatatgttccggccgttccccgcgaggtgctgcaggcgcctcgccgacagccttgggacgcctgtcccaattgctggggacagacggcggctccggaaggcgctagtctcgacgcaacacagcaagggagcgaagcttgagcaccgcgccgcgcatcgacatcgatcccgccgcattctgggccgatccttatccgatgctcgccaggatgcgcaaggaggcgccgatcgccttcgtgccgcagctcggatcgacactgctgacgagccgcgacgacatctcgatctcggagaagcagatcgatgtgttctcctcgcaccagcccgcaggcctgatgaaccggctgatgggccacaacatgatgcgcaaggacggcgaggcgcatctggtcgagcgccgcgcgatgtttccgacggtgtcgccgaagacggtgaaggcgcactggaccgcgcagttccaggcccacgcggatcgcatcctggatcacctcgagcccgggcgcatcgacttcatgcgcgacttcgcgctgccgttctccggcgaatgcctgaagtcgattacgggcctcaccaacatcggctaccaggacatcgacgcgtggtcgcaaggcatgatcgagggcatcgccaattatgccggcgaccccgaagtcgaggcgcgctgccatgcggcgacatcaggcatcgatgccgcgatcgacgacatcctgcctgtgatgcgcaaacatcccgaccagagcatcctcggcgtcctcctggcctccggcatgccgatggagagcgtgcgcgccaatgtgaagctcgcgatctcgggcgggcagaacgagccgcgcaaggcgatcgccggcacggtctgggcgctgcttacccatcccgagcagctcgatctcgtcctgcgcggtgaagtgtcctggctgcaggccttcgaggaatatgcccgctggatctcgccgatcggcatgtcgccccggcggatcgcaaagccctggatcatccgcgacgtctcgttcgagctggatgagcgcgtcttcctgatgttcggctccgccaatcgcgacgagaagcatttcgagcgcgccgatgcgttcgacgtgcgtcgcgacacctccaagagcgtcgccttcggcgcgggcccgcatttctgcgccggcgcgtttgcctcccgcgccatgattgcggacgtcgcgctgccgacggtgttcgcgcgctccagccggatcgagatcgctgacgacgagccggtgcgaatcggcggctgggccttccgcgggctgcagaatctgccggtgacatggcggcactagctgccgagggcctgccatcccttccgcggcatggtgacattctgccactgttttgcccgacaggtcaaagcgacattcgcaaaattcgaataagcatttcctggcaagaccttggctactgtgcatggggttgttttcgcgttcttggttcgggccggcgcttgtcacgttcgacgcgactgcggcgccggcctgctggcgcggccaggacgtggcggtgaaccaggacgtagacgctgccaggattgcagatgtcggcgttcccgcacgcagcctgccgcggcatttgatcgccgcgcgggttggcgaaaggctggcctttttcccatcatcgctctagaagcgccccgagccttcccgccgaacggcaatggagcgaaacgatgaagcgcgtcgcgacctgggccttctacgccatcggcgcgatcgcgatcgcctatctcgcgctctatgcctatgcgatgttctcaggctcgccgatcgtgccgggcgaccccatccacatcttccgcaagcccgacgcgccgagctattcgtgacggcactctctcctcgtcatggccgggcaagcccgggcatgacggcggggtgtgccgcgactacccccgcaggatcgccagcgccagcgcctgcgcgcgtggcacgatgctctcgacctcgagatattcctccggcgtatgcgcgagaccgccgaccgggccaaggccgcagatggtcggtgttcccacggcggcagtgaaaccggaatctgcgcagccgccggagaactcgccctggagcgtggtgaggccgacatctcttgcggcagcctggtaattctcgaacagcgccttcgactctgcgctctgcaccaccggcacgaactcgcccttgatcgtgagcgttgcgctggtgcccggcaggtaggacgtcgcgacgattgtttcgatcgcagccatcaccttcgcgcgatccgccggatcgacgtagcgcaggtcaatctggccctcggcatagggcgcggtggtgttgacggactggccgcccgagacgaggccgacattgagcgtgatgcccttgtcgagatctgtcagcgcatggatctgcacgatcttgtgggcgagctcgccgatcgcgctgacgccagcggcgaacttggcgccggaatgcgcggccttgccggtgatggccatgtgcatgaagatgccgcccttgcgtcccgtgacgacgttgccggtcggacgtcccggctcggaattgaaaacggcgcgcgcggcgcgcccctcgcgctcgatcacgggccgcgaggagggtgagccgatctcctcgtccgaggtgatcagcaccttgattggatgcggattgccgccgaacttgtggaaggcggtggccacgaacacgttcatgacgaggccggacttcatgtcggcgacacccggtccataggcgcggccatcccggatcgtgaacggacggcgcccggcctcgcccttgccgaacacggtgtcgcggtgccccatcaacagcaccggcttttcgttgctgccgggctttgcgacctcggcatggatcgcatcgccgaaggtgtcgtggctctcgcgccggcacggaatgccgtgctcggcgaaatgccgctcgaaccgcgcaccgaccgcatcgacgccttccttgtcgtaggacccggaatcgatgttcacgacatcgcgcaagagatcgatcatcgcttgccgctgcgacgccagccagttcgttacttgagcttcagacatgcggtccctcgtgtgttctcacgcagcgttatatggcctgacgcaggtgcgacctagtcgccggatgcggtgccgccatgccgaccagggtcgtccccgcgaacgcgggaacccctaccgcgacaccgagggggttgcgcccgtggttgtctcgtcgccaaaacaagatgcccgggaccagcccgggcattcacatctttcgatggtcgtgggcgcctctacgcccccaccatcggcatccgcggatactcacccggcgtgcccgcaggcgggatcgggatgccgccgtcggcatattcgttgagcttgttgcgcaaggtgcggatcgaaatgccgaggatgttcgcggcatgggtgcgattgccgaggcagtgcttcagcgtctccaggatgaggtcgcgttccacatcggccacggtgcggcccacgagcgcgcgcgtcacctgctcggcggccatggtggcatgcgccacggccgggggcgtcttggcgaggtccaggcggtcgccgtccggcgtgatgatggcatcaggaccgatctcgtcgccctgcgccatcagcaccgcgcggtgcatggtgttttcaagctcgcggacgttgccctgccagcggttggcggtgagcacccggcgggcttccgccgagatcgggcgcagcggcacgccattggcctcggcgtacttcttcacgaaatgctgggcgagctccaggatgtcggcggggcgctcgcgcagcggcgggatcttcaggttcaccacgttgaggcggaacaggaggtcctcgcggaacgtgccctcgcgcacggcctcggccaggttgcgattcgacgtcgcgatgatgcggatgtccaccggcaccggcctggtgccgccgacgcggtcgatcacccgctcctggatggcgcgcaggagcttggattgcaggcggacgtccatctccgagatttcgtcgagcagcagcgtgccgccggtggcctcctcgaacttgccgatgcgccgcgcgaccgcgccggtgaaagcgcccttctcgtggccgaacagctcggattccaggaggtgctcggggatcgcggcgcagttgatcgagatgaacggacgcttggcgcgcgccgagcgggtgtggacgtagcgggccagcacttccttgccggttccggattcgccggtgatcatcaccgaggcgtccgaccccgcgatttgctgggcgagcttgattacctttgccatcgcttcgtcgcgatagaccagctcgcgggaatcgttggcgacggcggcgagcaccgccgcgatcagctccggatccggcggcagcgggatgtattccttggcgccggcatggatcgcggcaaccgcggcgcgggcatcgttggtgatgccgcaggcgacgatcggggcgtggatgtgctcggcctccagccgcagcacgaggtcgcggatgtcgagggcgacgtcgaccagcaggaggtcggctcccttgccgccgcgcagcacgcgcatcgcctgctcgttatcttcggcatgggtcacggtggcgccgttctccatcgcgatcttggtggcggtggtgagctggcccttcaatgtgccaacgatgagaagccgcatgtcagtctcctgtccgtctgctcgcgctgccgcgcgtcatgtccttgtgctagccgcgctcggccttgatgatttccgtcatggtcacgccgagcttgtcctcgaccaggacgacctcgccgcgagcgaccagcttgttgttgacgtagatgtcgatggcctcgccgacgcgccggtcgagttcgagcacggtgcccggtccgagcttgaggagctcgccgacgtccatcttggagcggccgagcacggccgagacctgtaccggcacgtcgaataccgcttcgaggtcggcggcggcgcgtgccgcatattcgtcctcgttgtagccaacgtcggtgcctccagggggcatcgggccgttgagatcgggcagcgggacctgtccctcggtatcgctcatggcttaattccccctgcgggacgcgatatagcgtccgaccatttcatcgatcttggccatgatggcgccgcgctccagcacgacgccgccatcggcccattcgatccggcagtcgccgctggcaatttccggctcggccaggatcaccagccggccctcgaagccgctctgcttggcgagccgctcgatcttctcgcgcgcggcgtcgtagagcgcatcgttgatgcggacgacgagatgcggtgtcgcgaccagatgcgagaagcagtccttgaccagcgcgatgacctcgccgagcggctcggctgcgaccagatcggcgcacaatttgcgcgccaccgcgacggcgacctcgaccgcctcggtctccatcttggtctcgatgttggagatgccggaggcgaggccccggattccgatgttgatctcctccatggcgagcgcgacgcggcggtcgctctcggccttggcctcgcgttggccggcggcaaagccttcctgataggcgcgcgcttcggcttcggcgaccttctgggcgatctcggccgcagtcgccgccttctcacgcgtcgtccgctcgggagccgcgaaatcggtatcgaacaggaattttgccggagcggccatcagtacaccagctcgtcgtcggcgcggttcttggtcagcatgatctcgcccttggcggcgaggtccttggcgaggttgaccagaagcgcctgggcctcgtcgacgtcgcgcaggcgcaccggacccatcgccgccatgtcgtcctggagcatcttggccgcgcgcgaggacatgttgccgaagaagaagttgcggacgtcctcgttggcgctcttgagcgcgacgccgagcttgtccttgtcgacgttgcgcatcagggtctgggcggagccggaatcgagcttcacgaggtcgtcgaaggtgaacatcagcgccttgatgcgctcggccgattcacgattgtcctcttccagcgaggtgatgaagcgggtttcggtctgtcgatcgaaattgttgaagatttcggccatgacctcgtgggcatcgcggcggcgggtctgtgacaggttggacatgaactcggtgcgcagcgtcttctccacgctctcgatcacctccttttgcaccgcctccatcttcagcatgcggttgacgacgtcgagcgcgagctcctcgggcaggatgctgagaacgcgggcggcgtgctccgacttcagcttcgacagcaccaccgcgatggtctgcgggtattcgttcttgagatagttggcgagaacctcctcctgcacgttggagagcttctcccacatgttacggcccgccgggccgcggatctcgtccatgatgccgttgacgcgctccggcggcaggtattgctggagcaggcgctcggtggcgtcgaaattgcccatcagcgcgcccgacgccgacatgcgcgagacgaattcgagcagcatgtcctcgacggtttcgacctcgacggtgccgagcgtcgacatctccagcgagagctggcgcacctcgtcgtcgtcgagcaggctccagatcttgccgccatattgctcgccgagcgccagcatcaggatcgcggcacgcttcggtccggtcagcccttcggtcctgggcccgcctgcacggctgccggcgcgctggccgagcgtggagatcacgctggtgatgtcgttggaattggcgttttgcagggaggcggccatgtcagttcacttctcgtatcactttgcggattcgctcagccactggcggacgatggcgacggtctcgttggggttgcgctcggccagttcgccgacgcgatgaacagactgggcgtggacctggccctgaaccgtggcgacgtcgatcgcgctggcggcgccgctcggcagcagcggctggcccgccgccggcgcggcctcttccgaagcggcggggcccgtcagcacgccggagatggcggcggcgacctcgtccgaggcgaggatgcgcttgaccagcggccggatcaccaggaacagcacgaccaggccgagcagcatcatcaccccgagttcgacgaagtacatgacgtcgtccttggtgaactgcagcatgccaagaaggccgccgggttcgccgatcggtgcagtggagggggcgtcggcgaagcgcaggttgacgacctcgacctggtcgccgcgcttctggtcgaagccgatggccgaacgcaccagggcggcgatgcggtcgagctgctccttggtgcggtcctgataggccagctcgcccttgtcgttcttggtgtagatgccgtcgaccagcaccgcgaccgagatgcggttgacccggccggcttcggtcacctcggtcttggtggtgcgggagatctcgtagttgttcgtctcttcggtcttcttgctctggtccttgggcgcgacgccgttgttctgctggttgccgggcagctcgttattgacggtgacctggccgttgttgtcggcggtcatgctctgctcttcgcgggtctggctcgagcgtagcacgcggccttcggggtcgaacttgtccgaggtctgggtgaccttgttgaagtcgaaatcggcggagagctgcacgcgggcgcggccggagccgacgacggaggacacgatgtcctcgacctgcttgcgcatgcgcttttcgaaggagatgcggcgttcgtcgccgaccgcctgctccggatcggtcgccgcgccgtccgcgagcagctggccggcctcgtcgacgatcgagacccgctgtggcttcaacccgttgacggcggaggcgacgagatggcggacggcccggatctgctgggcttccagcgagccgcggacgcgcaccacgatcgaggccgaaggctccggcgcctcgcgcgcgaatagcgggcgctcgggcagcacgagatggacgcgggcggcctggatgcggtcgatggcgcggatggtgcgggcgagctcgccctccagcgcgcggaggtgattgatgttctggacgaaggaggtagtgccgagcgcgtccgacttgtcgaacacctcgtagccgacgccgccgcccttgggcagcccgccctcggcgagcttcatcctgaggcgcgtgaccttgtccttgggcaccatgatgatggagccctcgttgcggatctcgaactggatgccttggcgttccaggtccttgatgatgctggaggaatcctcgacggacaggtccgtgaacagcgtcgtcatctgcggcgtggtgacgcgcatgatgacgaaggcgaagaagccgatgagcgcggcggtgaccgcgatcatcgccccgaaccgggcggcgccgatactcttcagaaagtccgcaagcccttgcaagcaaccgccccacagattcggccgctttcactggaaaggccgactgggcaattattgcctaggtgatggtttcgatatggttaacgaagattaagaggtcggacaaaagtgcatcatgaaaaaaatcggcctcgcaaagcgaggccgattttcgtcaaaagcagcagattccggatcgcttactggcgatattgctggatgcgggtggtgcgaagacccgccagaccgtgctggtcgatggaaaactgccaggagaggaattcgtcgaccgtcagggtataacggctgcaggcctcctcgagggagagaagtccaccacggacagcggcgacgacttcggccttgcggcggatgacccagcgtttggtgccgggtgcaggcagatccgcgatcgtcaacggactaccgtccggcccgatgacgtattttaccctcgggcgatggggttctgtcatggcgtactcacaaactctcaaccactgaactcacgcccgtaaccctacgccccgcggcttaaaaatccgctaagcctaaggcttcaatacaattctcgttgaaacttgcgggaacacggccgtctcgcgggcgggagaggtgatctcggccggctgagcggggcagaaggtaaatgctttgctaacgcggaacgacgcttgcggggtcggcgcgagcccggaactctgatccgccttttccccgctgggagagatgctgcgagcctcaatagctgcttgtcgcgatgatgctcttgacctggctcatcgtgtagctggcaccgtcgatggtgagcagcggcggcgactgggtcaggtcgaccgacgacaccacgccctgcacctgcgcggcgatgccgacattattgttcgccacgtccttccccgtggccgagatcgtgtacttgccgtcgggccattgcgtgccgtcattgcccatgccgttccaggtgaagggaatgtcggtgccggcggcggcggtgtatttgccattgaacacggtctggccgctcgaattggcgatggagatctcgacggtggagtcggtcggcacgttgaggtgccagaccgccgacgagttggtcatggttgcggtcgagccgtcgaccaaggcggtcttgccgacgaagcccagcgcctgagttgcctgcgtggtctgctgcaggctgacgagctgggccagcgactcgttggtcttgagctgctgctcgacgccggcgaactgcaccaattgctgggtgaactggttggtgtcgagcggatccagcgggttctgattctgcaactgcgtcgtcagcagcgtcaggaaggtctggaagttgccggcgagggtcgacccggtggtcgagctcatcgacgagttcgacgaggatttcgggatgtcggtcgtcccggagacgaccgacggtgcggtggcggcattcgtggtggtcatgatcgaatactcctcacactctgatatcgacgccgctgctcgatccgagcatgcgaccgtaaccgcgcccaacgggcgcggcagcgacggcttcgtcctcgctgatgatcagccggcgggcgttgccgccatggtcgttgttctggccggaattctggcccgatgagttctgatcgcgcaggctgaaggacagcccgttactgccggtcttgaagcccgcatcgtcgagcgcgcgctgcaattgcggcgcgtcctgacgcagcatctgcagcgtctccggcttctccaccgtcagatgcgaagtgacctgcccgttgcggtcgacgttgatgcgcacgtcgatgcgcccgagctcggccggatcgaggctgatgtcgaaccgggacctgccggcgcgtatggcggccgcgatctcgatcggcacgccgctgatcggcacggccgtcgcggtggccgcggttgcggtgagcgtcgcggtcgatgccgtggcggccgaggtgttattggtcagcggggcctgcacggccgaagccgcctgggcgccgctatcggtcggagtgacggccgcttgtgtgcccgcatgcgcgtgcgtggccggcgcgccgtgggccagatcggcggtgcggtcggccgcccccgcttttgcctcgatcgctccgccatctgcctgcggcttgacaccttctgcatgtgcggcgctcgcagccggtgcctgcgtcgtggcggcgttcgccgtgccgctgtcctggccgatattggagacatcggtctgggcctgcgccgcgacagcatccttgaacgaggtcttcggcgtgccctgactgacggcgatcaatccgccattggctttcgcatcggtcgtggcggcttcgtccgtgccggtcgcggcctcgccgagggtcgccgtggtgtcggcatcgacctcggcgcctgcgaccttggcgctctggtcgctcgtcttggcggtatcggtcttggtgccggcgatctgggccgcagtggaggcactggcggcaagacctgccgcggcgatcgatagtggcgaagcggcatcgctggcctggttggccgccgcgttcggatcgaccggcacggccggcgcggcaacgatgatgccgggatcgggcagggcggtctgcgtcgcatcggccgtcgcggcggcgcccgcatcggcgccggtgacgggcgtgccgtcagtcttgtcagcgtcggtctcctcggatttgtccgccggtttggcgtccgacgtctccgacttgtccttggccttgccggcatccttggccggatcgctggtcgcctcgctcttttcattcttcgccggcacagtcgtgtcgacgtcctcgcccgccttgctctgcgaaggctggtccgtcgatgaggtgtcgcgcgcgctccggtcggaggacggggaggatgacttggattcgctccgtcgcggcgcggggtcctgcgcctgcgcattgttgttgatcgcctgagtgttgctgtcgaccagcgagccgaaggagtcgttcgcagacgcgtctttcggcccttggctccgcgcaggcttttgctgcgcgctcgggacctgcacgcttgccacgacatctgacgtacgaccaaccactggcgaccccttggaaacaacttcggacaaggggtagcaaggagcgggccagcgtcccgttacggcaatttatatagtagaatcaacatcatgtgcgcgtggcgccgtagtccggcaagaccccgcagccccgtcgtttctgccggcccggcaagaattgccctaacagggtgcccgcgtgattgcttcaccggaaggccgcctatattaaagaggttactctcagccgctttcgacttgggcagtctgcgcttcgggaacaatagttccggaagatcgccgatgtcccgcgagaaggcacaggaatcgcagttcgcgccacgacgccgtcacaacgcttaggcccatgctcaacagtctggatctcgaaggccgtcccgaggacaccagggtcgtcgtcgccatgtcgggcggcgtcgattcctcgacgacggctgcgctgctgaaggcggagggctatgacgtcgtcggcatcacgttgcagctctacgaccatggcgcggcgactcaccgcaagggcgcctgctgcgccggtcaggacatccacgacgcccgcgacgtcgcggccaagctcggcattccccattacgtgctcgactacgaggatcgctttcgcgagtccgtcatcgacaacttcgccgattcctacgcgctgggcgagacgccggtgccgtgcatcgagtgcaaccgcagcgtaaaattccgcgacctcctgaagaccgcgcgtgaactcggggcgcacgcgctcgccaccggccattatgtcgcctcgcgtcgtctggatgacggctcgcgcgcgctggtctgtgcggccgatagcgaccgcgaccagagctacttcctgttcgcgaccacgcgcgagcagctcgacttcctgcgctttccgctcggcgacatgaccaagccgcagacgcgcgagcttgcgcgtcgcttcgggcttgcggtcgccgacaagcacgacagccaagacatctgcttcgtgcctacgggtcgctacaccgacatcatcacgcgcctgcggccaaatgcgatggatcccggcgacatcgtcgatctggacggacgcgtgctcggccggcacaacggcatcgccaatttcaccgtcggccagcgccgcggcctcggcatcgcctccggctcgccgctgttcgtggtgcggctcgacgcggcgcaccgccgcgtcgtcgtcggcccgcgcgatgcgctgaagatgcaccgcatctccttgcgcgacgtcaactggatcggcgacggcgacatcgactgcgccatcggcggcgggttagagatgttcgtgcgcgtgcgctcgacccgcagcccgcagccggcctggctgcgcggcggcaacggccgctacgaggtcgaactcgtcgccggcgaggaaggcgtctcgcccggccaggcctgcgtgttctacgatgcgccctcgggacaggcgcgcgtgctcggcggcggcttcatccagagcgccgccgcgaaggtcggagacgcgacatcgcgcccgctggtggaagcggttcgcggctgagcacgatgagatcgagcccgcctgtcaccgcagcgacggtgcgccccctctcccgcctgcaggagatggtaggagatgcggctctgtccatcatcgattcgtcgcgaggggaagaagctctcacccgccacgctcttgcgagcgttttgacctctcccgcaagcgggagaggcgctaggccgagcgcggagccggtatcgatttcaccagcgcgcatcacactctagaaacgcacagggcaggggggcatggcagcagacatctcgcgggctggggtcgagaaggcctatggccgctgggcgccagtctatgatctcgtgttcggcaaagtgttcgatgccggacggcagtcgaccatcgcggaggccgaccgcattggcggtcgtgtgctcgacgtcggcgtcggcacgggcctctcgctctccgactatgcgcgcacgacgaaagtctgtggcgtcgacatttccgagccgatgctgcgcaaggcgcaagcgcgcgtgcgcgcgcttcgtctctccaacgtcgaagtgctctcggtgatggacgcgaagaacctcgccttccccgatgatttcttcgacgcggtggtcgcgcaatacgtcatcaccgccgtgcctgatcccgaaggcacgctcgacgagttcgtgcgcgtgctccggcccggcggcgagctgatcctggtcaaccacatcggcgccgagagcggcccgcgaaagctgttcgagctcgccttcgccccgatcgctcgccgcctcggctggcgcccggaattcccctgggcgcgcctcgcgaactgggccgcaagacacggtggcgtcacgctcaccgagcgccgcccgatgcccccgatgggccacttctccctgatccgctaccgcaaagcgtagctgcgagcgacacgggcagtgcgcagctcacccgaggggagggtggagttcgcccgcggctggctccgatcgaaccccgatcagatcgcactccgcctggggaacagcccgcctgccccgcgcgtttccttctcatgagcacgacatcgaatatcatcctggcaagcctcctgatcgccgcctccggcgccgcgatcgcgcaggcgccgcccgccccagcgacgccgccgcaagcaaccgcgccgccatccccgcaacgcgccgccggctgtgccccatccgatcggctggccaccacccccgacggcaccaccaccggccagtcccgggaaccgctcggagacaagctcgccaagacggacggcgtgctctgcccgccctcgggcgtcgatcccgacatgcacgcccccgcgcctagcac

SEQ ID NO: 184 - DNA, 97909 bp, Bradyrhizobium colbertium
  misc_feature (11813)..(11822): n is a, c, g, or t
  misc_feature (93143)..(93152): n is a, c, g, or t
tccgtcgccgaagccaccgactgcacgttggtcgaggcctcctccgacgcacttgcgaccgtggtcgccagccgctgcgagcggtcggcggttccggtgagggtcgtcgccgatgcctcgagctgtgtcgaggccgacgacacggtctggacgatctccccgatcatggcttcgaattcgcgggtgatgttgtcgacgcggcggccgcgctcgatcttggcttcggcatccgcggccgcagcttcgtctgcggccctcttggcgatcaacgcttccttgaagatctggagcacgtcggccatggcaccgatctctgtgttttcgccgcggtgcgggacttcggcggagagatcgcccttgcccagcgcctgcatcggctggatgatcgaattgatgccgctggagacgtcgcggacgagatagaagctgagcccgaggccgatcaagacagccgcgccgagaatgactgaaaccagcataaaggcgaaagcgtagctgtcggcggcatcctgagccgcctgttcgccgctcctggtattgagctcgatgtccttgttcaggacctcatccgcctgaagtccgatcttgttgaccgtcttggagttgagctcctgcgcctcgcgcgggatcttgcccgcttccttgcgcgacaaggccatcacctcctcggtgcccttcttgtactcgtcccagagcttcgaccactgggtgtagagcgcccgctcttccgcggagctgatcatggcctcgtacttgctgcgcgtcttggcgagcgcctcggtcacggtggcggcggttttctccaccgccagcttgtcgtccagaacttcggccaacatgtgctgacgcaccacgtttcgatacgtgatcactgcggcgcgcaggtcaccgatcacccggacgctcggcatccaattcgtcgagatgtcaacggtgttggcgttcatcgaccgcatcttcatgacggcgagcaggcccattccggtcatcgcgatcagcaggaacgccacgacactggtgatcttggcgcggatggaaagcttggcaagcataatcggatctcgttgtactggcgcgggcgcgcgtcgggagctctaagaatcaaccaaaagggagcagcgccgacatcagacagcagaccatctgtgcagatgttaactacgactccgtgcgagtacggaagtcgaaagagatgaacaggaacctaaaaacggtctgcgctcagcgcatgagcctaagcgcggcggcgaagaagtcgggaccaccgaaatttccggacttcaacgcgagcagcatcccgcctgcctccgtgccgaccgcccgcagtaccgggacacccgccgcgatctccgcgccaacaaggaagccggggataccaaggcggtcgacgactgcgccggaggtttcaccgccggccacgaccagccgccgaacccctgatttcactagattttccgcgatgtcggccatcgcctgctcgatcgcgtgaccggcagcgtcgcggccgtggcgagcctgcagggcggcgacctgatctggtgccgagctcgatgcgatcagtaccggaccttcagccagtcgcggtcttgcccagtccagcgcgtgctgcacttcatctgcttgcgtgatgatacggtccggatcgagacgaagcaccggcatgatgcgttcggcgctcgcgatctgctgaagggtcgcctgcgagcagctcccggcaaggcataccgccgctccgccgaccggcgcgcctgcatcgctggtcgccgtggccttgaccttgccggtcgagaccagcgcccgcgcgagcccgaggccgatcccggaggcgccgaccgacagccgatggccggcggcaacgagaccgatggtctcgaggtcgcggtcgaacacggcgtcgacgattgcggcaccgataccctggcccgcgagcgcggcaagccgcgcccgcaccgcctccgcgccgcgcgtgacaatggcgagatcgacgaggccgatctgcgtcctgctctggcacgccagcacgcgcaccaggtttgaatcgtgcatcgggttgagcggatggtccttcagcgggctctcgttgagcggcacagcgccgacgaacagattgccttggtagacggtgcggccggtttccgggaacgccggcgtcaccagaacgacagtttcgccgcaatcggcgcgcagggcgtccatcaccgggccgatattgccggcgtcggtggaatcgaaggtcgagcagatcttgaacaagacatggctggcgccgcggccgcgcagccatttgtccgccgcgcgcgaccgcgagacggcaaggccggcctcgatcgagcggctcttcagcgatatcacgacggcatcgacctcgggcaacgccagatcgtcggcgggcacgccgatggtctgcacggtgcgcaggcccgcgcgcgtcagcgtgttggcgagatcggaggccccggtgtagtcgtcggcgatgcagcccaacgcaagtgtcacggcttcactccagcgtaaggcttgaaccagccgagcccatcggtggtcttgccgcgcggattgtattcgcaaccgacgaagccggcatagccgagacggtcgagctcttcgaacaggaacggatagttcagctcctcgccgtcgggctcattgcgcgagggaatgctggcgatctggatgtggccgatgatcggcatcatctcgcgcagccgcatggtgacgtcgccatgaatgatctggcagtgatagatgtcgaactggagcttgaggttgggaagccgcaattcctggatgaggtcgcgggcgaagccgaaatcattcaggaagtagccgggcacgttgcgtgcattgatcggctcgatcacgatgtcgatgccgtgcggcgcgaagaactcggcagcccatgccaccgatttatagaacgcctcgattgcgacgcgttcgccgcgattggcaatgccggccatcaggtgcaggcgcttgactccggttgccttggcataaggcagcgccgtctccaggctcgccttaaggtcattgaatcgcgagggcagcgccgcaaagcccttctccccggcattccagtcgcccggcggcaggttgaacagcgcctgggtcaggccgttgcgcctgaggcgctcgccgacgacctcggccggatgctcatagggaaatagaaactcgacggcggtgaaaccggcttgcgcagcggcgtcgaagcgatcgaggaacggcagctcggtgaacatcatcgagagattggcggcaaagcggggcattggatcctctcctatttgtcgccgggcagcttgacgccggtgacccgcgcatacatccgcgccacggaggcgtcgtcgtcgcggcccatgccggcggctgatgtcatcagaaacatctgcagcgcggcggcggagaccggcacagggaatcgggcgctgcgtgccatgtcctgaatgatgccgaggtccttgacgaagatctcgaccgcgctgcgcggcgtgtaatcgccgtcgagcacgtgcggcatgcggttctcgaacatccaggaattaccggccgatgccgtgatcacctcgtagaccttgcggatgtcaaggccctgcttggcggcgaacgccatcgcctcgctggcagccgcgatgtgcacgccggcgagcaattggttgatcatcttgaacgcggcgccttgcccggcggcatcgccgagctcgtagagcttggcggccatggcgtcgagcgcgggccgcgccttggcaaaggcagcgggactgccggaggcgaggatcgtcagctcgccttgcgcggcgcgctgcgccccgccggagatcggtgcatccagatagtgccggccggttgcctcgagctgcttggccaagcgccgcgccacgtcgggatccatggtagccgatgatacgaagacgctgtccttcggcatggtctcggcggccccatccttgccgaacaggatggtttcggtctgcacggcattgacgacgacgctgacgacgatgtcggcctcgccggccgcttcggcaggtgtctttgcccccgcgccgccatccttgacgaagcgcgacaccgcctcagcagagacgtcgcagccggtcacggcatggccagcgcgcttaagcgaggtcgccatgccaaagcccatcgagccgagcccgacaacggcgatgcgcttggtttgtggcgtggaggcggacatgcaactgacccttgcaaaacgtttcccggatggccgccctttgcggcggctcgtcgcaccgatatcacggcttggccgcgctgccaaagcgtgagacaagcgggcatgacggccataagcaacgatacacggctgcgcgaagatatatgccgcttcgggcggtccctgttcgagcgcggcctgacgcccggctcgtccggcaatatcagcgtccggctggacagcggcggctggctggtgacgccgaccaacgcctcgctcggctttcttgatcccgcaaagctgtcgcggctggacgatcagggccggctggtgtcgggcgacgcgcccaccaaggaagttccgctgcacaccgcgctctacgacacgcgcggaagcgcccaagcgatcgtgcacctgcactcgacccattcggtcgcgctctcgatgctgcccgagatcaacccgcgcgccgcgctgccaccgatgacagcctactacctgatgaaatgcggcgccaccgcgctcgtgccctattatcgtccgggcgatcccgcagtcgcggatgcgatcaagggactggcgggaaaatattcatccgtgctgctcgccaatcacggcccggtcgtcgccggcgacacgctggaagcggcagtgttcgcgacggaggagctggaggagacggcgaagctgtacctgctgctgcgcgggatgaacccgcgctatctgtcaccagagcaagtgtcggatctggtgaaggtatttggggtggcgctgccggagcatgggcacggacactgagcgcgggtccgaccctggtcattgcgagcgcagcgaagcgatccagagtctttccccggagggctcccagatcgcttcgctacgttcgcaatggcagagaatggaaggcttgtggctacagtcccagatacgccttcctcacgtcgggattgcccttgatctcgcttgctgcgccctgcatcagcacgcggccggtttgcaggatgtaggcgcgatcggcgatctccaggcactcggccatgcgctgctcgacgatcagcacggtcatgccggcgtcgcggatgcgcttcaccgcctggaagatctcgtccaccagcttcggcatgatgccctgcgagggctcgtcgagcatcaagaggcgcggacgcgtcatcagcgcgcggccgatcgcgagcatctgctgctcgccaccggagagcgtttcggcacgctgctccaggcgttcggacagacgcggaaacagcgtgaagacgagatcgaggggctcttcgcgattggcctcgccacgatagagataactgccgaggcgaagattgtcgcgcaccgacagccgtggaaacaggcggcggttttccggcacataggcgatgccggcggcggtgacgtggtgctgcgccatgccgtcgatgcgcttgccgtcgaacgtcaccgtgcccgagcgcggacgctcggcacccgcgatggatttgagcagcgtcgacttgcccgcgccgttggcgcctgcgacgcagacgatctcgcctttctcgacttcgatcgagaccgcggagatcgccaccaggccctgataggccgtcgtgacttcacgcaccgacagcatgacggtctcccagatatgccttgatcaccttgggatcgcggacgacgtcggcgggcttgccctcgaccagcaccttgccgaggtcaagcacgatggcgcggtcgaccaggggcatgacgatctccatgacatgctcgaccatcaagacggtgatgccggcatcgcgcaccttgcgcacaagcgcgacaccggtctgcgcctccgtgggcgtgagcccggtgaggacttcgtcgagcagcagcagcttcggcccggtcgcgagcgcacgggcaacttcgagacggcgcttctcggccggcacgaggtcgctggcgagcacgtcggcgcgcgcggcaaggccggtgaattccagcacctcgcgtgccttgcggcgggcctccttcatcaccgtgttgcggaccaacgctccgacgatgacgttgtcgatgaccgtcatcgtctcgaagctcttcacgacctggaaggtccggccgatgccgcgctggcagcgttgggctgccggcaagttggtgacatcctcgccgtcgaaccagatcgagccttgcgtcggcggcagcacgccggcgatcagattgaacagggtcgacttgccggccccgttcgggccgatcaggccgacgatctcgccgcggccgaccgagatcgagacgtcgctgttggcgacgaggccgccgaaccgctgccagacgccgcgggtctcaaggagcgcgctcatcgtacggctcccgtcctcttcgggcgtgaaaacaggctcagcagcccgcgcggcagggccaacgagatcagaacgatcagcgtgccgtagacgatgaggtcgataccgcgccccgagccgccgaatttgaagcgggtcagctcagtcagcggaatcaggatggctgcgccgagcaccggcccccacagggtgccgatgccgccgagtacggcgggcagcgccatcagcagcgagaactgaaagcccataacgctctcgggatcgatataggaaacgaactgtgcgtagaagctgccgccgacggcgaccaggaaggccgagacggcggccgcacccatcttggaattgaacacgtcaacaccgaggctctcggccgcctccgggttgtccttgaccgcgcgccaccaaaatccccatttggagttttccagccaccaggtcacgaaccaggcgaggcagcacagcgccaacgcaaaatagaagtacggcagcttggtgcgcaggaactggaatttaagccaactgtcgccgcggatcggaatggtgatacccatcgcagcaccagcccattcccagttgtggaacagaagcaggccgatctcggcgatgacgatggtggcgatcacgaagtaatggccacgcaagcggaagaagggatagccgagccccatcgcgatcagagccgacaccaccccgcctgccagcatgccgaaccagggcagcacgccgaacttcgtgaacagcagctcggtggtgtaggcacccagaccgaaatacagcgcatggccgagcgagatctgcccgcaatagccggacagaatgttccagctctgcgacaggcccgcatacatcagcgtcaggatcaggatgttctggacgacgacgtccttcacgaacaatggggtcagcgccgcgatcagggcgagcagcgccgcgatgatgaggtcgcggcggcgccgcgctgtaaaatccttgtccatcagatcgatccgaacaggccgcgcggccggatgaagacgacgagcagatagaccgagtagatgccgaccgacttcagcgacggcggcagcaccagcgcagtgacagcttcgacgagaccgacgatgatgccgccggcgaaggccccgaacacgctgccgaagccgccgagcgccactgtgacataggcgatcagcgcgaacgacgcgccgacatcggggtaaatgtagaagaacacggccatgatcgctccggcgagaccgaccagcgcggcgccgaggccccagccgaacgcgaacacccggttcttgtcgatgccgacgagcgcgaccgcgccgggatcttcgcgggtggcttcgatcgcgcggccgaagtccgtgcggtggatgaagatataaagacccgcgaacgccgcaatcgagaccagcgcgccgaccagttgcggctccggcaggaagatgccggcaatcgagatggttttgccgccgagccaggattgcggaatgctgcgatagtccggcgtgaagaagtattgcgcgaggccgcgcatgacgatggcaaggccaaaggtggtgaagatctgcaccatgccggcgttggccttcgcccgcatggcgaagcgtacgaggagcagatagacgaccgctccgaatatgaataatgccgcggcgaccagcggcgccgacagcaagggatcgatcgcgaagaacgcgaacaggaagaaggacaggtacatggcgatcatcaggaactcgccatgggcgaagttcgtgacgtccatcaggccgaagatcagcgcgaggccgaccgcgatcaatccgtagagcaggcccatgagcaggccgctcgcgagactctgaataatggcttgggctgtcaaagtctgtcccccgttcgaaacgtcagcgtttgctccgtcattgcgagcgaagcgaagcaatccaggccgcctgcggcggcaatagtctggattgcttcgtcgcttgcgctcctcgcaatgacgaggctcgtgcgacgatctcgatttgctccgctgcccccgcagcgctcacttcatcggccagatcgcctcggcgatcgcggcctgcggcgggaagatggtgacgaacttgccgccgacatattgcagcagcaccgggtcggcgtcgttgttctggcccatctcgtcgaacttgacgcgcttccacggcatgatggtctggtcgccggggatgtcggttgccgccaaggcatcgcggatcttctcgccatcgatcgacttggcgcggttgatggcgtcggcgaggatgatcaggcccatgaactgtcgcgacgtaagatcgttgaaatccttgcccgacttcgccttgaacatgtcgttgatcttgccgaccatcgggcgcttctgcgcgaggtcgagcgagaaggtgccgcgcgagatcacgccttcgagcttgtcgccgacggcatcataaagagctttctcggagaagccggcgtcctgcgccacgatcgcattcggcttgtagccgagctcggccatggtcttgaccaggaggatgccgtccgtggtgtagctcgacggcatcagcacgtcggcatttgccgtcttgagctgctgcacctcggccgagagcgagggcgaattggcgcgatacttgatgtcggtgacgatcttgtagccgcgctcaccggcgatcttggcctgggcgttgccggagtcggtgccgaagatggtgtcctcgtgaaacaacgacagggtgtcgatcttggtgcctttcttcttcatggcatcgaagaagtcgaacatcgctgccgagtacatctcgtcatgcggcgccgcgcggaagtaatacttcaggccgcggcgatgcaggctgggcgacgagttgtcggcggaaacgaacgggacctgatagcgttcgcagatctggctgacggtgacggcgacggcgctctgataggtgccgatgatggcgcagaccttctcctgcgtgatcaggcgctcggcctcggcgcggcccttctgcggatctgcctggtgatcggcgaacacgaggcggaccttcgcaccgccgaggcccggcagaccttcgcccttggccagcggcaggtcgaaagcggagtccttgttgatgacttcgagcgcggtctcataggccttctgcgcgtcgacgccctgttgagcgctgccgccggagaacggatagatcacgccgatcacgacctccgaggtctgtgcgcgcgctgccagcggcacgagagcggcagtggcggcggctcccaacaacacgtcgcggcgagtgatcgtcatggcaaagtcctctgttacggtatttcggttgatcgaatgaagggattgatggatgcggtaaagcccgaagaagcagcagacgctgcctatcaaatcacggccaagcttttgttcttcagatctgtcacgagcatcaggccaggcgaatgcgtgatcgcgaacggcagtttcgcggcgttgatcaccgattgcggcgtgaccccgcaggcccagaacaccggaatctcgtcgtcggcgaccggcaccggatcgccgtagtccggtttcgcgatgtccttgatgccgatcaggtgcgggtggccgagatgcacaggcgcgccgtgcacggcgggatagcgtgaggtgatctgcaccgcgcggatcgcatccgccggcttgaacgggcgcatcgacacgaccatgggaccggcgaacggactggcctcgctgcaagcgatgttggtgcgatacatgggcacgcgtacattgcgctcgatgtgccggatcggcatcccctcgtcgagcaatgcctcctcgaacgagaacgagcagccgagcacgaaggtgacgaggtcatcacgccagtacttggtcacgtcggtcggctcatccaccacctcgccgtcgcgccagacgcggtagcgcggaacgtcggtgcggatgtcgagatcggcgccgagcgcaggaatgaacgggctgccgacatcggacatgccgatgatcggacacggtttcgggttgagctggcagaagcgatgaaaggcgcccgcataatcggccggcaggatcgccagattgccctggacgaagcccgaagcgacgccggcggtggaggcgaccagcccctcccggtaggcgagccgggccttgcggctcgggagcgtgtcgggtgtttcagtttgctgcgctgccaccaaaacagtcatgtgatcgacctgcctataaactcgacaaggacaagccaacaccacgcgtgctataaagtctaatcgtcgtttctaatcaatctcgataaattcgctttatcgattggggcaatcccttccaatgctggacttcaggtcgatcgagacgttcctttgggttgtgaagctgggcagctttcgcggcgccgctcaaaggctcaacacgacccagccggcgatctcccagcggattgcccagctcgagcgcgagatgggcgtgaagctcctcaaccgcgatcatcgcgtggcctcaccgacgccgagcggccggcagatgatggtctatgcggagaagctgatcgggctgcgtgcccagatgatggcggagatcggcgaccggtcggcgatgcgcggcgtgatgcggctcggcgtcgccgagaccatcgtgcacacctggttgccgcggctcgtgaaaagcgtgaacgaggtctatccgaacctgtcgctggagattgaggtcgacatcacgccgaacctcaccgcgcgcctgctcgcgcaggagatcgagctcgcgtttgtggtgggaccgctgtccgcttccggcgtgcacaaccgcgtgctcgccgattatccgatcggcttcctcgcaagcccctcgctggggctcggcaagggcccggtaacaccgacggacctcgcacggtttccaatcatcaccttcccgcgcaagaccaagccgtacgaggtcgtgcgcgaagtgttcgaccggccggagttgccgccgatccgcctgcatgcctccgcttcgcttgccaccgtcatccatatggcggtcgaggggctcggcatcgccgtgatccccgacgccatcgtcgagaacgagctcgccgacggccggctgcaactgctcgacaccgatctcgcgatcgcgccgctgaccttcacggcaagctggctcgcctctcccgacgtcgtcgccgtggagcgcgttgccgagctcgcaaagcagatcgcgcagagcagcctcgcggttgacgcgcccgcgcaggcgggtcattgaaaaagccgccggatagccgttcccgtcattccgggatggtgcgcaagcaccagacccggaatctcgagattccgggttnnnnnnnnnntgggatgacaactgagagaccgaccgcatgagccgagccgccaccaatctacaaatcgattccgcccgcctgtggggctccattcacgagaccgcgcaattcggcgcgaccgcgaagggcggcgtgaggcggctgaccctcagcgccgaagataagcaggtgcgggactggttccgcaaggcctgcgaggacgctgggctcgaagttcacgtcgatgcgctcggatcgcagttcggcttgcgcaagggacgtgacatgtcgaagctgcccgtcggcatcggctcacatctcgacacccagccgaccggcggcaaatatgatggcattctgggaacgctcggcgcgctggaagtgatccgcacgctgaacgacgctggcatcgagaccgaagcgccgatctgcgtcgtcaactggaccaacgaggaaggctcgcgctttgcgcccgcgatgatggcttcggccgcctatgtcggcgacttcaccaccgacgacattttgtcgcgcaaggacgccgagggcaccagcgtcggccaggcgctcgacagcatcggttatcgcggcgacaacccggtcggcttccagaagctcggctgcttcgtcgaattgcacatcgagcagggccccattctggaagcggaaggcaagaccatcggcgtggtcgattccggtcagggcgtgctctggtacgacggcaagatttccggcttcgagagccatgcaggctcgaccccgatgccgctgcgacgcgacgcgctggcgacattgtcggaaatcgtactggcgatggaagcgattgcgaaaaagcatgggccgaacgccgtcggcaccattggcgaggccgtgatcgcaaatccctcgcgcaacgtcattcccggagagatcgccttcaccatggactgccgcagtgccgatggcgcgatcatggacgcgctcgaccgcgatcttcgtgcggcaatcgccgagatcgccgcgcgccgcaaggtcgaagtcaagatcgacctggtctggcgcaagccgcctacgcatttcgatccgaaactgatcgcagcggtcgagaacgcggcgaagacgctcggctattcctcgcgccgcatcacctccggcgccggccatgacgcctgcaacctcaacacggtgatgccggcggcgatggtgttcgtgccctgcaaggacggcatcagccacaacgagctggaggacgccacacaggccgactgcgcggcgggcaccaatgttctcatgcataccgtgctggcaatcgccggcgtcgcatcctgaccggagaaagccatgcgtggagttttcgtcgacgccaacgaagcccttgccgtgatcatggagcgcctggagaagcccggcgatcccaaggtgcgtatccacagggctcccgatatcaagcccgagcaatatcctgaaatcctcgacggcgccgagatcgcgatcgtggaccataccgcactgccgaccgatgtcgcgaagaagtgcaccgggctgaagcacgtcgtgttcctcggcaccggcgcgcggagctacatgaatccggaggagctcgccgagctcggcatctccgtgcatctgatcaagggctatggcgacacggcagtcgctgaatccgcgatcgcactgatgtgggcttcggcccgggtcatcgcgatgatggaccgcgagatgcgcgccggcaactggctgcgcgaggatggcatgcagctgaccggcaagacactcggcctgatcggcttcggcggcatcgccgctgaggtcgcgcgcattgccaccggcagcggcatgaaggtgatcgcctggaaccgctcgcccaagagctatcccggcgtcgagttcaccgacctggataccgtgctggcaaggagcgacgtcgtatcgttgcatctgctgctcaacgacgagacgcgcggcatgatcacccgcgagaagattcttgccatgaagcgcggtgtcatcctcatcaacacggcgcgcgccgccgttgtcgacgaggccgccatgatcgaggcactgaaatcgggtcacatccgacatgccggcctcgacgtcttcaacgtcgagccgctgcctgcggatcatccactgacgaagctcccgaacgtgaccctgtcggcgcattcggcgttccgcacgccggaagcgagcgaaaacctcattcatgcggcgtgggagcactgccgccggatcgtgaaaggataagagcaacaacaatggccgactatcgcaccatcaaggcagagccgctcaccaacgccatccgcgccatcgtcaaggcgggcggatcctcggatcgcgaggccgaactcgtctcgaccaatcttgtcgaggccaatctcaaggggcacgactcgcacggcgtcggcatgatcccgcgctacgtccagagcgtcaccaacggcggcctcgccgtgaaccagcacgtcaagatcgtgctcgacaccggtccgcttctcaccctcgacggcctcacgggctacggccaggtgattggccatgaagcgatggagctggcggccgagcgcgccaagcgcaacggcgtctgtctcgtcggcctgtccaacgcgcaccatatcggccgcatcggccattgggccgaacagtgcatcgaccatgggctggtctcgatccatttcgtcaacgtgatctcgcggccgatcgtggcgccctggggcggcagcgatgcccgtcacggtaccaacccgttctgcgtcgggatcccgcgcaggggcaaggacccgatcgtgctcgatttcgcgaccagccggatcgcgcaaggcaagacgcgggtcgcccacaacaagggtgtcgagctcgagcccggcaccatcatcgacaatgaaggcaagcccacggtcaatccgcgctacaccgtgatcccgccgcacggcgccatcctgccattcggcgagcacaaaggttcggggcttgcgctggtgtgcgaaattctcggcggcgcgctctccggcgggcaggtggtcaagggaccgtccgacggcaagtacaacgtcctcaacggcatgctctcgatcgtcatcgatccgaacaagctcggcactggcgagaacctcgcgcgcgaggtcgaaggcttcgttgcctggcacaccgcctcaccacccgcaccgggcgtcgacaaggtcaggatcgccggcgagcccgagcgcgagaccaagaggaagcgtctggccgaaggcattccagtcgatccgaccacctggcaggagattctcgaggccgggaagaagttcgggctggatcaggccgcgatcgaaggaatcctgggctgattgacctgatgcaatgctgatgtccttctccccttgtgggagaaggtggcgcgaggcgccggatgaggggctctcccggcgaaggaactatcctcgaatgagacgccccccacgcggaaagaacacccctcacccgccctcgatgcgtcgcatcgaagccgccctctcccacaagggggcagtcaactaatccaccatatccgcgaccgccttgccgcaggccgtggtgtccgcgttgccgccgagatccttcgtgcgcagcgtgcgctcggccagcgtgcgctcgattgcgtccacgatcgactttccggcttccttctcgccgagatgctccagcatcatcgcgcccgaccagatcatgccgatcgggttggcgatcccctgccctgcgatatcgggcgccgagccgtggaccggctcgaacaccgaggggaaattgccttccggattgatgttgcctgacggcgctatgccgatggtgccggtgcaggccgggccgaggtcggagaggatatcgccgaacagattagagccgaccacgacgtcgaaccagtccggatgcagcacgaagttcgccgtgagaatgtcgatgtggtacttgtcccacttcacgccgggaaatttcttggccatcgcctccacgcgctcgtcccaatagggcatggtgatggagatgccgttggacttggtcgccgacgtcaggtgcttcttcggccgcgactgtgcgagctcgaaggcgaatttcaggatgcggtcgacgccggtgcgggtcatcaccgtctgctgcgtcacgaactcgcggtcggtgtcggggaacatgcggccgccgacggaggaatactcgccttccgtgttttcgcgcaccacccagaaatcgatgtcgccgggcttgcggcccgccagcggggaaggcacaccgggcatcaggcgcaccgggcgcaagttcacatactggtcgaactcgcggcggaatttgatcaacgagccccacagcgagacgtggtccgggatcttggccggccagccgaccgccccgaaatagatcgcatcgtgcttgccgatcttctccttccagtcgtccggcatcatctgaccatgcttctcgtaatagtcccaggacgagaagtcgaaatggtcgaaatgcacggagacgccgtgcttcttcgcagccgcctccagaacgcgaaggccctcgggcatgacttccttgccgatgccgtcgccgggaatgaccgcgatccggtactgtttcttgctcatcgagaacgtccttggttggtctggtagccgccgcgttttgatcgcactgcaatggaccaaagtcgcgggcggcgcaacgctgcactgcaatgttgaccatggcgcggtcgagcgcctactgatttgatcctgttcctctcctgcgagtaccctcatggatctgcatctgcgtggcaagcgcgtcctgatcaccggcgcgtccaagggcattggcgcagctgccgccgaggcgttcgccgaggaaggtgcaaatctcctgctcgccgcccgcagcggcgatcagctcaaggtgctggccgagcgcctgcgctccgcacaccagatcgacgccgcaacgagcatcgtcgacctgcgcaagggagaggatgtggagcgactggcgaaggaagccgccgacatcgacgtgctcgtcaacaatgccggcgacatccccgggggctcgatcgacaaattagacgaggcgacctggcggcacgcctgggaattgaaggtgttcggctacatcaacctgacgcggtacatctacgcgcagatgaaggcgaagggcggcggcgtcatcatcaacgacatcggcgcggctggcgaaaagttcgacgccaattacatctgcggcagtgccggaaatgccgcgctgatggccctcacccgcgcgctcggcagcaagagcctcgccgacaacatccgcgtggtcggtatcaatccgggacccgtcggcaccgatcgccacgtcacgcggctgaagacgcgggccagggatcagttcggcgacgagagccgctacaaggaattccagaagagcctgccgctcgggcgccctgcgcatgcgcgcgagatcggcgacctcatggcgttcctgggctcggatcgctctggctacacgtcgggcgtgatctacacggtggacggtggcatcagcgcgggctggggttagttttccgtcattgcgagcgcagcgaaccaacaaggaccatatccgcggcgccagcctgaattgtttcgctgcgctcgcaatgagacacaataagcacaggagtacgataattgtctcaagacctgatccgcgaaaccgcctgcaccgtcgtcgacaagctgcggtccggcgacgtctcgccgctcgagctgcttgatgtgctggagacgcgcatcaaggaggtcgacggcaaggtcaacgcgctgccgatattatgcttcgatcgtgcaagggataacgccaaggcgctgatgcggaagccggccggcgcgcgcgggctgctctcgggcctcccgctaccgatcaaggatctgaccgacgtcgcgggcgtgctgaacacgcagggctcaccgatcttcaaggacaacgtccccgcgaagtccgacctcatggtcgagaatctcgaagccaacggcgcggtggtctacgccaaatccaacacgcccgaattcggcgccggcgccaacactttcaacgaggtattcggcgcgacgctcaacccctgggacacgacgaaatcagcagccggctcctccggcggcgcggcggtggcgctcgcgaccggcatggcctggcttgcgcagggctccgacatgggcggctccttgcgcaaccctgccgccttctgcggcgtcgtcggcatgcgaccgagcatcgggcgcgtcgcgcacactcctaagtcgggtatcgatcgcaatctcggcgtcgtcggcccgatggcgcgcaacgtcgatgatctcgcgctgctgctggatgcaatgagcggcgactatgcagatgatccgctgtcgctgcccgcccccgcaacctcgttcctgtcggcggcacaggcgggcaagaggccgaagcgcatcgcctattcacccgatcttggcattacgccggtcgatcccgaggttaaggcaattacgcgcaaggccgcggagcgcttcgcggaagccggagcgatcgtggaggaggcgcatccggactggcgcgaggcgcatgaatgcttccacgtactgcgcgccttcgatttcgcgatcaccaaggccaatctgctgcgcaccaagcgcgacctcctcaagcccgaggtaatctggaacatcgaggaaggcctcaagctcacggtcgagcagctggggcgcgccgaggcgcagcgcgtcgacatgaccgcgcgggccgtcgagttcttcaagaactacgacctcctgctggtgccgacgacgatcgtgccgcccttcccgatcgagcaccgctatgtcgccgaatgcgccggcaagcgcttcgacaattacgtcgagtggctcggcatcgtctatgccgtcacgctcgcctgctgcccctcgctgtcactgccgtgcggcttcacacagtcgggcctgccggtcggcgttcaggtggtcggcgccccccgcgccgatgcgcaggtgatcgccggcgcgaaggtgctggaggacattttgggcctgcgcggcacgacgccgatcgatccgaaggtgaagaattgacgtctccctcatgacgacggctcctcgcgtcgccctcatccacgccctcaagcattccatcgccccgatcgaggccgcgttcgcaaaggcctggcccgaggcacggctgatgaatctgctcgacgacagcctgtcggcagatctggcgtgcgagggagcgctcaccgacgccatgaccgggcgcttcctcgcgcttggtcattatgcgacggccacggcagcggacgcgatcctgttcacttgctccgccttcggaccctgcatcgaggccgtcgcacgcgcacatgcgtcgataccggtgctgaagccgaacgaggccatgatcgaacgcgccgtgaccatgggcaagcgcatcggcctgctctcgacttttccgccgacgctggcgtcgatgccgcccgagtttcccgcctcggtccaaatcgtgccgaaacttgccgaaggcgctctggccgcactcgattgtggcgatcgcgccgcacatgatcgcctgctcgcggaagcgtcccgcgatctccgcgattgcgacgtcatcgcgctcgcgcaattcagcatcgcggcggctgcgccgctggttgcggaggccaccggccgcccggtcgtgacgacgccggacagtgcggtcgacaagctgatgaggctgctgaaagcgaaggcttaagcccccgcctttgtccggcggcgcgcatccctaatcgcgactgtgagggcagccttggtctcgttgacgaaatcctcgaccagttcctcgcgggtcgcgtgcgccgcctcaccggtgaacaggccctgctcggccaacatcaccacgccgtgcaatgccgcccagatcttgagcgcctgccgttcgcgcaaatagccgacggcgggggcttccaaggcttcgataacgagcgcaaaggtctcccgcgtggcctcgtgcagctcgctgcccttggccgcgcacgacaccgtgcgcgaagcaaacatcaatcggtagataccgttgcgacgcagaccgaaatcgagggtggtcagcgccagccgcaagagtttcgactgcttcgactgctttgccatcgcctcgcgcagaagtgccgagaattgccgaaacgcctccgcagtgatcgccgcgatcaaagcctcgcggtcggcaaaatgccggtatggtgccggctgcgagacgccgagcttcttggcaagcgccttgatgctgatcgcctcggcaccgccctgctccgcctcgcgtagcgcggccttgatcagcgcatcgcgaagatcgccgtggtggtaggtcttgtcgggcttgcgggcgagttgtgaacgcatgtcgcggcgaagcctataagtttgcgcttgacaggggaagtccgccgcgaatgtaataggatataacttaagaatagaagtaagacgaggaaacgcgctgccctttgggccctgcgcacacgaccaaggaagccgcgatggcagagcgactgaaggttcacgtcaatcccgacaaatgccagggccatgcccgctgcaaggcactcgcgccggagcttttcgatcttgacgagtacggcaacgcgcacgaagccggcgacggcattgtcccgccggggctcgaagacaaggcctggcttgcgaaatccaactgcccggagatcgcaatcgatgtgatcgaggagtagcgcgaccactgtcaagccgcgtgctttcagcgaattcgagccaagggatttcccggccatgtccgacgtcaaccagcccgccgcccatccgcccgtgaccgactgggtccatgatttcgaccacaccgatccgcaatggacggaggatccctttccgatctgggaccagctgcgcgccacaagtcccgtggtgcacacgaaacgcttcctgggctgctatctgccgacgacctatgaagccgtgcgcgagatcgccaacgacaccgagcacttctcctcgcgccgcatcatcgtccgcgatgtgcgcccggaggtcgccaggaatgcagccccgccgatcacctcagatccgcccgagcacaaacccgccaagcagttgctgctgccgccatttacccctgatgcgatgaagaagctcgagccgcgggtccgcgcgatctgcaacgagctgatcgacgaattcattgccgacggcaaggtcgacgctgccgcacgctacagcaaatacatcccggtgcgggccatcgcccacatgctcggcatccccgagagtgacagcgatctcttcatcaagtggatccacatgatcctggaactcggcatcaaggacgagagcaagctgctccaggccgtgcaggagatgacagcctatttcagcggccacatcgaagcgcgcaagaacaagcccaccgacgacctcatctcgtacctgacgaatgccaggggcaaggacggcaatccgctcgaggactcccatgtgctgggctcgctgcgcctgctgctgattgccggcatcgacaccacctggagcgcgatcggctcctcgctctggcatctggcgaagacgccgtccgatcgcgaacgtctgatcgccgagccagggctgatcccgaccgcggttgaggagctgctgcgcgcctattcgccggtgacaatggcgcgcgaggtggtcaaggagaccacgatctcgggttgcccggtcaagtcgggcaacatggtgctgctgtccttcccggccgcgaaccgggaccccaagatgttcccggatgctgacaaagtcgtgatcgaccgacgcgaaaaccgccacgccgcctttggcctcggcatccaccgttgcgtcggttccaacctggcgcgcatggaaatgcaggtggcgctggaggaatggctaaagcggatcccagacttccggctggatccggcaggcacggtgacctggtcacaaggcacggtgagaggcccccggcagttgccatttctgcttggaaaggcgatgtaggcctcttcaacacgagacggagaagctggacggccatggctgacgacaaggcgccgcccgacagcaagctgacgcgcaccaaggagaaatgggcccgcgagggccggtttctcaccggcaaggtcacacgtccggaagcccagcgcctgccgcccggccagcaccttaccaaggactggccggtgctcgatctcggcatcgtaccgccggtctcacgcgagcgctggcgcctcgacgtctacggcgcgatcgaaactcccgtgttctggagcttcgacgagttcatcgcgcaaaagcaggcgcggttcacctccgatatccattgcgtcacgacctggtcccgctatgacaatgaatggaaggggcttgccacgcgcgagttgctggcggcctgccagccgcgcgaggatgctcgtttcgtcgtgctgcattcctatgacggttacaccaccaacctcgcgctcgaggatttcgctgcagaggatgcgctgctcgcccatagctggtcgggccagccgctgacggaggaacacggcggtccggttcggctggtcgtgccgcacctctatttctggaaaagcgcaaaatggctccaggccatcgaattcctgaccgaggacgcgccgggcttctgggaagtccgcggctatcataaccgcggcgatccctggaccgaacagcgctattcgaacgactaggttcaagcgaggacgggggaagcccatgccgacggaacgctttcaattcaccggagaaggcggccatcagctttcggccgcgcttgagctgcccgacggcgagcccgcggccttcgcgctgttcgctcattgcttcacctgcggcaaggacacgctggcggccaaacggatttctgtcgcactggcggccaagggcatcgcagtgctgcgcttcgacttcaccgggctcggctccagcgaaggcgacttcgccaactcgaccttttcctccaacgtcgccgatctccttcgtgcggccgaccatctgcgcagcgtccgcagggctccgtcgatcctggtcgggcacagcctcggtggtgccgcgatcctggccgcagcaggacaaatccccgaggccaaggcggtggtcaccattgcggcgccgtccgatcccgcccacgtcactggccttttcaaggagcacatcgacaacatccgcgcgcacggcgaagtggaagtctcgcttgcaggccgcccattccggatcaggcgtgaatttctcgacgacatcgccgagcgcgagttgatgaagaacgtcaccagcctgcacaaggcgctgctggtgatgcactcgcctgtcgacgacacagtcggcatcgacaatgcgaccaagatcttcattgcagccaagcactccaagagtttcgtctcgctggaccatgccgatcatctcctgacgaaacccgctgacgctctctacacagccgacgtgatcgccgcctgggccagtcgctacatcgacactgcaaagcccgcgaaaaccatggatctcgccgaagtgccacgccaggtcgtggtgcaggagacccgcaagagcaagttcaaccagatcatcactgtcgggccgcatcatctggtggcggacgagcccgttgcggccggcggcgcggatgccgggcccggtccctatgatttcctgcttgccggcctcggcgcctgcacctccatgaccatgcggctctatgccgaccgcaagtcactgccgctcgaccgcgtcacggtcacgctgaagcactccaagatctacgccaaggattgcgcggagtgcgaaacgcgcgatggcatgctcgaccagatcgagcgtggcattacgatggacggcgccctcgatgcagaacaacgcaagaagctgatggaaatcgccgacaaatgcccggtgcaccgcacgctgacatcggagatccgcatcgtgacgaaggcgattgattgacgcggccttctagaagcacgatgccatcgtccgcacggccgcgctgatctcgcactcctgccaggccgcaaagccgagcagcaggccgtgatcgcggggccggccaagcgccaggctggacaaggcgcgtgtctcgacccctgccgcaaccagccgcttcgccgccgcctgatcagtgcgaccgcgcttgaggcgggcgacgagttggatgcctccggggggcacttcgatcgagagcataccgcccagctgtcgctccagttcctcgacgaggtgatcgcggcgcgcgtgatagagccggcgcatccggcgcagatgcgcgagaaaatggccgtcagcaatgaactcggcgagtgcctcctggatgtgacttgaagcgatcagcccaatatgccgctgcgcgatctccaaggtgttggccagtgccggcggcgcgacgagatagccaagccggatatccgacgtcatcgccttcgagaaggtgccgacatagaacacgcggccatgggcatcgagtccctgcaaggccggaaccggcctgctgtcgtagtggaattcgccgtcgtaatcgtcctccacgatccaggtcttgccgggcctgctcaggccgagaaactcggtgcggcgggacagcgacatcagccgcccggtcggatgctgatgggagggtgtcataaagatcagctttggtgccgcaagccccggcatccgttgcataccctgctcgtccagtctgataccgctcacgcgtgcaccgtacgcccggaaggcagccgcagcaccgggataaccgggatcctcgacccagacgtcatcgccgggcgtgacaacggtcgtggcaatcaaggtcaacgcagcctgtgcgctcggcaggatcatgatctggtctgcggtggcccggacaccccggctggtcgccagataatccgcgagcacctcgcgcaggcgcgtccggttaaccgggccgagctcgcgcctggcagcacgcaccgcattgcggcgcaagcaacgcgcccagacctcgtccggaaactctctgaaatcgccgtgccccgggcgcaacggccttagtgatgcctgataggacatcggccagtcggtctgcttgagactagaggcccagggcgacagttgcggcttaccggagcgttcgcgcgccacagcagcacccgctcctatcctacgtccgcctccatcgaccgtgaccaccggacggcggccgtgcgacgcctctatatatccctcggcggcaagctgctcgtacgcatgagtgacggtgttgcgggagacgccgagatcgcccgcgagccgacggctcgacggcagcgcccgccccttgccgagacggccgctcgcgatcaggtctctgagctggctcgtcaactgcgtcaccagccccgcgtcgtccgtccgtttcaagtcgaccagagcggagatcacgtcttccagaactggcatcttcctattctcaaatctggtactttttcaggtaccagtacgatgctatccggcgaagtgaactgcttcaaggactccgagatgaactcactctcatcccgcgcggccgtcggcctcttcctcatcgtcgtgctggcctggggtgtgaactggtcgatgacgaagcaactcgtgcaattcgttccaccgctatggaccgcggcgatccgaagttggatcgcgctggtcggcctcatcacgatcctcggattgagcaagaatctggtgatcccggaacgacgcgatattcccgtgatcctcagcgtcgcgctgctgcacatgacgctgttctcaaccctcgtcgccgcgggcctgcgcttcctgcccgcaagcaagggcatcgtgctcggctacaccacgccgctctgggtcgcactcgccgcgcccgtgctcggaaaggaggcgctgaccgcgcccaagcttgccggcgctctgctcggactgatcgggcttgccgtcatcctgaatccatcctcgattgactggaccaatgcaggcgtcctgctcggcgccgcgatggtcatcctcgccgcgatctcctgggccgcgaacatcatctatatccgcgcgcatcgctggatcgcatcgccgctccagctcctgctctggcaggtgctcgtggccacggccgtgctatcggcgctggcgatgatcatcgacgggctgccgcacgtcgagtggtcatggaggcttgtgtcgctcttcctgtattcgggcctgatcgggacggcgttggcctattgggcgatgtcaatggtcaacaagagcatctcggccctgacgacgtcgctcgggaccaccgcgacgccgcttgtcggcatcgccagtgccgcggtcctgctgagtgagccgatcgacaccagccttgccatcgcggccggactgatcgtcaccggcatcggtcttgcgacgctgggcgatcgactgctgcgcggtcaggccactgcgagggggtgagcccgcagtgcaccgcgcaggcctgccgtcgtgccaagcaggatgccggcgaacgcgatgaatgaccccagcgcgagcgtcgaaaggccggtgaggccctgcccgatcgagcagccgaacgccatcacgccgccgatgcccatcagcgccgcgccgctccccgagcgcaccatgtggcgcggcgaggaatagccttcgagcttgaagcggcccgttgcgagcgccgtcgcgaagctaccgccgaagacgccgacaaccgtcgcgacgccgaagttgagcgtcaggccggtcgaaagcatggcgtattgcagggtatcggcgatcggcgcgatgaaggtgagggaggtgaccgggacggggttgaaatcgtcagcgccgaggtagccggtgacgtaccagccgccggcgacgagcaggcccacaatgacacctgctgcgatctgccctggcgagcgtcgaaacgccgggtgagcgaaagcgaacaggatcagcgcgacaacggtcgcggcggcggcaagcgcgcgcgaaagtgattccgagagaccgagcatcaccagcacggagggcagcgaatttgcgctgacggtcgtttgcgaggcttgcaccagcgcgatacgcgccggcgcgatcaggcccttcagcgtcatctgcgcggcgatggcgagaacgatcacgacgacgaaagagcggagattgccgcggccgagcaggaccagcgcccgcgagccgcagccattcgacagcaccatgccgtagccgaacagcaggccgcccaggaacagtactgccggtgaaaacgaagtctgcaggtagatcgacttgttgaggtcgaccatgccgccgccggcgaggaactggctggcggcgatcgcaaccgcaatcgccagcgcgtagctccgcacaagccgcccatccccctccgccaaccatccccgcatgctgctcatcaggcagaagccgctgagcagaccgacggcgccgtacatcaggcctataacgatgccgaagaggatgacgagttgtacggattccatcggtgggttctcaggcctttcgccatcttccgtcattgcgaggagcgaaacgacgacgcaatccagactgtctccccggacgcatttcgggattgcttcgctgcgctcgcaatgacggtgtgttacggcttcaggatcacacggtcccgcgacgagcccgcgactgcaacgtacgcctccttcgcgctctcgagcggatagacggcattcgcgttaatcgggaacggcttcagatggccacccgcaaagccggggccgaggtcgcgcagcacggcgcctgtggcggccgacgacagccccagcgtgtcgatgccgacataggtgtgctggccgcgatagaattcgaggatgttgaactgcacgatgcggtcgatcgcggcgatcagaatctggcggccacgaagcccaagcgatttgtgcgcagcctgaaaatagggatcaccgacggtgttgaagacgatgtcggcgcccttcccgccagtcaattcgcgcacgcgcggggccacgtcggtcgtggaggcgtcgatcacctcgacggccgcattggcatggccttcataggcttccgccttgcgcaccacgccgatgacgcgcgcacccttccaggtcgcgatctgcactgcggcctggccgaccttgccgttgacacccatcaccagcacggtctcgccgctgttcggcacgcctgcgcggcgaaagccttccatcgcggtgacaaacggcacgccgatcccggcggcctcttcccaggacacggacatgggcttctcaacgaccgcatcggcttcgaccacgagatgactcgcatgcgtgccgtcacgacggatgccgagatcgccggacgagccgaacacctcgcgaccgactgttccggccggcccgtcgatcaccacgccggcatagtcgcggcccggtgtgcgcgggaacacggcatagggcatcagcccggtcgcggccttgacgtcggatggattgacggctgcggctttgacctcgattagcaggtcgcacgggccgcgcgtgagcgtcctgcgctcgaccaccggcgagagcgctgccgcgttctcagccttggcgttgaggcgcacacagcgtgcctcgaccgttttggtatcagctggtgacatcgaaaacccgcgatttctcgcgggccttgtcgcctttgggcgtcaccaagtcaatccgtccagtcaatccttcggccgcttgtcgtagagccgcttggccttgccgagcgagcgttccagagtggcgggcgcaaccacctgcaccttcgagctgatcccaatcgtgttcttgatgtgggtcgagatccgatcggcatggtcgagaagaccccggccgtcccagctttcgggccgcgcctccgcgatgatggtcagttcgtccatgcggccttcgcgggtcagttccaggatgaagtgcccaccgcaccagtcggtcgcaagcaacacttcctcgatctgggtcggaaacaggttgacgccgcgcaggatgatcatgtcgtcggagcggccggtcaccttctccatccgccgcatcccgggccgcgccgtgccgggcaaaagccgcgtcaagtcgcgggtgcgatagcggatcactggaaaggcttcctttgtgagtgaggtgaacaccacctcgcccttctctccatccggcagcaccgcgccggattcggggtcgatcacctccgggtagaaatggtcctcccagatgtgcaggccgtccttggtctcgatgcattcctgcgcgacgccgggcccgatcacctcggagagaccgtagatgtcggtcgcgtccatgtcgaaggcgtcctcgatctcgccgcgcatcgcattggtccagggctcggccccgaagatgccgaccttgagcgagcactggcgcgggtcgagcttctggcgcttgaactcgtcgaggatcgcaagcatgtagctcggcgtcaccgtgatgatgtcagggcggaagtcgttgatgagctgcacctgtcgctcggtcatgccgccggagatcggcaccacggtgcagccgagcttctcggcgccgtaatgcacccccaagccgccggtgaagagcccgtagccgtaggcgttgtggatgatcatcccggtgcgcccgccggcggcgcggatcgagcgcgccatgacttccgaccatgtgtcgatatcacgctgggtgtaacccacgacgatcggcttgcccgtcgtgcctgacgaggcatgcacgcgcaccagcttttcgcgcggcacggcgaacatgtcgaaaggatagttgtcgcgcaggtccgtcttcgcggtgaacggaaatttcgcgagatccgacagttcgcggaagtcggacggatgcacaccggccttgtcgaaggcgttgcgataatgcgtgacgttgtcgtaggcgtgcttcagcgaccaagccagccgctgcttctgcagcgccatgatctcgtcgcgcgaggcgcgctcatatgcatccatctcggcgctataggtagtggcaccttccttgagcctcgtcagagccatccttgtttccccacattgatttattctcttctttgctcttactgatcttgcgtcggcagccacgtgccgggaacgacgcgcgaatgtccgcggaattccgctatgacagtgtcgcccacggtcacgcgcacgtcatagatgccggagcggccgccgcgggtgacctcccgcgcgttcgcaatgagccggtcgtccagcctgcccggcttgatgaaagtgatctgcccctgcgctgccacgacgcgctcattgtgagagttgcaggcaaacgcaaaggcggaatcggcgagcgtgaagatgaaaccgccatgggcgatgcgttggccgttgaccatatccggccgcaccgtcatcgcgagcgttgcaaagcccgggccgatctcgacgatctccatgccgagtcccttcgaggcatcgtcctctgcccacatggcgtcagcgcaagcgcgggcaatatcctcgggtgacagggcggctttgacgttcacgagcttctcccggccaagttcttaaagatgatgttctgctggatggctggcactgtcaaataatgcgacgcatttgcattcatggggtccgatccgcccgatcagacatgatcataatcgaccacgacccgctcggacgatggtttcgcctggcaggtcaggacgaagccggccttcagctcccatggttccagagaatagttgaggtccatcagcgcctccccctccaccagcttggcgcggcaggtcgagcacatcccgcccttgcaggcgaagggcaggtcgagaccggcgcggagcgctgcatcgaggatggcttcgtcctcggcaacgggtacgtcgcgatgcttgccgtcgatgatgagggaagcgatcgccttcggcggcgcatcgggagcaacggccttcttcggccgcggcttgccgccgaattccgagacgaagcgctcgacgtggatgcgttcatccgtgatgccgagattgcggcaggtcgcctcgatctcctcactcatgccaagggggccgcaaatgaagacgtgatcgacatcctccgccggcaccagcgaacgcagcagcaccctcaccttttccccgtcgagccggccatgcaggatcgggatgtcctgctcctcgccggagatgacgtggaagatcgagagacgatcgatgaagcggtccttcagctcctcgagcgcttcgaggaacatgatgttatcggtggtgcggttgccgtagaacaggaagaatcggctgtccggctcgcgcgccagcacgcccttcacgatcgacaggatcggcgtgatgccggatcctgcggcaaaaccgacatggatgcgcgcgcgttctgccgggggaaccacgccgaagcggccggtcggcgtcattacgtcgagctggtcgccgcacttcagttcgtccgccgcccagctcgaaaatgcacccccatcgaccttcttcaccgcgatacggatctcaccgtcgtcagggccggagcagatcgaataggagcgacgcacctcctcgccgtcgagcgaggtgcggagcgtaaggtactggccgggcgtgaaggcgtagtcgtcggcaagttcgtccgggatggcgaaggtcatcgaaatggcgttcgatgcctcgcggcggagatcgtttacggccagacggtgaaagcgcggtgcagctgcggacattacgggcgccctcgatcagtccttccgccgtcattgcaggcgcagcgaagcaatccagaaattctccatggaagcagtccggattgcttcgccgcaagaactcctcgccatgacaatcgggttggcatcgtgcgtctctcaatgacacttgaaatagtcgaagggttcacgacaggacttgcagcgccagagcgccttgcaggaggtggatccgaattcggacagcagttcggtctggtctgagccacactgcgggcacgccaccgcctgcgcgccgaacagcgcacggcgggagctcgatgcttgcggcggcgcgatgccgtaggcgcgcagcttgcggcggccgtcctcgctcatccagtcggtcgtccaggccggcgacagcacggtgcgcacctttgggtgacggaagccggcgcgctccagcgcgagctcgatttcgagcgcaatcatgttcatggccgggcagcccgaatacgtcggagtgatcgcgacctcgacacgatcgccgtccaataacacatcgcgcagtacgccaagatcggcgatggtcagcaccggaatttcggggtctacgacgcttgccgcagcgtcccaagcccgccggcgcagctcgctgtcgcgctccagcatcgtcaccatgtcagccccgggaaggtgcgctgcatcgattgcaattcggacaggagatggccgagatgctcgctgtgccggccggaccgaccaccttgctgcatccagtcgttctggggcagttcgagcgtggcttcgccgacgacgtcggacagcgccgcaaaccagcgaccgcgcaagctcgccggatctatggcgacgccggcatcgatcaggtgccgctcgccgtcgtcgaccgcaaacatctcgccggtgaacgcccagagctgatcgatcgcggcttgtgcccgtcgatggctctcctcagtgccgtcgccgagccggatgatccattccgaggcgtggcgcaggtgatatgcgctctctttctccgacttcgcggcgatcgccgccagcgtcgcgtcgcccgagcccatcatcgcacgccaatagaggtcggcaaagccggagtagaacagctgccgcaccagcgtctgcgcgaaatcgccattcggctgctcgaccagcagcagattgcgatactgccgtacgtcgcgcaagtatgcgagcttgtcctcgtcgttgtccttgccttcgaccttggcggcgtagctatacagctcccgcgcctggccgatcaggtcgagcgcgatgttggagagcgccatgtcctcttccagcattggcgcgtgcccgcaccattcggagagccggtgaccgaggatcagcgcatcgtcggcgcggcgcagcacgtagagcaccagcggcgtttcggagacctggatgttggcgaccgccattacatgtgccccacttcttccggcacctcgtagaacgtcggatgccggtagatcttcgattccgccggctcgaacatcatgcccttctcggcaggatcgctcgcggtgatcgcgctcgaaggcacgacccagatcgacaggccttcgccgcggcgggtgtagatgtcgcgagcggcctgcagggccatggtggtgtcgctggcatgcagcgatcccacatgcttgtgcgcaagcccattgcggctgcgaatgaagacttcccacagcggcgtgttcggcgtggccatattgatctccctattcggcagcttgcgcgctctgacgctgcccacgcttggcggcataggcggcggctgcctcacgcacccaggcgccatcctcatgcgccttgcggcgcgcggccatgcggtcgcggttgcacgggccgtttcccgcaagcacctgcttgaactcggtccaatcgatctggctgtagcgccagtgcccgtcggcatcctgaatcatgcccggatcgggaatgctgagaccgagatattgcgcctgcggcacggtggcatcgacgaacttctggcgcagctcgtcgttggagaagcgcttgatcttccatctcgtcgaggtgtcactgtgctggctcgcggcatcgggcgggccgaacatcatcagcactggccaccaccaccggttcagcgcgtcctgcgccatcgccttctgctcgtccgagccgcggcacaacgtcagcatgatctcgtagccctggcgctgatggaaggactcctccttgcaaacgcggatcatggcgcgcgcataggggccgtaggagcagcggcacagcgggatctggttcatgatcgccgcgccgtcgacaagccagccgatggtgccgatgtcggcccaggtcagcgtcgggtaattgaagatcgaggaatacttggccttgcccgcaagcatggcgtcaaccagctcttcgcgcgaagcgcctagcgtctcggcagcggcgtaaagataaagcccgtggccacactcgtcctgaaccttggcgagcagcgcggccttgcggcgcagcgtcggcgcacgcgtgatccagttgccctctggcagcatgcctacgatttcggagtgtgcgtgctgggagatctgccgggtgagggttttgcgataggccgccggcatccagtcgttcggctcgatgcgttcctcggcgtcgatccgggcctggaactgcgcagccttggcggcgtcctcaagagcgcgatcgtcgctctcggccgtgttgagcgcctgggtatacatgcgcattctcccgatttattggaacgcaatatataacgaaattcttctcatgcaagatatttctgtaacatatgatcaggcaaacctccgttccagaagcttccgggccgccggaagcggccccttctcgttggttccatgaccgtcgagccattgctccgatggagcaaggagcccgcgatagatctcgccgcagagttcacgggcggcccggcccggccaatccgccggcagcaggctctccggcagcagcgggtcgcgcagtacgactcggcgatagtagtggatcagcaggatccgcgccgtaaaggcgtcgggctccgacaagtccgtaccgcgcgcgagcgcggcgcgcagaggtttgaacgtcttcatgaatttgagataggcgtccgcggtgcgttgcagcggccagcttgcgctcagcaggcggcggccgctgtcatcttcagccgaaacttcgagacggatggcccccgccgcttcgtccggcaccagcacacctgacggtgcgacccagacgcccggcagcggacttccgaacccggcgttgcggagtgcctcgcgcgaggcgtcgcgatcctcaccattgccgatcagcagcaactcgaagcggccggtccactcagacggcggcggatcatagatgtgacgcgtcgccgcctcgaacgtctggcggcctttctcggcgagacggtaaaaactgttgcgaccgaccttttcgcgcgtcagccagccatcggccgcgaggcgcgacatcgcggtacgcacgacaccgctgtcgatgtcgagaccctcgaagaactccagcagcgtgccgagccacaccgaaccaccgcgcggcacgatggcatccccgaacacggtgatgacgatggatccggtgcgcgacggctcgcgcttgagctggtcgatgatgcgggagagcggatgcgccatgcgcgaggcatagcgcgtttggtgcgggcgcgacaatggatgggagcgacaatgcgaacgccgggctgcatccttcaagacggcgcctctcgcctcctcgggatgaggtccaatccccgtgggggcgtcaccacgcttaaccctcatggtcaggagcgcggcaacgccgcgcgtctcgaaccatgcagggttcggctatctgtgcgggtcaggataggcgaggctgcgccagccgctgcgatcgaacggccgccactggccttccttctgtgcgagccggtcggccacggcgtagacgacggcgggatgatggcccatgccgcaatggctgctctcgacctcgatgctctcggtctgcgcccccgccttctccatgcagccctgccaagcgcagacgccgtcagtgcggctgaagatggcggtggtcggcaccggcggcggcacggcgagctcgccgccgaactgcggatcgacctcgtcggacttccgtccgctcgcccattcgtagacgcgccaggcatttgtcgagcgcggatgaccggcaaaggggctcccgagcgtgatgacctggcgcacgcgatcgggcgccatcttcgcgagctggcgagcatagaggccgccgaggctccagccgaccaggctgatcttgcggccatgcgtgtcgctgagctcgtgcaccagatcgaccatcgcgtcctgaacgcccggacggaggccgtagttgcggccctgtccccaaccgctcaccgcgtatcccttgctggtcagaaacgtgcgcagcgcgcgcgtggacccatcggaggcgacgaggcccggcagcaccagcacggggtgcccatcgccgctcggcgcaagactcagcagcggcagcgcgctgaggaaggcaccgaactcgtggatcgcgcgcccttccagaaacatcagggtacgggacggcggacgcagcggctgggcggaagcggtcatcaatggtcccttgaaagaattgctggaaggatcaccgggtggaaaaaccggaaaaggcgaatgaattccaactccccggcttcttgatcgttccgcagcgcaacatgaatcagctaggcggccggttccggcattcaagccggagagacgcggggcgacaatagctccgcgcgtcaatgctaacggccgtgacgcaaaagtcacaaccatcgaagcagggattctacggagtacagcgcaagccctgcgaggccgccgatcagcgaaccgttgaagcggatgtactgcagatcgcggccgatattgatttcgatcagcgaaatcagctgcttcatgttccaagccttgacctgatcggagatgaagctggagacacccctcttctggtcggcgacaaagctgcgcagcaccgtcaccaggcccttgttgatctcgccgcgcagttcggcgtcgccggcgagcgcctcacccgccgcgacgaacatgccggcgagatgatgttgcagcacctgcgtctcgccgcttgcgctacgctcgatgaacgaacgcgtgttggcccagatggtgcgggcgagatcggcaagctcgggacgtgcgagcagatcgcgctttaagccgtcgatgcggtcgatataggcctgatcggtaccgagccggtcgacgaagcctagcaccatgcgatcaaactcaccgcgaaacggatgctcgggatcgctgcgcacctcattgaagaacgccgtcgcggacgccacgatcttgttcaccagaaacttgtcggcgcgatacagccgcagcaaggtcggcagttccgcgcgcactttctcgcggatcatcgccatcgtgtctttctgattcagcgtctcgtgcatcacgcgcaggagatcatcgaacaggatctgatgtcgtctctctgcgacgaagccgcgtagcgtgccggcggcgagcggcgcaagatcgatggcctgcagctgcgatgacatgcggcggatgatgaatgtcatcaggccggagctttcggtcgcggagaaggcctccggcagtaggcgcaacgcgaaacgcgccagatcatcgctgcacttgcggtcgcgtagccagtccgcgacgaaggagccgaaatcgatttctttcagtttggcttcaaccggtccggcttccaggaaatgcacctcgatgaattcgccgagcttgtcggcgatacgggcctgattactctgaatgatcgcagtgtgggggataggcagtccgagcggtcgcttgaacagcgcgaccacggcataccagtcggcgaggccgccgatggtcgcggcttccgcgaaggctgcgatgaagccgaacacgggatgcacgggcagcagccactttgcgaccacgaacaatgccaacgtcgagaccagcaccagcgtcgccagcgctttcacacggcgaagctcggctgcacgttcggcatcgccgggagtgacgaaggaagaggtggcaggttgtatcatgatcgcaccaccctactcatcattgcgagcgaagcgaagcaatccagaatcttccctgacactctggattgcctcggcgcaaggttcctcgcgctgacggctgcggcgcaaacaaaaggcccgccgaagcgggcctcaacctcagtttatcgtcagcgccggatcaggcggtcttgttgtagaccttggcgaaattgtcctgagcggacttcgcaccgttggcagcgagctggccgaaatagtcggcggtcgccttggcgcgcgagacgaacgcttcgccgcgggcgcggagcagacccgactggatctcgacggcctcgctgaacgacttggcagacgcgagcttgtcgatgcccgagaagaatgcctctgcgtcctcgtagatcgcctgctggatgttgcggctgatcttgccggcttcagtgacggactcggttaccgcgttctcgacggcagcggtcacgcgctcggagcctgcgaacacctcggcggcacggtccttcgcagtgttggcggtcttcttgacgaactcgcgggcggcctcgggaacttccaggttctggatgttcttgaaagcgtccttgaagctgtcgaaagcggcgttggtttcggtggtcatggggttctctccatcctcaatcgtctgagctatggctcaccccgtccggattggcccggggcatgccctatatggcatagttaattgtgcgatgcaacattaatgctgcaccgcggtatcacgaaagtgtgagaagccttaatgaaaggcagcgcgatgcctccggcgccaatgtcggctcgccggcggcgggaaggcgcgcccggcggcagacactttccgtgcgcaaccgcgcctcgctattgctggacagcgcctggcagcccgtaggcctccagttgagcctggacctgtgcgatgttgtggcccagcacgacgatgtcgtgggtcttgccgccgacatctcggacatgatcgcgcagcaacgcctcggccttgaagccgagactttcgaagagagcgatcgccgcctgttggtcgaccgtcatctggaccgacaacttttccaggccagccccaaaagcgagcgcaaatgtctcctgcgatagcgccttccccacccctttcccgcggacctcgggcgaaaccaccatgcggatctcaccgacgtggggcgaccaggagtggggatcgcgcaccagtgtgccgcaaccgacgaccctgccctctctcaccgcgagcaggctttgaatcgcgccgcgctcgatctccttgacccaggccgacagcaccttgggctcgctgatgttgcgcggcaggaacagcaaatcgtgggtcggcaggctcttgccgaaagcgagcaccgcggcctcgtctgcaggcgacatcaggcggatctcgacatcgccggcatcggtcttgacgtgacgcggataggaacgctgttcactcatgtcgatctcttccccagccaggaatccagtttcggccacagccgcttcactgcgttggcgcccgccaccagagagacgtgaccgcccttcaggatcacctcttccttgtccgtcgagccgatcttggcgatcaggtgctttgcggcttcatacggcacgatgtgatcgtgctccgcgaccgcgtgcaggatcggcaccttgatgtcctccagcttcgccgcgcggccgccgaccgacatggtgtcgttgaacagcttgttgtcccacatcaggtccttggtgatcgcgcggaaatactccccggcgagcggcagcgtgtcggtcgcccagcggtcgaacatacggtacgacttgacgaactcgtcgttccagatgttctcccacagctgaatctgactcgcggtgcgcgacgccgggcgcagcatctcgaacgaggacaggatcatttccggcggcacgttgccgacgctgtcaacgagacggtcgacgtcgaaatagcggcggtcggagaagttcgagaacagcttcatctcgcggaagtcgatcggcgtggtgaagcagatgaggttcttcatcggcccgcccttgtggatcgagccgtagagcagcgacagtacgccgccgaagcaatagccgatgacggagacgtcctgctcgccggaatcggcctgcacgcggcggacgcaatccgggatgaagtcgaggacatagtcgtccatgcgcaggctcttctcctccggccgcggggcgctccagtccagcatgtagacgtcgtagccgcgcctgagcaggaactcgatgaagctttgccctggcacgaggtcgagaatgtaacctcgattggtggtggccatcacaatcaggaccggcacgcggtaaatttcgtccgacatcggccggtagtgatacaggctcattgtgccgcgcgaatgcagcacgtcctttggcgtcgagccgagcgtagggccggacgtcgagaagtattcgacgcctttgatactgcgcatgattgcgcgctgcacttcagactggatgcgctcgggtatcgcggcgaaatcaagtcctgctgtcgcattcattcccgccctccgccttcggacggcggacgtttggtgcgcggcggccgtggcgcggcgcctggttgctgcgcgcccgaattggccgacatctggcttatcatcgacttgatctcgccgagttggccttcgatcgactggagccgctccgcgatgccggtcatctgctcgcggctcggcaggttcatggagagcaggtacttctccatgagatcgccgaactgcttctgagcacctgcagcaaccccgccggcgcggttcacggtttgcgagaattctggcgtctccatcgccttggtggcgaaggagttgaaacccttctccatctcgccaaccatcttctgccacaaggcgactggatcggtgatcttgtcggtcatcagcatcctcccgatgtggagggctttgcacccttcttatctcaccataccacaccgttgcgcggggccggtcaaccggcaagcagtggcgcagcgtcgcgaggccgcttcttcgcgggacgaaaccgtgcgatacagcatcgatcagcaggagggacccgtgaccgctcatcagccgccccagaccgtccgcgccaacggaatcgacatctgctacgagattttcggcaacgacaatgccgagccattgctgctgatcatggggctcggggcgcagatgatccactgggacgatgcgttctgcgagcagcttgccgcgcgcggcttccgcgtgatccgcttcgacaatcgcgacatcggcaagtcgagccatctcacgggcggcaaacggctgacgccgctcgaactgctgaagctgcgcctcttcaggatacccgtggccgcgacatacaagctgatcgacatggcgaaggacacaatcggattgatggacgcgctcggcatcaagtcggcgcacctcgtcggggcctccatgggcggcatgatcgcgcaggaggtgacactgtcgtttccgcaccgcgtacgctcgctgacctcgatcatgtcgaccacgggtaatccgcgcgtgccgccgccgacacgcgaggccgccgcgatgctgatggcgccgccgccgcgcagcaaggaggagttcattgtccgcttcggccagacctggaaagtgctgcgcgccgggcattttccggaagaggaagcgctagacccgggccgcgccgagcgcgtgttcgcgcgtggactcaatccggccggcgtcggccgccagctccgcgccgtgctggcgtccgggagccggaaggagcggctgcacgcggtgaaggcaccgacattggtcattcacggcaccgtcgatccactggtccgccccgaaggcggcaaggacaccgcagcgtcaatcccgaacgcgaagctgctgatgatcgaaggcatgggccatgccttgccgatgcggttctggcctcagatcatcgacgccatcgacgagcacgcgcatagcgctgcggcccaggctgcctagctcttctttgcgatccagatcacgtggcgcgcaccgccgcctcgtccggtggcgcggacattgacctcgttcaccgcaaagccggcagtccgaagacgcctggtgaacgccgggttgggtcccgaagaccagacagcgagcacaccgcccggccgcaacgcattctttgccgtccccaacccgctcgcactgtagagcgcgtcgttacccttccgggtcaacccttccggcccgttgtcgacgtcgaggagaatggcatcgaaggcagaccgcttcgcccggatgatctcggccacgtcgatctcgcggatggtcaccctgggatcatcgaggctgtcgccgaagacttccgccatcgggcctcgcgcccagctcaccaccgccggcacgagctcggagaccacgatcctggcctttgatccgagcacggcaagcgccgcgcgcagcgtaaagcccatgccgaggcccccgatgagaacgacaggcttcgctgtgtgctctatctgcttcgccgcaagcgtcgcaagcgcagcttcggagcccgaaaggcgattgttcatcagctcgttggtgccgagcttgatcgaaaattccttgccccgccgcatcaggcggagctcttcgtccgagccggggattttggcggtatcgatcttttcccagggaatcatgggagtgctttagcacgattagttcgtcgctcggatggatcgaagcgcaatccggggaacgctcatctcggaaagacacccggatttcgctacgttccgtccaggctacggcactggggccgcggctaccctcctgcccagacgtcgagcacataccggttcttcgcgcccatctcgtcgatccagcgtgcaccggcagcggcgtcgctgccgcttttctcgcgatggatggcgaccagcgccgccttcacgccgggctccatcttgccgccgtcgccacagacatagatgatcgcaccttgctggatcagcgaccagaccttctccttctgcgtagcgagcacatgctgcacatagctcttcggtccgtccgcgcgcgagaacgccgtgaacagctcggtgatgccggccgccgcgagcgccttcagctcctcggcgtagagaaaatcctgatcgggatggcggcagccgaagaacagcatggccggcccgaggacatccccccttgccttgcgcgcggcgcgctcctgtaggaagccgcggaacggcgcaaggccagtgcccggtccgatcatgatgatcggcacggacgaatcgtccggcagccggaagcccgccttggtctcgcgtacggtcgcgtagatcacatcgcccgcacggcggttggcgagataattcgagcagatgcccttgtagataccgcgccccgacgcggccggcccttcgaccacaccgaccgtgacgctgcaacgcgcgggatcgaccgacggcgaggaggagatggagtagtaccgcggcgccagcagcgagagcatttccagatagacgtgaaacggcaattcgcaggctggatattcgagcaggaggtcgaacaccgatttgcgcctggccagaacttcgctgcggtagcgctccagcggctcggcttcctcgccaacaaaggccaacagcttcggcttggtgacggggcatcgggtgtgctccgccatgatctggatctgcttgcgcgtcgcgacctgctgtagctcgacgaactcgctgagcagacgaccgaccgacacggcctcgccgaccggcagttgcgcacggcggccttccgcgacatgcaacctgatctggtccgccggcaggaagccgaagcggcgggcaatcgagtccaccaaggtcggatcgttgcgcggaacgacgctcagatggtctccgacgcggtaggtgacagtggatggcaattccacctcgatgtggcgcgtcgagcgttccgacggattgggcccgctcttgttctgaagctcgtcgttgaccagcaccttcatcgccaccgcgccgccctgagcgacgatggtgttgacggcggtcactgcaacgggctcgatcgcgtagagcggatcgtcctcggcggtgcgggtgaaattccagtcgatgccgaattccttggttgcgacctcggccgccgccggaaaccatttctggaactgcccgtcgagatcgctgcgtgcgtcgccctcgccgcgcggatacaccgcgcgcgcaccatgggccgacaattgcccatcgatgaagcgcggtaccgactgataggtggcagcccagtcgctgttgccgcaaccgaagacggcgtagcgcacgccagcaaaggcatccttcgacaagtcgctgccaagccacttgacgaattgtgtcgcattatcgggcggcgcgccgttataggaggcgcagatgatcagcacgccgccctcttgcggcagcttgccgacgtaatcatcgagaggcccgagatgcacggcaaagccgttgatctcggcgaggtctgccatgcgcgtcgcgagttcctcggcagtgccgagattggagccgtagagcaccagcatcggcgtgttgtggccaggccgcgtggtggcttggcgctgcgcttttggcgtcgacgacgcaaccgcggcgggccccccataggcgccgcgctcgcgatcggcgcgcggacgcaccttgatcttgaagccttccggcttgatcgtcagcgtctctttcaggtgcatctggtagcgctgatgatcaatcagcttgaagcgctgaaggatcatgccgagtgcgagtgcagcttcatgcatagcaaagccacgcccaatgcaggcgcgctggccgttgccgaacggcttccaggcattgatcggccgcttggcttccgcctcgcggctgaagttttcgggatcgaacgcatccgggttcggtccccataccgggggatcgcggtgcagcgcagtcaccagaatggtggtgaacgtgcctttcctgagcttgtacttgccgccgccgatagtctcgtcctggagcggcgagatgccgtaggccggcgccgggggccacagccgcagcgcctctttcaggatctgcgtgatgtaggtgagctgcgttacctgctggtaggagggcttcgcattgacatccgggccaaagacgcgatcgacctcgtcataggccttcttgagaatgtccggatgcttgagcagtgcatagagcgtgtaggacagcaggccgctggtggtctcgtgccccgcgatcaggaacgtattgatctggtagcggatgttgacgtcgtcgagctgctcgccggtcgcacggtcgacgccggtcatcatcgcagccagcatgtccttcttgtcgtcgatcccgtccgagctcttgcggcgctcggcgatgatctcgtcgaccatcttgttcatgaaggcgacgtcttcggcgagcgtcttgcggcgcttctgcatccagagctgctcgaacggcaggccgcgcgtcatcatgatggtttcgagcgagcgcaccaacgattcgacgaagggatggtagtcgcgccgatagaacgagttgaaacggtagtcgaagccgcacaggccgatcgtatcaagcgtcagcgccgtcatgtcgtggaccacgtcgatctcgtcgtcggcgttgagccgtgcccacttgttgacgagctgctcggcaatgtcgaccatgcttccgtggtaggactgcatggcgcggttgccgaagggctggagcaggatgttgtgcgccttgctccagttcggctccttggtatcggccgtgaacaggccgtcgcccccgaccgcgcgcacgcgccgcaacgcgccgcgcactgtcttgtcgaagcgcttttcgtcggagagctcatcgacgaggtcgtggccggagacgaccacgatcggcgagcccatcatgtcgagccagaagatcgggccgagctccttggcgagccgcgtcaggtgctgcacgggagcagccgaatccagcgacagcatgttgccgaccaccggcttggtcggcggatgcggaatagggtccagacggttcgtggatgacatttgactgcgcttccccctgcctcgatcattcaccgcgtcattgcgagcgaagcgatccagaatgtatccgcggttgcatatctggattgcctcgccgctccgctcctcgcgatgacggaactagccaaatcgccttctacgccattcgatcaacttggcgctgacctcctccggcttctcctgctgcgtccaatggccgctgtccttcaccagatacttttcgagatcgccgatcagattctccatgccgtcggccgcagagggcggcagcaccgcatcgttttcggccatgatcatcagtgagggcacgtggatgtgatggtccagccccttcgaccgctcccagttgcgggtgaaattgcgataccagttgatgccgccggtgaagccggtcttcgtgaaggtgtcgacgaacaccttcttctcctccgccgacaggatcggcgtgcgcggatcaaccttggcatcgtaggcggcgatcatctggggaaacgccaggttggtcttcgacgaagctccgaccccggcgaccggcggctcgtccggcttggccgccggtcgcggcagcggcttgcgcatgaacgcgtcgaaggtctgctcgacccggctgccgaagatcctgtccggctcgcgcgccgggtcctggaactggacgatgtacatctggtcaccgaagcgctggcgaaacagcgcgatggggtccatcggcgcgcgatcccagtgcggggtattgacgccgacaacgccggccacccgcgtgggatgccgcagcggcatctgccagacgacaaagccgccccagtcgtggccgacgaagatcgccttttcgatttcgagatgatcgagcagcccgacgagatcgccggtcagatgctccatgtcataggcttcgaccggctcggggcggtcggtggcgccatagccgcgctggtccggtgcgatcacacggaggcctgcctcactcagtgccttgatctggtgacgccaggaaaaggcgagctcaggccaaccatggcacagcacgatcggcggcttgtcgtcggctggccctgcctcgtaatagcccatgcggattccgttcgtctgcgcgaacttgagcggcggcatttcaatcatcatagattccctattcggcggcgcccttgatctccgccgccggtggcgcgtaggccgtctccagggcggcgaactcttccggcagcatatcgcacatcacttgtacatgcggaatgatgttggccccgacgatgaagccgaagtcaagttggtcgcgatagctctgcacggtgatgttgagcgcctgcccgtgcgtcgagatcgacaccgggaagatgtgcagcagctcggcgcccgcggcatagagcgtctgccgcggccccggcacgttggatacggtgatgttggcggccggcggcagcacgtccgacagattcgagcggctgtagagcaaggccaggatctgcaccatgatcggcgcgcccagcatcgagatgttggagacctgcggcatcagcgcacgcaagggatgcgacatctccttggacttcgtcgattgcgcgatgatcgcctccaaccgcgccttgggatcctcgatgttggtcgcaatcgagcagatcatgccgaacacctggttgttggcctcggtgttgccctcctcacgcagcgagatcgggaccgctgccgtcagcgatttcgccggcagcgtgccgtgttgcaggaggtagcggcggacgacgccggaggcgagcgccagcacgacgtcattgagcttgccgcccgcgagcttcgccagcgccttggagcgagatagcgagatcgacacaccggcgaagcttcgttccgacgagatggtcttgttgagcatggtcgggggcgacaccatgctggcgagactctcgcgcgacttgggatcggcgaccttgcccagcacgtcggacatgctcttgagcacggtcgggatgttgccggcgaagcgcaccgcgctctcgatctggtacatcgcgttgtcgaacaggatcgagccgatgtcgctcttgccggttcgcggcagctgcaggttcttcgccgcttgcgaggcatcgagcggctggctgaacagctgctgatatgaatccaggaggttcgcggcgatgtcgcgcggctcctgtcccggcttgctgccggccgacggcggagcgaccttgcgcgggatcggcgagatatcgtagatcatgttggtcagcgccgcgccggcgccgccgtcgatggcggcatggtgcatcttggaatagagcccgacctcgttgtccttcatgccctcgaacacgtagaactcccagagcgggcgggcgcggttcaacagcttggcatgcatccagccgacgatgcgctccagcgtggcgcggtcgcgcggctgcggcaggctggcgcggaagatgtgacggtcgatgtcgaactgatcgtcctcgacccaggagggatgatcgatgtcgagcggcgccttctccagccgcgccttgaggatcggcgcgatatgcaggcgtgagacgatcatcgccttgaaatcttcgaagaagtcacctttgtagtcgtctggcagacgaaagatcgccatgctgccgacatgcatcggcatctcaggggtttccagatagagaaacgacgcgtccagcgacgacagcttcttcccgtcagccatgataccctccccgcaaacacttgacgggcgccttggcagcgcttctcgtcaggccaatactgcctgttccggcggggcatatgcaatggcaaacggccccgcccggtcgaatggccggaattgcccttccggctgcgccagccggtccgcgacggcccagagcgctgcggggttcacaccgagcccgatatggctcgcccagtgcacctcgatgttctccgcacgctcggaggcacgaagcaggcaggtccgccagttcacgacaccgtcggcgcgcgaatagatcgacgttgtgggcaccggcagatcgcccgcgatcgcttcgcgcgcttccgcaaaatcctctacgcgctcgccggacagtagctcgtagagccaggtggcgttcgttgccctcacgtcgttggcaaaggggctgccaagtgtaatgacgtagcggaccatgtcgggggcccaaagcgcgaggtcgcgggcaaagacgccgccgaggctccacccgaccaggctgaccttgcgcccgctcgcggcatgggtctgggtgagaagcgcgcgcagcgaatcccgcatccgcgccaaaccaccgaggttgcggcccatccgccaggcatgtgcctcatagccgagctctcggagataacgtcgcatcggcgccatcgagagatcgctggcgaggaagcccggcagcgccagcacaggatggccgtcccctcggggggctcgcatcaggagcggcgaaagcaagaggctcgcgttcagctcgaacagtccacgggcttcggccagcagcaggccgaggcccggcgcacgaagccggccagactccggcgccccgttccgtccggaagacactattttttcttgtcggcgctgcgtgtgccgccgaggccggccatcgcggcgaacatgtcctgaaatctctcggtcattttcggatcgaaggtgaaccagctctggagcagcgactccggcgagaccttctcgatgttagtcagaacctgctgctgcagcttgtccatcaccgccgtctgcatcggcgccacgtcaggcaagccgaagaactggcgagcttcgaggggggtgcagtcgatttcgatatttaccttcatgtcccctccaatgagattcgagccgcccaccgcagtatcgccgcgacttatagtgcaacgcaagcgacctgatgccggcgagatatcctccgcccggcaatcagccagtatggtcaaccaaagtcggaagatgccgcccaatgccaggccacgcggtgaacattgctgcacagcggcgcaactttggcgcgttccttgctggaatggcgcttgcacgtgtcgagaactctgggcaacatgcattgaaaagccggccgaacaaaccaaaaatcaccggcacggcagtgtggagagggtcaagaatgtcggtaggtcgaactctgtatgcggcgacgttcgccggagcgcttgcgtttttgtcggccgcgcctgcgttgagccagacgctgcgctatgccaaccagggcgacctgaagtcgctcgatccctatacccttaacgaaagcaccacccacgcccatctcggtcacgtctaccaaggccttactgcgcgcgacaaggacctcaagatcattccggcgctggcggagcgctgggaaacaccggaaccaacccgctggcgcttctatttgcgcaagggtgtgaaattccacaacggcaatcccttcactgcagacgacgtgctgttctccgccgaccgcgtccgcaagaagggctccaatatgcagacccgccttgcggccgacgtcaaggtcgtcaaggtcgacgactacacggtcgatttcgtcctcccctcgcccaatcccatcctgcatagctcgtgggatgtctggtacatcatgaacaagaaatgggccgaggaaaacaacgtcgtcgatccgacgccggttgcggcgactaccccaagctacgcctcgctccacgagaatggcaccggtccgttcatcgtcgaaagccatcagcccggcgtgaagaccgtcttcaaggccaatcccaactattggggcaaggtcgaaggaaacttgaaggagatcatcttcaccccgatcgcttcggacgcaacccgcgtcgccgcgctgctctcgggcgaagtcgacgtcatcgagccggtaccggtccaggacatcgcccggatcgacagcagtccgaatgcccaggtcctgaaggggccggagctgcgcaccatcttcatcgggttcgaccagacccgcgacgaactgctctattccaatatcaagggcaagaacccgttcaaggacgtccgcgtccgcgaggccttctacaaggcgatcgatatcgagctgatcaagacgcgcgtgatgcgcggactgtcgacgccgtccgccctgatgatcgcgccggaattgttcgcgctgtccaaggagttcacgcgtccgaagttcgatcccgacggcgccaagaagctcctgaccgaggccggttatcccgacggcttcgaggtcacgatggactgcccgaacgatcgctacgtcaacgacgccgcgatctgccaggccgtggtcggcatgcttgcccgcatcggcgtcaagatcagtcttctggcgcagccgaaggcacagtatttcgccaaggtcctgaagcaaggcaactaccagacctcgttctacctcttgggctggacgcccagcaccatggattcacacaacgtgctctatgacatcatgggctgccgggacgatgcgaagtcctcacgaggcgaggccaacctaggcggctactgcaacaaggatttcgatgcgatcaccgacaaggtgctggtcgaaccggacacggccaagcgcaatcagctcatcaagcaggcctacgagatcggcaacaaggactggtcctacatcccgctgcaccagcaggcgctggcctggggtgtatcgaagaaggtgaagctgccgcagcgcgcagacaatcaggtcctgctctactgggcaaccaagcaggaatagcggccaactgcacggaaggtcccggcagcgtcaggcttccggagactttccgtttccggctgacaaagacgtcagcctcgacacactctcaaggacagtggaaggaatgctcgctttcactctgcgccgcgccattcaggccatcggcgtcatgttcgccgttggcatcatcgcgttctcgatgttccgcttcgccggcgatcccgtcaaccagatcgtgtccatcgacacgcctgcggccgagcgcgaagccgtgcgcaagtcgctcggcctcgacgaccccgtgccggtgcagttcgttcgctattttgccgatgccgcgcagttcaagttcggcgtctcctaccagttccgccaaccggtctcggcgctgctgatggagcgcatgcccgcgacgctggaacttgcgatctgcgcgaccgtctttgcgatggtcctcggcattctcatgggcgtctattccgcgctcaggcgcgataccttcctggccaagctattccaggcggtgtcactgatcggcatctcgctgccgaccttccttatcggcattctcctgatctacctgttcgccgtgacgttgggctggttgccctcgttcggccgcggtgaggtggtcaggctcggctggtggacgacgggcctgctcacgctgtcggggctgaaggcgctgatcatgccttcgatcacgctcggcttgttccagatgaccctgatcatgcggctggtgcgcgcggagatgctcgaagtgctgcgaactgactacatccgcttcgctcgcgcgagggggctgaccacccgtgccatccatttcggccatgcgctgaagaacacgctgattccggtgatcacggtcgcaggactccagtttggctcggttattgcattttccatcatcaccgaaaccgtgttccagtggccgggcatgggacttctcttcgtgcaggccgtgcagaacgtcgatattccgatcatggccgcctacctgctgatggtttcgctgattttcgtcaccatcaatctggtggtcgatatcctctacaccgtggtcgatccacgtctgcgctcgaccgtcggtcgcgccgcatagggcatcgctccatgtccgacgcagtcgtctccaagtccgacaggcagggcacgcagcccgcgcgcacccacggctggttcggtcgcgcgctcgacagcgacctcttctattcgttccgccgctccaagctcacgatggtggcagcagccatcacggttctgttcttcctgcttgcgatctttgcatccgcgctcgcggtgcagaacccgttcgacccggcgcagctgcaattgatgaattcgcggatttccccgctctggaccgccgacggccagagccccttcctgctcggcaccgacgaacagggccgcgacgtgttctccgccattctctacggcatgcgcatctcgctcgcagtcggcgtagccggcgtgatctttgccggtgtgctcggcatcgcgcttggcctgatcgccggatatttcggcggcgcggtcgacggcgtgatcatgcggatcgccgacgtgcagcttacctttccggccatcctgatcgcgctgctggtcaacggcatcgccaagtcgattctcggcaaccggctggacgccaccagcatgctgacggtgctggtcatctcgatcggcctcagcttctgggttgggtatgcccgaacggtgcgcagttccgtcatggtcgagaagaacaaggactatgtggctgccgcgcagctgatcggcctgccagcgcccaagatcatgcttcggcatgtgctgccgaacacgatggggccaatcctggtcatcgccacgatcaatctcgcacttgccatcatcaccgaggcgacgctgtccttccttggcgtcggcctgcccgacaccatgccttcgctcggcacgctgatccggatcggcaacaactacctgttcgcgggcgaatggtggatcgtcgccttccccgggctcgccctggccgcgctgatcctgtcaatcaacctgctcggcgactggttgcgcgacgcgctcaacccgaagcttcgatgagtacgcctcgtccatgaccgaacccgtcctctccgtgcgaaatctcaaggtcgagttcgcctcgcgccgcgggacgttgcgcgccatcgacggtgtctccttcgatatcgccaagggcgaggtgctcggcgtcgtcggcgaatccggcgccggcaagtccgtcaccggcctctccgtgatcggcctgatcgatccgcccggacggatcgccggcggcgagatccgtctcgcgggcctgcgcattgacaatctgccgccggaggagttgcgccgcgtccggggcaagcgcatcgggatgatcttccaggatcctctcacatcgctcaatccgctctaccgcgtcggcgaccagattgtggagacgatccggacccatctcaatctgtccgggacggccgcgcgccgccgcgccatcgacctcttggccgaagtcggcattcccgcgcccgaaaaacgtatcgacggctatcctcacgaattctctggcggcatgcgccagcgcgtcgtgattgcgctcgcgatctgcgccgaaccggagctgatcatcgccgacgagccgaccaccgcgctcgacgtctccgttcaggcgcagatcatctcgctgatcaagcggctgggacgcgatcacggcaccgccgtgatgctggtgacccacgacatgggcgtgattgcggaaacatccgaccgcgtcgcggtgatgtatgccggccggatcgccgagatcggcccggtccaggacgtcgtgaagaatcccctgcatccctacgccaagggcttgatgggcgccattccgacgcttgcgggcgaggacaagcgactcgtgcagattcccggctccatgccgcggctgtccgccatcccgcccggctgttcgttcaacccgcgctgcgccttcgccttcgatcgctgccgcgtggaccggccggacccgctcccgcgcggagcgcaatcggtcgcctgccatctctatgacgatgcggcggcggagagcgtggcatgagcgccccgttcgttcaggctacagacctgcgccgcgtcttcgacgtctcaaagccctggctaaatcgcgtgctcgaaggcgggcatctcgaatatctcaaagcagtcgatcacgtcaccttcgacatcagaaaaggcgagacgttcgcgctggtcggtgaatccggctccggcaagaccacagtcgcgcgcatggtcgtggggctgctgccgccgagctccggcgacgtgctgatcgacggcgtctccatgaccgatccgcggcaggcgcccgcgcgccggaagctgcgccgccgcatccagatgatcttccaggacccctatgcaagcctgaacccgcgcttccgcgtggatgcgatcatctccgagccgatccgcgccttcggcttgatcctgggcgagcgcgacatccaggctcgtgtcggcgagctgctcaacctcgtcggcctgcatcccgacgaccgtctgaaatatccgcacgaattctccggcggtcagcgccagcgcatcgcgatcgcgcgagcgctcgcgtctgacgccgagttcatcgtctgcgacgagccgacctcggccctcgacgtttccgtgcaggcgcagatcctgaacctgatgcgcgacctccaggacaagttcggcctgacctacatgttcatcagccacaacctcgccgtggtccgtcacatggcgagccgcgtcggcgtgatgtatctcggccgcattgtcgagatcgcggaagggcgcgagcttttcgcccgtccacgcatgccttacaccaagatgctgctcggcgcggtgcccgatctcgccatgagcggccgtcagcgggttcccgtcaagggcgagatcccaaacccgatcaacccgccgcccggctgcgccttcaatccacgctgtccgctcgcgttcgatctctgccgcagggagacgcccgaactgatcgacggcgccgcctgccacgcggtcaacactgcgccggtcccggcgtgacgcgcgcgtgccatgcagccttcgcatttggcggcgacgtggctctgtgatcaattgcgcgcgtcgaagtaaggtggtgaaatccgatgggcagcaatatcaatcccgatccgttcacgacgagacccgagattgagggcaccttcggggtcgttgccaccacgcactggattgcgaccgcggtcggcatgggcattttggagaaaggcggtaacgccttcgatgccggcgtcgccgccgccttcactctccaggtggtcgagccgcatctgaacggtcccggcggtgatgtccccatcatcgttcacgacgtcaaacgcggccgcaccgaggtgatctgcggtcagggcccggcgcccgcgcgcgccaccatcgcgcattacaggagcgaaggtctcgacatggtgcccggcacgggcctgctcgcggcctgcgttcccggcacgttcgagtcctggatgatgctgctgcgcgattacggcacgatgcgcgtgcgcgacgtcctggagcctgcgatcgcatacgcccgcgacggctatccattggtcgagcgtgcctgcgccacgatccagatggtcgagcagttgttccggaagcactggccgacctccgccgcagtgtacctgccgaacggcgaggtgccgaaacccggcacgctcttcaccaacaagacgttggccgcgacctacgaccgcattctccgcgaagccgagagcggcggtgcaggccgcgacgccgagatcgagcgcgcgcgcaaggcctggtcgcaaggcttcgttgcggaggccatcgacaagttttgccggacacaggaggtgatggacgtcagcggctccccgcatcgcggcgtcctgtccgccgacgacatggcccgttggcagccgacagtcgaggcaccgctcacctacgaatatggccgctataccgtctgcaaggctggcgtctggagccagggccccgtcacgctccagcagcttgcgctgctcaagggcttcgacctcgacggactcgatccgacgggaccggagttcatccatctgcagatcgaatgcgcaaagctcgccttcgccgaccgcgaaaagttctacggcgatcctaagttcaccgagatcccgatctcgacgctgctgtcggatatctacaatgatgagcgtcgcaagctcgtcaccgacaaggcctcgctcgatttcatccccggctcggtggagggttttggcggaatggtcaagctgcgccgcgccgagggccagcgcgaagcggtcggtgcgctcggtgccggcgagccgacggtgggacgcttcggcgaggtgcgcggcgacaccgtgcatttcgacatcatcgacaaggacggcaacatggtgtcctcgaccccctcgggcggctggttgcaatcctcgcccatcattccggagctcggcttctgcctcggcagccgcgcccagatgttctggctcgaggaaggccaccccgccgcgctcgcgccgggcaagcggccgcgcacgacgctgtcgccgaccatggcattgcgcgacggcgagccgtaccttgcctggggctcgcccggcggcgaccagcaggaccagtggatcacgcagttcttcctgcgccacgtccattgcaacctcaatctccaggaggcaatcgacgcgccggcctggcactccgagcacttcccgatctcgttctggccgcgcaccgcgcgcccgggcgtgctcgtggtcgagaaccgcgtgcctaaggcaacgatcgagaacttgcgcgagcgcggacatatcgtcgagatcggtcccgactggtcggaaggccgtctcaccgccgcctcgcgggtcggtccacgccgccgcgctgccgccaatccgcgcggcatgcagggctacgctgcgggacggtagaaggctgcacatgacttggtcgatcatcgcgcgcgaccctgccaccggtcagttcgggattgcggtggccacccgcttcttcgccgtcggcgcgcgggtcccgtacattgctgccggcgtcggcgccatcgcaacgcaggccttcgtcaatccctattacggcatcgacggcgtcaggctgctgcgggaaggcctcaatgcccacgacgtgctgggctctctgctcgcaaccgacgacggccgcgagagccggcaagtccacatcatggatgcgagcggcgaaatcgcggctcacacagggcacgactgcgtcggctggtgcggtcacatcgccggcagcggcttctcgatcgccggcaacatgctggcaggagccgacgtgctcgacgagaccgcaaagacctacatcgccaatgacagcttgccctttccgcgccgcctgctcgccgcgatgcgcgcaggcgaagccgcaggcggcgacaagcgcggcaagcagtccgccgcgctgctgatccacggcgaggaagaatggccagcgctcgacattcgggccgacgatcatcccgatccgctgggcgagctcgaacggctcgagcgcgtcagccacgagctctgggtgcactttcgcgcctccatgccaacgcggcagaacccggcgggcaacaccgatcgcagcgtcatcgaggccagcattgctgcggcgcgcataagacagtcatgatgcgatctggctttcccagtggacgagctgaagagcgaccatcagcgtcagactaaatcaccacttcccgcatcacccggcggcaatccatctcgtattcgagatcgacgacaggcggccgggcaaaatgccatgtcaggccggagcgcagcgcgccacggcggaccagctcgtcgaccagcgcatgatggaagtcgtgcacggaatatgcctgcacgccggtagtatccttccaaccgaagccgaaggccgccatccggttctccatctgcgacgtcgtcgtgaagcgcaccttttcccgaagcccttccgggctgagatcgcggtaacgcaccgtgcgctcgacataggtgccgctgccctcacgtgcctcggcgccgccggcgatgacgaagctcggcgcgtttgaccgtgtcgggcgcgtgaaggagaacgcatagaacgagggctccgatggcggatcgatctcgggacaaacattgctgcgcgccaccggattggtggtgccgtcgaagatgccccattcggacagggtcttcacataatgcagattgaacgcgcgaaagccttcctcgctgaaggccgccggcgaccgcagctcgcaagcacagaatgccgtcaacggacgtcccgcctcctggataaactttgccgccagcgcaaagccttctgcgagcggcaccaggcgatcgaaccggacgcgctggatctcatagccttcgtccgcggcggcgcctgcggagtactggaacacggatggaatgaaacggtagttgccggctgagaattcacgggtcatgatgggctcctattccaattgcatgcgaatgcccttggcgccgttgagcaggcgcttcaggtgaaaactggccagagggtcgtcggcatgcatgccgaccagcgcggcaaaggccggcatggccgcggcatcaccagcctccatcttgccgaaagcttcggaatattgcgccgtcgccggagcttcgaattcggtctggcggagcggttcgaatgcgcgcagcggctcgctgcgtccgcgcagcatcaggtcgcccaccggacgaccatggaaattcgctgccccgttcgctacgctggcactgacgcagatgcgcgttcccagatgcttgttcgcggcctccagccgcgccgccgtgttgatggtgtcgccgtaggccgtgtagtcgaaaaagcggtttccgccgaaatttccgaccagcgccggtccggcgtgaatgccgatacgggtcgtgccaaaattcacacccctggctttctggcgcacgcaaaagctctgcgcccaggcatcaagatcatgcgcgcaggcaacggcacgcgtcgcatagtccggctgatctccgggcgcattgaacagaacctggatcgcgtcgccgatgattttggcgaccgtcccttcgtgcgtgaagacgatctcggtcatcccgccgacatattcgttgagcagttcgcccagcgtctcgggcggcgcactttcaaccagcgaggtgaagccggtgatatcggtgaagatggtcgcgatgtcgcgccactgtacttcaaccccttcgccttcgccgcttgccgccagccgtttggcgagctgtggcgagaaatgacgcgacagcgcagcatgggcacgctcggcttccatctgacgccgccggacttcgcgcagcatttcaacatgccgaatggtcttctcgatcgttgtctccagatcggcgaagtcgatcggcttggtcaggaagtcgaacgctccccggttcatggcgatgcggatattgctcatgtcaccataggccgagacgatgatggtcgacttcttgtcctcggcctcctggagcttcgccagcagcgacaacccgtccatccgcggcatgttgatgtcggaaaccaccatgtcgacatgcgggttccgctcgagcgactccagcgcctccaggccgtcgcgcgcgaagatgagagcgagctgcccgtcgcggacctgcttgcggaatttctgcaggaccagcgcctcgaggtcgggctcgtcgtcgacgaagaggatggtcgcagtcatgcggcttgctcgagcctcgtgtcgatctcctgccgcagcagcgcgaagtcgatcggcttggtgagaagcccgacggcgccgcgttcgatcgccttgcggcgcgtttcggcatcgccataggccgtgatcatgatgacggggacgtccggatgcgcagcgcggaccttgggcagcatgtctagcccgctcatgccgggcatgttgatgtcggacaggattaggatcagcgagggatcgcggacctcggcggcacgcttgagcgcctcgggcgcagagagcgcgaactccatctggaaccggccggcgcgcaggtcgcgcctgaactgctgccgaaacagcgcctcgacgtccggctcgtcgtcgacgaccaggatgtatacgttcaagacttgcctccaggtgtgccagtcgtggggccggttgcgatggctcgcggcagcgtaatgatgaactcggtgaatacaccaggctcggtgttcacgtcgatcgtacccccgtgctgcttcacgatgatatcgtggctcatggacaaaccgagccccgtcccctcgccggccggcttggtggtgaagaaggggttgaacatcttctccttgacttcgggcggaatcccggtgccgttgtcacggatccggatctcgacggcgttgccgcaattcttcgtcgtcgcgctcagggtgggctcgaaaccgtcaccggcgctctccttgcgcttggcggtggcatagaagccgttcgcgatcagattgaggagaacgcgcgtgatctcctgcggatagacgtcgatcatgccggcagcgggatcgaacgcccgctggatcgtgacgttgaaatccggtttctctgcgcgcgctccgtgataggcgagattgatgctttcctccacgatggcattgatgtcggcggcgcgatgttcaccagagccttcgcgcgaatgcagcagcatgttccggacgatggagtcggcgcgcttgccgtgctgcaccaccttctcgagattgcccttgagcatgccggtcagctcctcgacttcctctttcgccttgccgtcgagcggggcggatcgcagggtctcattgagctcatcgatcagctccgtcgaaattgcggagaaattgttgacgaagttgagcgggttcttgatctcgtgcgcaatgccggcggtgagctggcccagggacgcgagcttttcggactggatcaggcggttctgcgcagtgcgcaaatcgtcgagggatcgacgcagttccgcggtgcgctgctcgaccttgttctcgagatcggcataggattcctgcaagcgcgcccccatgtcgttgaactggtcggcgagaccttcgagctcgtctccggtccggatcgagatgcgctgcgagaagtcgccgccgccgatcctttcggcgccgctgcgcaacgcctggataggaccgaccaagcggcgcgccaggaagatccccgcaagcaccgcgaagatcgacgccgcaagcaacacgatcgcgagccgctgcagagaggcataaagagaggcataggcctcctcgaccggcagctcgacgaacatggtccaatgcagaggctggatgggggcggaggcggtcaagaccttctggccctgaatgttgcgcccctcctccagttcatccggcatcctgccgccggcagccagcgccgaacgcacctgcgggaggccggacatgtcgctattgcgcagcacgaggctgatgtcgggatgcgcgatcagacgcccctccgggccgaccacataggcgtgcccgcgcgcgccgaccttgatttgggagaccacgtcccagatcagcttgagattcacctccgcgatgctgacgccggcatccttgcgcgccccagccagcgccagcgtcatgtagggctcggattcccggcgaaaataaacggggccgtaatagaccttgtgcacgaccgcctcagtgaacttcggatcgctcgacaggtcgatcccgctgtcgagcgcatccatcgccagccgcgagacccgcaaccgctccttgccggtcgaatccacctgggcaagctcggtaatcgcgggcacttggcgcaggaggcgtagcgcatcgaatcggcgctgttcgatcgagcctccggaccagggcagctgggtggtccagccgagctggctttcgatctccttgacgaaatgaccgatcttggccgcggccgactcggcctgctcgtgctgaacccggatcagcgcagccttgtgctcgcggtagtagaagaagacctcgaacaggccgttgaccagcagcgcgatggccacgacggccacgaacagggcgacatacttggtgaacagccggatcctgatgccgcggcccgtttcgccctgccctgcctggcttggtgccgcactggctagcgttccagcttgaggtgagtcggggtggagggaaaggctcatcccgcgaaacctagcaagaagaccgattcttgtctctcgcgggcgcgcacagggcttgcaacaagctcaacgaaaaaggcggcagcggatgaccgctgccgcccttggcaccagccttgtctgcggttcaggtcggccgcagcgcttttgatccgaggtcgaggtcgttgatctgcttgttccgctccgaatcggccgccgcgcgatgatcggtcgccagcaccacatagaccgccggcaacacgaacagcgtgaacagcgtaccgatcgacatgccggccacgacgaccagaccgatcgagaagcggctggccgcacccgccccggtcgcggtcaggagcggaatcaggccggtcaccatcgcggccgtggtcatcaggatcggccgcagccggatgcgagccgacatctcgatcgccgagcggcggtcgagccgctcgttgatctggagctcgttggcgaactccaccatcaggatgccgtgcttggtgatcaggccgaccagggtgagcagaccgacctgggtgtagatgttcatcgtcgccgcgccgaagaacagcgggatcagcgcgccgacgatagccatcggcaccgagatcatgatgaccaacgggtcgcgcaggctctcgaactgcgccgccagcaccaggaagatgatgatcagcgcgaagccgaaggtgatcgcgagctgattgccttcctgcacatattgccgggaatcggccagatagtcgtggctgaagccctgcggcaacttcttggcctcaccttcgaggaagtccaccgcagcaccgacggtcacgcccggcatcggcactgccgagaacgtcgccgaattgagctggttgaagtgagtcaacgaattcgggtcggtcttggtctcaatcgacaccaacgtcgacagcggaagctgctgcccggtattggtcgtcacataatagccgccgagcgattccggggacagccgcttggcacgcggcacctgcgggatcacctggtacgaacgaccctcgagattgaagcggttgatgtagttgccgccgagcagcaccgccagcgtagcgccgaggttctgcatgttgacgccgagatcctgcgccttggtgcggtcgatcgtcaccttcacgttcggctggttgtaggcgagatcgctgtcggaaacgatgaacatgccgctgttgcgcgcggcctccttcagcttctccatctgctcatagaccgtctggaacccggcggtggagttgatcaccatctggatcggcaagccgcccgggccgcccggcagcggcggcaggttgaacgcaaaggcttgcaccccctcgattttggagagttcggcctgcaccagcggcttcagctggatcgccgagcgcttgcgctcgtcccatggcttgagcagcatgccggcgatgccgccctgcggaccgttgatgccattcagcacgaagcgcagatcggtctcggggaatttcgcgaattccttgtcgagcttctcgccgtagaaatcgagataatcgatgttggcgtatttcggagcctttgtgacggcgaacacgatgccctggtcttcctctggcgcaagctccttcgaagtgtgcatatagaggaagccgacgagaccgaggatcgtgaccgcgaagaggccggtaatcgccttgtagtcaagcgaacgatcgagcttgcgcccataccagcgcgtcatcgcaccgaacacccggttcacgagcttggcgaagcggccctcctcggtgttcttcagcaacaccgagcacatcatcggcgagagcgtcagcgcgattacgcccgacacgatcaccgagcccgcgagcgtgaaggcgaattcgcggaacagcgagccggtgaggccgccgaggaagccgatcggcgcgtagaccgccgcgagcgtgatcgtcatggagatgacaggacccacgatctcgcgcgcaccttgcagcgaggcctggaccggtgtcttgccctcctcaaggtggcgatggatgttctccaccacgacgatggcgtcgtcgacgacgaggccgatcgccagcaccatcgcaagcagagtcaagaggttgaagctgaagcccagcgccagcatcagggtgcagacgccgatcatcgacagcggaatggtgacgacggggatgatgaccgagcgtagcgaggccaggaacaggaagatgaccacgatcacgatgatcacggcttcgcccagcgtcttctccacctcgtcgatcgaggactggatgaacttggtcgagtcgtaggcgactttcatcttcatcgacggcggcaagttccgctcgagctcggggaacagcgcgcgcacgcccttcaccagcgtcagcgggttgccctgcggcgttgcctgcacgccgatgaagatcgcgtgctcgccgttgaaggcgacgctggcatccgtgctttgagcggcaagttcgacggtggcgatatcctccatccgcacgaagccgccgtccttggccttgacgatcatcttcttgaactgatcgacattggtcaggccggtattggtcgagacgttcgaaacgatcagatagcccttggtctggcctgccgcggactggaagttgttggcctggatcgccgccgcaacatcggtcggcgagacattgcggccggccatcttcacggggtcaagccacagccgcatcgcgaaggtctggccgcccaagatgtcggccgaagccacgccgtcgacggtcgatagcaccggctggaccacgcgcgtcagataatcggagatcgccgagcccgacagttcttcggacgagaagccgagatacataacggccgtagtctggcccgtggtcttggtgacgatcgggtcgttggattccttcgggatcaggtatttcaccgagttcgtcttggccagcacctcggtgagcgcctggttcggatcgaagttcagcttgatgtagacctgaatggtcgaggtgccgagcaccgaagaggaagtgatgtagtcgacgccctcggcggaggcgacggcctgctcgatcggcgtggtgatgaagccctggatcaggtcggcagacgcgccgggatagacggtcgtgatgttgatgaccgtattcgacagcttcggatattgccggatcggcagcaccatcgccgcacgcaagccgatcagcaggatcagcaggctgacgacgaccgacagaaccgggcgcttgatgaaaatatcggtaaaggccatcgcggcgatctcgatttcttaggctcaagataaagtgatccggcggagccggatcacctgagtgtatttgtcagtagcgcggcggctgcgccgggatcggcggggccgggtcggtggagatcgacaccggcgcacccgattgcagcttgagctggcccacagcgacgaccttgtcgcccgccttcaggcccttgacgatttcgacgcgaccctcgacccggctgccggtctgcacgaaggtgcgcaccgccgaaaggctggtcttgccgtcgtcttccttcttctcggtgatcacgaacacggagtcgccgtagagcgtgtaatcgaccgccgtttcaggcacagtgatcacggcgggcttctccggcagcaccactgtcgtggtgacaaacatgccgggcttcaggatcttctccggattggcgatggtcgcctgcacgcggatgttgcgggtgtcggtggagatttgcggctcgatcgtggtgatcttgccttcgaaggttcggcccggataggcgtcgaccttgagcctgacggcctgtccgactttgaggctgccggaatccttttccgtcacggtgaagttggcccacagctgcgacagatcggtcagcgacacgatagcggtgccggcggtgagatattggccgacctcgaccttgcgcacgccgagatcgccagagaacggggcgcgcaccagcttctgcgagatcaacgcctcggtcttggcaatgccggccagcgcctggtcgtaggcagcctgggcggtatcgacggttgcctggggaccgaactggcgtgccgccagctgcttggcgcgatcgagcgacagctgcgcgacggtcgcctgtgccttgtaattggcgaggtcgccctgctccggcgcgtcgaacagctgcaccagcggcgtgccggcttccacacgcgtaccaggttggaacttgatctcggtgacgcggccgttgacgtcggcgctgacgtcgacctgatgcacggcgacgaggctgcccaccgcggtgagcaggttcggcaccacctcggacttcgcctccgcggcgctgacggcggtcggcggcggcttgttgctggcgaagaactgcttgatcatctggccgcggaaataattgaaccagacgaggccgccgacgagcgcggccagcagcgtgccgacgatgatgaaccacagcaccggccggaccggacgcttgggagccttgctatcgatcggttcgcccgaaatcttgtgttcggctacgacgttcatgtcatgcactttctgcaatcgccgcctcgccggcatctgaggcctgatcgcggcccagatgcgaagcaattgcggcgtcgttaagtccgatacccctcaggagaaactcacagagctgccgctccagatcgttggccttgccgtaagcgagacatggcttggccggcagcctggtcagcgccgcagtcatcaccgaatgatgcgcgaaccagaacaggttgagcggatcgccgtcgcatggccgcgcatcgccgctcgcaatcgcgcgttcgagcgaggcgacgaagacagccccgatcagcgtctcgatcttggcatatagcagacgggcgaattcgccatcttccaaatgactcgtggccatcagccgcagacgctgcgcctcttcctgatcgggaccatccgcgatctggaggaagtgttcgaccatgccgcggatcagttcgaccagagtggccgtcgagggctcccgttcgagcagctccatgaaggccgggtccgcctcgcactcgtcgctcaggatttcggcgtagagcgccgccttcgaggggaaatgcttgaacagcagcgcctcggaaatggcagcggcggccgccacgctcttcgtcgtggtgccggtataaccatgtcgggcaaagcagcgctttgcggcaccgaggatcaattgacgcctcaggtcgctcgtcatacgcaatgagctcatgctgggtgagtaagcactcacccacgcagaagtcaagcactatgttgcatcgcaacctgaatgcgttgcaaactcaggggaaattcgtcaggcggcccgcaagtcgctccggtcctagatcggctggaatcccaggtcgccgcggatccggttgacgatgtaggttccgtcacggctgggcaggatgcgctccaggttggcgctgtcgatcttcacattggcaaagcgcggcccggcggagacgtcgtggacggctttggcgaaggcctcgacctcggccatggtcgtgacggcccggctgtccgcaatgccgcaggctctggcgatgccgacgaggtcggcggccgcggacgtgtggctggtctggccgccggtctcgccataagcctcgttgtcgagcacgacgatggagaggttgcacggcttctgcaggccgatggtggcaaggctgcccatgcccatcagcatctcgccgtcgcccgtgatgaccaacaccggcagcttcggctgcgccagggcgaggccaaggccaatcatcgcggcgccgcccatgccgccccagagatagaaattgcgcgcgtggtcgccgaccgcgcacatgtcgttcgtggaggcgcccaggccgccgatcgcgacgacgtccctgcggtccgcgagcagtgtggacaccacctggcggcggtcgaggagattggccttgctcatttggtgaaaaccttggcgccgatcaggcgctgcgacagaaggacggcagtgggcgtcagcgcgttgtaggcctgcgccgcggcggcctcgagcacggccggcacctcggccgcgttcgaggcgcgcagcaccttgacgccggagagctcgaacacgccttgcgtggtcgatcccatcggcacctgccacggattgaactcgccccactcgccgcgcatggtcacgagcgtgaggaacggaaaacgcaggatcgggatcagcgacagcatgttgatacaattgccgacgccgctcgactgcatcagcagcacgccgcgctgtcctccggtccacgcgccggcgagcagcgccacgccctcctcctccgtcgtcaagggaatgccgcgcatcgtggaggagtccagcacgcgctggatcagcttggaatgaccggcatcgggcacgtacggcacctgccggacgtcgaagcgctgcaacgtcgcgaaaatatcgtcaggccaactcggcgtcgtgtcggcagcgtcagtgcgtgcgtgcattttcctgtccggtcggctagcaaggtgcaaagactgtagacgcatgcacgcgccaaccagaacaacaaaaacggcatatcggctttaaccggcgagtataacgggatgaacgcagatgcgaaggcgctggccgcaagcttcgacctcgagaagctgacgcctgagttctacgataacccctacccgacctatcgtgcactgcgggagaacgagcccgtcaagcgcctgcgcaacggcaccgtgttcctgacccgctacgacgatctcgtcaccacctacaagaacacgaaagcgttcagctcggacaagaagcgggagttcgcgccgaaatacggtgacacgccgctctatgagcaccacaccacgagcctcgtcttcaacgatcctccgtcgcatacccgcgtgcggcgcctgatcatgggcgcgctgtcgccgcgcgcgatcgcgagcatggaggccgacctgatcaagctcgtcgaccgcctgctcgacgcaatcgccgccaagggcagttgtgagctgatcgaggacttcgctgcttcgatcccgatcgaggtgatcggcaatctgctcgacgtccctcacgacgaacgcgggccgctgcgcgactggtccctggcgatccttggcgccctcgaacccgtggtgtcgcccgaagcggccgcgcgaggcaacaaggcggtgacggatttcctcgcctatctcgaaacgctggttgcgcgccggcgccagaagccaggcaatcccgagcgcgacgtgctgacgcggctgatccacggagaaggcagcggcgaggagaacggcgagcggctgaccgagaaggagctgctgcacaattgcatcttcctgctcaatgccggccacgagaccaccaccaatctgatcggcaacggccttgtcgcgctcgaccggcatcccgaccagaagcagcgcctgatcgacaaccccgacatgatcaagaccgcggtcgaggagatgctgcgctacgagagctcgaaccagcttggcaaccgcatgaccaccgagcgcgtcgaactcggcggcgtcatgctcgaggcagggacgtcggtgacactgtgcatcggtgcggccaaccgcgatcccacgcagtttccggaccctgaaagcttcgacatcgcgcgcacgccgaaccggcaccttgccttcgccaccggcgcgcatcaatgcgcgggcatggcgctggcgcggctggaaggcgcgatcgcgatctcgcgcttcctggcgcgcttcccgaactatgccgtgagcgggccgccagtgcgggggggacgggtccgtttccgcggctttctgagtgtgccctgctcgatcggctgagggaccggcaacaaaccgcgaaaacaaccccatgcacagtagcccggcgtccgtgcaaggcgccgaggatttcggctaagcctctgagatccctcggcagtagactaccggtgactaaatacctacaccgcggtcctgtggcgcgcgatgcaggttcgcagcacctcgtccatcggcttggcccaccactcgttggagaagatctcgatctcggaatagccggcaaagccctgcgcttcgaccgcctgacgcaccgatttgatatcgatgacgccgtcgcccatcatgccgcggtcgttgagaatatcttttgtcggcaccagccagtcgcagacgtggaaagcaagcaggcgatctttcccggcccgcgcgatctgccccatcagctcagggtcccaccagatgtgatagacgtcgagcgcgacgccgagcatgccagttcggccgggatcgagccggtcgcagatgtccagcgcctgctttgtggtgttcacgcaggcgcggtcggctgcataggccgggtgcagcggctcgatcgccagcggcagctttgcctgtctggcgtagtcgagcatctcggcaagtgcttcttcgacctgcccgcgcgccgccacgagatccttcgaggcctcgctgcccggccgtgaatattgcggcagaccgccgacgacgaggacgatgcagggcgcgcccagcgcctcggcttcgtcgacgcagcgcctgttgtcgtcccgtacctcgccgcagcgcgaggcgtccgacgtgaacatgccgccgcggcaatagcctgacagctcaagtccggcatcgcggacggcgcgcgtagcgcgttcgagcccgacagctgcgacctgatcgcgccaggggtcgatggcgcggatgccgtgcttcgcacaagcgtctatgatcgcgaggatatcaccctgcttgcggacggttgccgtgttcagcgatagccagcgatggtcggacgagaagtcgcgcatcaggattcgataccgtgggtggcgagcacggtcttcatccgctgcgtcgcgagttcagggttggcgagcaggccggccttgtcagccagacggaacaactcggccagatgcagcgtggagcgcgtgctctcctggccgccgaccatggtgaaatgatcctgatggccgttgagataggccatgaacaccacgccggtcttgtagaaacgcgtcggcgccttgaagatgtgacgcgagagcggcaccgtcggccccagcacatcgtggaagccggcctcgtcgccggccgccagccgcgacagcgcataggatgccgccggcgcgatggcatcgaagatgccgagcagcgcgtgcgaaaagccctgctcgtcgccggcgatcagctctgcgtagttgaagtcgtcgccggtatacatcctgatgcgcttgtcgaggcggcggcgcatgtcgatctcgcgctgcttgtccagcagcgagaccttgaccccgtcgaccttggcggcattgccgttgatgatggccacagccgcgtccatcgccttgtcgaggtctttggtgccccaatagccggtcagcgcgggatcgaacatgtcgccgagccaatggatgatgacgggctcgcgaacctgcgacagcacgcggtcataaaccttggcgtaatcgtcggcgttgcggccgagcttggccagcgcgcgcgacgccatcaggatgatgcggccgccaaccttctccaccgccgagacctgctcctcataggcgcggatcacgtcgtcgatggtcttggcatcttccaccgcgagatggtccgtgccggcacccgagaacaccagcgcgttgcggcgctttgcggcaccgaccgagcgcgtgatcagctccagcgaggtcggccagtccaggcccatgccgcgctgcgcggtgtccatggcttcggcaacgccgaggccgaggtcccagacgtgctcgcggaaggcgacggtcttgtcccagtcgacggccaccgacagccagggatcgttgtcggcgaagggatcggcgacggtgtgcacggcggagaaggcgatgcgattgagcggtccttccagctttgcgggaaacgtgcgcgaggccgcgagccgataggtctcgatcgagcgatcggccttgggcagcttcagcgacaatgacgacatgggttgaacgggcttgttcatgatttcagacctcttcccgtcattgcgagcgaagcgacgaagcaatccagactgttgccgcggatggacactggattgcttcgcttcgctcgcaatgacgggttggtggacatccgagtttactcgacggacctcacgccttgatcggggcgacgtcgatccagcgccgctccttccagctcttcagcgcgcattcggccagctgcacgcccttggcgccttcgagcagcgtgaacttgtagggcgcatcctcgtagacgtgccggatgaacatctcccactgctccctgaagccgttgtcgtaggtgacgttgtcgggcagcttctgccagtcgccgtagaaatcgtgcagccgcttctcgtcgggattccagaccggcctcggggtcgcctgccgcgcctggatcatgcagtcggtgagccccgcgaccgccgagccgtgtgtgccgtcgacctggaacgtaacgaggtcgtcgcgatagacgcgcgtcacccatgacatgttgatgtgcgcgatgacgccgccttcgagctggaatgtcgcgtacgcggaatcatccgcggtcgccttgtacttcttgccctgctcgtcatagcgctcggggatgtcggtgttgccgatgcagctcacgctctgaacgttgccgaagaggttgtcgagcacgtagcgccagtggcagaccatgtcgaggatgatgccgccgccgtcctcgctgcggtagttccaggacggccgctgcgcctcctgccagccgccttcgaacacccaatagccgaactcgccgcgcaccgagaggatgcggccgaaaaagccgctatcgcgcaggaaggcgatcttcttcaggcccggcaggaacagcttgtcctgcaccgtgccatgcttgatgcccttggcattggcaagcttcacgacctcgagcgcctcctcgaaattggtcgcgatcggcttctcgcaatagacgtgcttgccggcattgatcgcctgggtcagcaagcccggacgcgcctgggtggtcgcggcgtcgaagaacatggtgtcgttcttgtcggcgagtgccgcatcgagatcggtggtccagcgcgtgatgttgtagcgcctggcgagcgcctcgaccttgtcggcgctgcggccgaccaggatcggatcgggcatgacgcggtcgccgttcttcaggcggacgccgccctggtcgcggatcgcgacgatggagcggatcagatgctggttgagccccatgcggccggtgacgccgttcatgatgaggccgaggcgttgggtggtcatgccaaatgctcctgagatgatcctggctgttcgagcgggcacagcgccggccagtccggatggaccgacgtcgcgaaacccgttgcgtgaagcgatcccgtcaggagatcgccgtcgtgaatcttgaggcggatgccctgcccggcatcggcatagagatcgggatgcgcggccgcgaaggccgctgcctccgccgcaggcgtttcgccgaagccgtcgacatagtgatggccgttgcgttcggcatgggtgacgccgaggaaggcaccgagcgcgagatcctgctgcacggcgaggccggcctggcaggtgaggtcttcgccggtgacgtagaaagtctcgctctccgcgctccatttcgctgcacgcgtggcgttgacgatcgacttgtaaattcccttgcaggatttcgaggagatgccgcgatagccgagtgcccgcgccgtcgggaaggcatcataggaatcgtcggcctcgtcgatgatgaaaccacgcgcagccaatgcgccgagcggcgattgccgcgtgatgtcgcgcggcatcggttgttcgatatagagcagacgcgtggcgatcggacgcagcgcggcgtcatgatcaagccggtccatcagcgcctgcaatgcggcgaagtccgcatattgctcgttggcgtcgagcgtcaccctgtagtcgcgcccgagcgtgtcgagctccttgccgatccgcgcgagccgcgccgtatcggcggcgggatcgcccgacagtttgagcttgaagtagcgcgcgccggcgttctcgcgcggatcggcgacgccgccctcgccctctatggcgtcatccaggccgacggtgtgcctgatggcaacacgctgcagcggcacccgacccgagagaaacctggcgatgtccaattttgcgaggtcaggcgacagccgcgcatcgatgcccgcgatattgccggccatcccctcgaagaagttggtttcggcggcgcgcagcagcgcatcgaggatcgccttgtcgatctccgccgggccataagccgcggcgagcggcggaatgttcttgttcgcacaggtcgcgacctggtccccgatgcacgaggcatgcagatcgaacgcggtctgatatccggcgctcgccagatagagcccgcgcgcgatctccagcgattctctcagcccctctaccgtctgtgccggcgaaagctccggccgcttgtcgaaccacttcggcaccagcagctcggcgctggcgccgacagcggtccccctgccctcaacctcgagctcgacccgcacgaacagctgcggcgtggcgctgatggtgatcgcgccgaagcggaacggccgcgcgaatggcacgggacgttcgaagaaggcgatgtctcgcagcttcaggcgcaccgacatggtcctatgaagctcgtcatagccgggcttgtcccgggcatccacgttctttgtcgcacggagcaagacgtggatggccgggtcaagcccggccatgacgccttgaaagctagagctactcccatcactctcaatccaatgccccttgcgagaagaagtgcttgcggatgcgctgcacgagctcggtgaagacaggatcggccatcgcgtcgagcgagcgcggacgcggcagtggcacgtcgtagatcgcggcgatcgcgccggggcgctcggtcatcacaagcacgcggtcggcgaggaacacggcctcgggaatcgaatgcgtgatcagcaacaccgtcttcccggtctcgcgctggatccgcatcaattcgacattcattcgctcgcgcgtcaacgcatcgagcgcgccgaacggctcgtccatcagcatgatcctgggatcgtgcaccagcgcgcggcagatcgaggcacgctgctgcatgccgccggagagttgccacggtagcttcttttcgaagccttcgaggccgaccagcttcaacagctccttggcacggggaagatacttgtcccgcggcagccgcttcatgtcgatcggcagcatcacgttcttgaggatgttgcgccagggcaagagcagagcgttctgaaagacgatgccgacattgccgtgcggcgtcgtcaccttctcgccctcgacgaggatctcgcccgtggtcggcggcagcaggcccgagatcagcttgagcaacgtggacttgccgcagccggaagggccgaccacgacgaagaactcgccgtcgttgatgtggaagtcgagcggccgtagcgacggcacgtcgccgtcgcgtgtccggtaggtcttggatacgcccgacagcttgatgcccgacgcatcgccggcagcccggccgctcaccagtctcagatgtgcagccggctgcgcggtttcgctcataacagtcgcaggtttcacgagccgctcttcggcagatagtcgttggtgtagaaggccttcgggttctccttggccttggcatcgaggccgccatattcgaccatcagattgaccgtatcagtcatgttctggtcgctgacctggaacggccgcttgctcttggtctccgcggtccggtagagcggaatcgtgagctcaaaaccctgcgtgagcgtatcgatcttgccgcccttcgggttggcgtcaaggatcgcctgcgccgccgccttcggctccttttcggcggcttcgaccgctttcgtcgtcgccgacatgaagcggcggacgagatcggcattggccttcacataatcggcgttggcgatgatgccggacgagaccatgttgatgccgtagtcggcgaacttgatcggatagacgtccttgccggtggcgtccttgatcttcatcgactggtccatgacgtagccgagcagcagatcggcctggccgttgatgacggcgttgagcttggtctggccgtcgccggcgacggtcttgaaatcgctttccttcaagccggtcttcttcaggaacagcggccagatctgtgtcatggaatcggcgggcgtgatcgccaccgtcttgcccttgatgtcctcgggcttcctgatgttcttgtcggcgaagcccatggcggacatcggcgaggtctggagcaggacaccggtcgcaaccaccggcgcccccttgatcgcggcgcgcatcatggtggggacgtcgacatagccgaaatcggccgtcttggcggcgacagcctgcgtggtcgccgccgagccgcggccttcctggatctcgatatcaatgccctcggccgcgtagatgcccttggccttcccataatagaacggcgcatgctcgccatagacgtaccagttcagcatcagcacgaccttgtcggccgcgtgcgccggcatggccgtaaatgccatcagcgccgctgagacagccccaatcaaccgcttcatcgcttctctcccttgccgctcgttgtgccggccgttcgcggccgttcgctgctagttttggttcgagcatgatctgatcggaaaaccgctgcacacttttccggatcatgctgttaagacgcaaagatcacgtcctcgcgctggctgacatgccagggaatgaccagcttctcgatgcggtcgacgatccagaacaggaccacgccgagcagcgcgagaatgacgagggccgcgaacatcgtcggcaggtcgaacgtgccgatcgagcgctgcatgacgtagccgatgccggaatttgagccgacgaactcgccgacgacggcaccgacgaccgccagcgtcaccgacaccttgaggccggaaaagatcgccggcagcgcatgcggcaggttcaccgcgcgaaacacctgaaagcggctgccctgcatggcgcgggcgagatcgaccatatcagggtcgaccgatttgaagccctgcaccgcagacaccaccacggggaagaagccgagcaggaaggccgagatcacctttggaatgatgccgaagccgaaccagaccacgaagagcggcgcgatcgcgatcttcggcaccgactgcgagaacaccagcagcgggtagacgtagctctccaccgtcttcgagcccgcgatcagcatcgccacgggaatgccgaacagcgccgagagcaggaagccgcaaacggtcgcgtaggtcgtcggccaggcctggcgcagcagctccggccattcggtgcgcagcacggcgacgacgtcgagcggcgacgggatctggtaggcaggaatcctgaacaggcggatcgcgagatcccaggcgacgacgatgaagacgaggaacaagaacggccgaacccaggctgcattcagcagcttggaaacggcgttttgcggcttcaattcagccacgtattcctcccggtcgttcttctaggttcgggcgagaaattaacccgttggataaatactgtccagcggattccctgtgacgttttgcggcggggttcctgcgggttggcgggtgccgggaccggcgcttccttgtccccgacgcgccgcagcgcccttgtgctgctgcgccgcgtccggggcacgagaccaccatccgcatcgtcattgcgagcgcagcgaagcagtccagactgtctcgacggaaagattctggattgcttggctgcgctcgcaatgacggagcgtcgctccatccaggctacagaccaaaagctaaaccgtctgcgccaccgcgctgcgggacttcggggccttcgcgatctcgaacagcgcggccgaccgcccggtcagcgcagccaggacgaggccgaccatatgggccagcctctcgtccttggccttcttgtcgaggagatcacgcccgaagatcacgctgagcgtcgcagagttcgacaggtagaagaagctcagcgccgcgatcgagatgtagagctgcaccggatcgaccgcgacctggaagtcgccgctgtcgacgccgcgccgcaccacagtccggatcatctcgacgaagggcgagtgcatcgacttgaccttggtcgatttcttcagatgcttggcgcgtgcaaggttctcggtctgcagcagcgacaggaattcgggattgcgcaggaagtaattccaggtgaactcgatcagccggcggatggcctcgggcggatcgaggtgttcgagatcgagcccccgctcctcgctgcggatcttgtcataggcgccttcgagcaccgcgagataaagctcgtccttgttgcccacgtgatagtagagcatgcgcttgttggcgccggccttcgccgcgatccggtcgacgcgcgcgcccgccaggccatgagcggaaaattcctgcttggcggcttcgagaatgcgcagccgcatcccctcgggatcgcgctgccatttctgagttcgctttggcttcgtcaaaccggttgctcgctgaggagtcttggtgtgccatgtaacacgcaggcgagcgtttgagaacgcaaggatgttggctccgtcattccgggatggtccgaaggaccagacccggaatctcgagattccgggttcgcccttcgggcgccccggaatgacagaatcacttcaccggcttcggggagcgctccaggagcacggtctggatgccgcaggtgccgctgcgcaccgtcatgatccgcgtgcccggcttgcggccgttgcggacctcggagacgtcgagcccggcggcgatcaggcgggcgcgcgtagcgtcgatgtcggcgacgcgccagctcacaccccagaggcggtcatgcgcggcatcgccgccggccacggggcggcggaccacctcgacgatgaggtcgccgcagcggaagaacatcagctggccccaatcctggtgagagcgatcgagcgccagatcgagtccgagccgcgcaccgtagagcgcggcggcgcgatcggaatcctcagtggtaacgacgacgtggtcgagcgcgtcgatcggcgcgatatcggtcgcgaccgacttcgggcgctcctcggccagttcgaggaagaacatgcgcacgccccgcgtgagctcggtggcggcacgcgtacgcttccagtgcagtacggcgcccgatccggcatcgctgctctcgacctccgtgaccgggtccggctgcaaggccacacgctccagccggcggtgcatcttgccgacgtctgcgacgcgaaagcaaaggctggcgataatgccttcctggtcgtcgagcagcgcgcgcatgcggtcggcggtgacgctgaagccgctcggcgccatcaattcgatggtcatgttgtccagggtgaacagcaccctgtccgcgccctcgcccgagttctgccaggccggtgcgcgggcgagcagcgtctgataggctgcctttgcggcaccgatatcactcaccagaacgacgatgtgatcgaggccggtgatcatcctgcacccatttgatcgacttggaacccgcggaccgaaagacggcgtttgtccgggcttggcattggcctgacatggtcgtattccggcaccatgctgatctcaagcgcttcgggcagcagatttgcgaataatttcagcgtccctccagagcggaaccggtgctagagtaatccggccggcggggaccacaagcgcatcacggacaagcaatgcaggctctcttcatcggacagacctatatcgacgtcgtcttcatcaccgaccacatgccgaccggggacgagaagcacgtggcttcggattacgcggtctccttcggcggcaatgcggtgaccgcggcgttctgctgcgccaagctcggcatcgtgccggatctcatcgccactgcggccaatgactggctggggcgcatgttccaggacatgtgcgccaagtacggcatctcgctgcatgggcgcaaggtcaaccagtcctcgctctccttcatcatgcccaaggacggcaagcgcgccatcgtccgctgccgcgacgacgagcacatccaccccttccccatcctcaatctcggcggctgccgcgccctgcacgtggacggccatcagcccgatgccgcgatccattacgccaaggtctgccgcgaggctggcatcctgacctcgctcgacggcggcggcctgcgcaccaacacccatgagctgctcgaattcatcgacgtcgcgatcgtcgccgaacgcctttgcgagcagatggacctgacgcccgagaagatgctcgactatctcaagggccgcggctgcaagatcggcggcgtcaccatgggcgagaagggcctgctctggtacgacgaaacagggacggtgcaggtgatgccggcgatgccgatcccgcgcgagcgcgtgatcgacaccaacggcgccggcgacgtcttccacggcgcctatgtctattcctacctcgcccatcccggcaaaagctggcgcgagcatttcgatttcgcgcgcgccgcctcgaccttcaagatccagcgcctcggcaacgaggccggcttgccgacgctggtcgacatcgccaaggtcaggcacgagttcgaggtcagggtctagccggggtttcccatggggcgcgtcttcgtcgccggcagcatcaacatggacgtggtggtgacggcggatcgccaccccaaggttggcgagaccgtcgcgggtcagcaggtgctgtatttcccgggcggcaagggcgccaaccaggcggtcgcggcatcccggctcggtgcgcggaccacgctgatcggacggctgggaaaggattcattcggggccgagctgaaagccttcctcgacgaacagggcatcgatctcggctatgtggtggagacggcggaggcccacaccggcacggccatcattacggtggcagaggccgacaacacaatcgtcgtcatccccggggcgaacgggctggttgccgccgacgacgtcaacgtcgtgccgctgctgaagggcgatgtcgccgtcagccagttcgagattccgctccccgcgatcgccgcctttttccaacgcgcgcgcggagccggggccacgacgctgctcaacccggcaccggcgcaggcaatgccccgcgagctgctcgcgctggtcgacatcctcgtgctgaacgagaccgagctcggcgtcctcgcaggcagcgagctctccgagagcgacgcggcggcgcggatcatcgaggtcgcgcggaaacttcaggcgcgcaaggaccagaccatctgcgtcacgctcggcaagcgcggcgtgctcgccctcgccgggcgcgaggagattgccgtgcccggccgcgcggtgaaggcgctcgacaccacgggcgccggcgattgcttcgtcggtgccctggccgcgcaactggccgacgacgtgcccctgcgcgccgccctcacgttcgccaacgcggccgcttcgatcagcgtgcagcggatgggcgcagggccgtcgatgccgacggcggaggaagtagcagccgtcttgtagcccctatgccagcgcgctcttcaggtcgaagctctcgtccgcggcctgctccggcgtgatggagcggtccatggcctgcaggcggcggccgaacatgtgatcgccggcgcgattgatcgattcgatgccgagcagcttgtcgcccttgtagcagaacgcggagaacgccttgttggcggggttgccgcgcagcacgacgcgatcatagccggtggtcagcccggcgatctggagcttgtcgtcgccctggtcgctccagaaccagggatggctgtcgtacggcttcctgtcgccggtcagccgcgccgcgaggcagcgggcgtgatcggtggcgttctgcaccgattccagccgtagcgagccgccgaagcgcgggcttgcgaacagcgcgcaatcgccgatcgcggagatatcgggatcggcggtggagagatattcgtcgacgatgatgccggcggcgacggggagccccgcctccgcggcaagctcgatgttcggcagcacgccgacgccgaccaagacgaggtcggcgggcagatgccgtccgtcgctcaaggaaacgccggtgaccttgccgccctcggcctcgatcgcggtggcctgcacgccgagatggatgcggatgccggcctcgcgatggcgctcctggaaatactccgagacctcagccgtgaccgcgcgcgccatgacgcgcggggcgagctcgagcacgtcgacctcgagccctttgattctcgcagtggaggcgaattcaagaccgatgaagccggcgccgatgatcacggcgcgcttcttcgtgggcatgatctgtcgcagtgcctcgctgtcgtcgaggatgcgcagatatttcacgtcgggcaggttggcattgggcaggtcgagcaggcgattgcgcgcgccggttgccaggacgaggtgcccgtatggcagcgtgtcgccggatgcgagatgcaccctgcgcccggcccggtcgatcgacaccgcgcggcccgcgatcagctcgatgttctggtcctggtaaaatttctccggccggaacatcaggctctccggcccggccgagcccttgatgtaggccttcgacagcggcggccgctgatagggcagatgcgactcgtcgttgatgaggcagatgcgcgcggagaagcctgcctggcgcagcgatgccgcgacctggtagccgccgtggccggcgccgacgatgatcaccggaccgcccgtcattggagcagcccacttccggagacacgagcgtgacccatgtcgtctccctctcacgctgattttggtttgctgacctcaggaggagccggcgctcgtgtccgttccttggcaaaggcgcacctatttgagcctatcgctccgccgggcgcaagagcggcggccggggattgtctccgctcgccttctgcgatttagttgcagcaatcatctcatgccggggatttcgatatgccagctcccgtctcgaagcccgacgatcccgccctgctgcggatcgacggcccgatcgcgaccatcacgctcaaccgccctgccgcgtacaacgcgatcaacctcgccatcgcgcagaagctcgagcagctcgcggcctatatcgagggcgacgacagcatccgcgtcgtggtgctcgaaggcgaaggccgcgccttctcggccggcggcgatctgcagacgatcggggccgccgccgaggccggcacggtgacgcccgtcgtcggcgagctcttgaagcactatcacgccttcatcgagatcgtcaggcgcatgccgaagctgtcgctgtcgagcgtgcacggctcggccgccggcgccggcatggggctcgccttcgtcaccgatctctgcatcgccgccgatgacgccaagttcacgccggcctatgccaagatcggggtgtcgccggacggcggctcgacggtcgggatcgtcggcacggtcggctctcgccgggcgctgcagatcttcctggccgaggacaatttcaccgcgcagcaggcctacgaatggggcctcgtcgccaagaccgttccggccgccgatctgaaagcggcaacgcggcaattcgccgagcggctggcgcagaacccgcccgcggcgatcgccggcaccaagcagctggtctaccaggccgcgaccacgccggtgaagcagcagctcgatgccgaggagcacaagatcatcatggcgatgaacacggacccgtttcgcgccgccgtgaagaagttcaccagcaagggcaaatagcgccgcgctcgctcagcgcttcgcggcgccgggcccggccctctgcatgaaatcgaaatcgcagccctcgtcggcctgcaggatggtctcgttgaacagccaggcgtagccgcgccgcgcctcctcgggtgcggcggccggcatcaaggcggcgcgacggcgttccaactcgacggcatcaaccagcagctcgatgctgcgccttgcgacatcgaggcggatcatgtcgccgttctcaaccagcgccagcgggccgccgacggcggattccggcgtgatgtgcagcacgatcgtgccgaacgcggtgccgctcatgcgcgcgtccgagatgcgcaccatgtccttggtaccgttccgcgccagcttcttcgggatcggcagatagccggcttccggcatgcccggcgcgcctttcgggccggcattgcgcagcaccagcacgtcgtcggcagtgacgtcgagatcgggatcgtcaacccgcaaggtcatgtcctcgacggattcgaacacgacggcacgccccgtatgctgcaacagcttcggggtggcggccgattgcttgatgacggcgccgcgcggggcgagattgccgtgcaggacggcgaggccgccttccttcttgatcgggttgtcgcgcgggcggatcgcgtcctgaccgggcacgtcctccgcattcgccgcgacgtcgcgcagcgtctggccggtgatcgtcttggcatcgagatcaacgagatcgccgagctgcgccagcaatttcggcacgccgccggcgtgatggaaatgctccatgtaatgctcgccggagggcttgaggtcgaccagcaccggcacctcgcggccgatctggtcgaacacttcgagatcgatccggtgcggcgagcgatgggccatagccgtgagatggatcaggccgttggtcgagccgccgatggcctggagcacgacttgcgcgttcttgaatgacgagggcgtcagcaattcgctcggcttcggtcccttggccttggccatggcggcggcaaccttgccgctggcctcggcgagacggaagcgctcggcatgcggcgccggaatggtcgcgctcatcggcagcgacaggcccatggcctcgatcatgcaggccatggtcgaggccgtgcccatcaccatgcaggtgccgaccgacggcgccagacgcccgttcaccgcctcgatctcggcatcgtccatttcgccggcgcgatatttcgcccagagacggcggcaatcggtgcaggcccccagcacctcgcccttgtgatggccgaccaccatgggaccaacgggaatgaccaccgtcggcagatcggcgctgatcgctgccatcacctgcgccggcagcgtcttgtcgcagccgccgatcacgatcgccgcatccatcggctgggcgcggatcatctcctcggtgtccatcgccatcagattgcgcaggtacatcgaggtcggatgcgcaaagctctccgcgatcgaaatggtcgggaacacgaacggcatcgcgccggagagcatcacgccgcgcttggcggcttcgatgatctgcgggacgttgccgtggcagggattgtagtcgctataggtattggtgatgccgacgatcgggcgctccaatgcatcatcggaatagcccatggccttgatgaacgccttgcgcaggaacaacgagaagccggcatcgccatagctggtcaaacccttgcgcaagccactcgtcatcagatcgctcccttcagctttgtcgtggtggtaaggccagtcccctgattgtcaacaagccgggctgcaggcctgacgctttgtagcgggaccactcaagcgagcatctcacggcgctgcgcgtcgcagggtcacctcccgaagatgatcccgcatcgggttcgcccgtctccggctcccaaatgcgcgcggcgtgctccggttgcagtgtccggcgtaaattggtggaacccggcgccactccaattctcacaagggcaggtgcgccacatcaaggccgcctgtccctgaccagaaatttcgtcgaacgctactaagaatgattagcaagtagttgcatgcccgaccattctgtggaatctttgttgcgaatgacttgcaatcgcagggaggctgcgcgtgaacccgagctccctgcgtcgatcagtgcccttggttcgcgcgggttggtggatgtcgtgctgagaaaatcgagcttcaggggcgccatgtcggcggcaacgatcgtcgccggtcatctggcgagttgcgtctccgcctcagctgacgagggcgcacgcggcctcgcaaatgcccccccctcgctcgccgccggcgtcgacaagctgacgggaggattgccgtcggcccatgcggagatcgacaccgagcacatcttcggcttcagcatggggtccgatatcggcaagcccggcgaaatcgaggtcgagttcgagaatgtcggcgcgttcggcaagcgctccggcacttacgcagcctgggccaatctcaatcaggtcaagtacacggtctcggacaatttccggatcgcacccggatttgcactgagcggacagcacatcaatggcgttcccgggcttaccgatcatcgcgaccttgccttcagcggcgcagcgctcgaactgcgctacaagctcgtcgatcgtgccgtcgcgcccttcggactgacgcttcatgcacagcccggctggagccggatcgacgacgccagcggcgtgcatatcgcgcagtatggcgcagagtttgccgcgctgttcgatcgcgaactgatcaaggacaggttgtttgcggcattcaacgtctggtacgggaccggcggaacgcgagagatctcaaccaatctctggcggcacgattccgagatgcagctccagacagcaatctcatacgcagtgcagcccgaactgctgctcggcctcggcattcgctacgcgcgggcctacgacggcggcgcactcaaccgcttcataggcgacgcggtcttcgccggcccgaccttctcctacaccatctcgaaggaagtcggcatctccggcacctggcagatgcaggttgcaggcggggcagtcggagacaaccgaagcctcaacctggagcagttcgagcggcaccaggcgctattgcgtctcaacctgcatttctgatgtgcgcgcccgacgcagttacgtccgcggcctccgcagcgcaacgtttccgggcatgtcggccaggcgcgtcttcaggcgcggcacggcgaaatcgaggaacgctcgcagcttcgcgggcatgaaccggctgggcgaatagacgaagctgaccggttgcgggggcggttgaaagtcctgcaggagcgcaacgagcgctccagatttgagcgcatccgacgccaggtaagagaacgcgacggtgatcccgatgccggcgcgtgcggcatcgacggccgattccaggttgctcgcaatgaagcgcgaccgcacgggcactgcatactcggtctgccctcgcttgaatctccacgtgctcggcgattgaagcggaggatagctgatgcagtcgtgggcgcagagatcatccggagacttcggcattccccgcaacttcagataggccgggctggcgcaggcgacgcggtgaatttccccgacgcggacggcgataaggccactgtcggcgaggtcgccgacgcgaagcgcgacgtcgatgtgctcgtccaggagattgagcgtccggtcctgcaagatcagctgaacgtccacttccggaaacgccgcgaggaactcggccaggatcggctgcaagcaaaggcgaccgagcgcgaccagcgtcgtgatactcagatcaccacgcggcgtggtgtattcgccggcggcaacgcgctcggcttcggtgagatcggcgagaattcgcttggctgcagcgatgtaggagcgcccggcgtccgttgggacgagcacgcggctcgatcgatgaaacagcttggtctggagatgctcctcgagctccgacaccttccggctcaccgttgccaacggcattttctgacggcgcgcggcggccgataggctgcccgcctccgccaccgccaagaccaccgacatgctttcgagacgatccatcggacacttccatattctggaaggatagatcccgattttgccagatacccatcatttccggaagtgcctattcctctcagcaccgaaaccgaaggagagacgaaaatgacccagccccgaaaaggcactgccctcatcaccggtgcttcgaccgggatcggcgcgatctacgccgaccgactggcgaagcgcggccacgacctcatcctcgttgcacgcaacaggcagcggcttgcatcgctcgcgcgcaggctgagcaacgaaagcggccgcaaggtggagacggtggaagccgatctcacatcccctgccggcctgcgccgcgtcgagcaactcgtcggaaccaacggcgacatctcggtgctggtcaacaacgccggcgtcggcgcctcggccccgctgatcgaatccgacatcgacaagatggaggacatgatccgtctcaacgtcagtgcactgacgcgcctgacctacgcagcggtgcccggatttgttgcgcgccgccatggcacgatcatcaacatcgcttccatcgtcgcgatcgcgccggagctgctcaacggcgtctacggcggctcgaaagccttcgtgctcgcattcacccagtcactcgttcacgagctcgccggcaagggcatccgcgtgcaagccgtgctgccgggcgccactgcgacggagttctgggacgtcgcgggcacgccggttcaccagctcccggcagagatcgtcatgtcggccgacgatctggtcgacgccgcgctcgcaggtctcgacctaggcgaagtcgtgacaatcccggcgttggccgacaagtcggagtgggatcgccacgagagcgcgcggcttgccatgacgaacaggctctcgagcgccattcccgcccctcgctacaacctgcacacgcacgtgaatgcgtgagcgaacaaccagcatcaaacggagatcaccatgtcacgcatcatcagccattcgtccacctcatccatcgccctgcgcacgatcagctggcgcgaacagtctgaacgcctgctcgcctacgccgaacccatcagccggatcggtctctacgcgtcgctcgcactcatctacgcctggttcggcggcatgaaattcaccgattacgaagcgcaggggctggtgcccctggtcgagaacagcccgctgctgcgatggttctacacgctgttttcggtccgcggcttctcgacctttctcggtttcgtcgaactgagcatcgggctcctgatcgcgctccggctgtcgagcccgacctattccgcagccggcggccttctgtcggccggactgttcgtgacgacgctgagcttcatggtctcgacgcccggcgtcgtcgtgccggagctcggggcacccgcgatcacggtcgctccgggacagttcctgctcaaggacgtcggcctgctcgccgcttccttctgggtgttcacggactcgctgaaggccgtcatccgcaggtgagaactcactccgcagcgtaacagacacgaatccgaaacaggagacctccatgaaagtgccattcatcttcggggcggctttcgctgccattgccattgcgggtgcgacgcccagcgccgcccatggcatcggcgaaacggtcacgccgcatttcgagcaatcgatccccaatatcccgggcaagtcagtcgtggccctggttgtgaactacgcacctggtggagcgtcgccttcgcacgtccatgccaagtcggctttcatcttcggctacgtgctgtcaggcgcaatcgagtctcaggtgaacgacggacccagacgggtctaccgcgccggcgagagcttctatgagccgccgggctcccgtcatcccgtcagccgcaatgcgagccggtccaagcccgcaagcctgctcgcagtgttcgtcgtcgacagcagcgagaaggatctgaccagtaccgtccggcagaatcagcatcagggagagaaacatgagtaagcgtctcgactacaaccagatcgcgccggcaggcatcaaggcgctcggtggcgtctacggctacctcctgcagagccgcctttccgccacgctgatcgagctggtctatctgcggatctctcagatcaacaattgcgcctactgcctcgacatgcacacgcgcgacctgctcaagaagggagaaaaggtcgagaagatcgcgttgctgcaggcatggcgcgaggccggcaatctcttcgacgaacgcgaacgggctgccctggcctgggcggagacggtgacacgggttgccgagaccggcgtgcccgacgaggcataccaggccgcacgcgccgcgttcgaagagcgtgagctcgtggacctcacgatcgcgatcagcctgatgaatgcctacaaccgcatggccatcagctttcgcgcaacgccggcggctgccgccggctgatgcgctccccaccaaccccctcacaattcaagaaggacattcacatgacgaaacgtaggatcatggttgcggcggcgctgatcgccgcaaccagcctggcttcgctctcggcacgatccgaggagccacgactgggagacatcaagcgcacacatctcatgaaggaagctctgagcgcacccgggcgcgaggtcatccaggtgcgcgtcgattttcctccgggtgtcgccgccgtccggcacagtcatccgggcgaagagctcgtctatctcatcgaaggcgagctggaatatcagctcgacggcaggcctccgatgatcctgaaggccggagacgtgctgctcattcctcacggagtgcatcacgcggtgaagaatgtcggcagcggcaacgccgcggagcttgcgacctacattgtcgagaccggcaagccgctgttgacgctcggccggtgaacaatcctaccgcttattccagtcgatcacgcgactcgggtcggcatcgaactccatgctgcagaacgtgccgccctgaaaataatcgccgacgggatccggcttcaacttggcctgctcggccatcgcgtgttcgcagaaatcttcggcgcggccggtcgggcgatagccgaattcgtaggcccggtgattgtcccaccaggcgcgctcgttgaaggacgcgccgtagaagacctcgaaatgaatgtcgggatgctcaagcccgatgcggcagagctgcacgaggtcgtcgggcttgagccagatcgagaggcgacgctggtcgagcggcatgtcgccgaaattgccgatgcgcaggcaagtgaccttcaggccatgcttgtcggcgtagagcgcgccgacggcttcgccgaacaccttgctgacgccgtagcgactgtcgggccgcgcggtgacgtcggtgccgatcttgtggtggcgcggatagaagccgacggcatgattggacgaggcgaacacgacgcgtttgacgcccttgcgataggcggcctcgaacagattgtagcaaccgacgatgttggcctggtgaatctggtcccaggtgccttcgaccgaatagccgccgaaatggagaatgccgtcgacgccctcgcacattgcctcgcactgggcgagatcggcaaggtccgccatcttgaatctctcattcgcgccgagatccgccggcggcgtgatgtcggagagcagcaggtccggatagatcggcggcaagagctgccgcagtcgcgttccgattccgcccgaagctcccgtcatcaagatgcgcggcatgtctgacctcgtccgtggcaaccgatttgcggccatggatatctgatgctagcagacttggacagagggaacgcaacaacgagaaccgcacatgaaggatgcatcgtcccatcacgagggctggcggccggcgacccattaccctgaccctgcgatcgaagcgctcgatcctcgcttcgaaaagtactggctgaagctttctgcggtggagcggctgacgaccggcctgcgctgggccgaaggtccggtgtggttcggcgacgggcgttatctgctctgcagcgacattccgaaccagcgcatcctcaaatgggaggaagagaccggcgccgtcagcgtgttccgcaagccctcgaatttcgccaatggcaacacccgcgaccgccagggacggctcatcacctgcgaacatggcgggcgacgcgttgttcgcaccgaatatgatggcagcatcaccgtgctgatggactcgttcgacggcaagcggctgaactcgccgaacgatgtcgtggtgaagtccgacggctcgatctggttcaccgatccgaccttcggcctgctcggcaattacgagggttacaaggcggagtcggagatcgacgcgaatgtctaccggctcgatcccgtaagtggcaaggcgaccatcgtcgccgagggcgtgctcggcccgaacggcctgtgcttctcgccggacgagaagatcctgtacgtcgtggaatcgcgcggggtgccgaaccgcaagatcctcgcctatgacgtctcggccgacggcactgcgatctcgaacaagcgcgttcacatcgacgcaggtccaggcacgcccgacggaatgcgctgcgacatcgacggcaatctctggtgcggctggggcatgggcgatcccgagctcgacggtgtcgtggtgttcgcgcccgacggcgtcatgatcggccgcatcgcactgcccgagcgctgcgccaacgtctgcttcggcgggctcaagcgcaaccgcctgttcatggcggcaagccagtcgatctacgcgctctatgtgaacacgcagggcgcgctggggggataggcgccgcggcgctcttctccgtcattgcgaggagcacttgcgacaaagcattccggactgcctccgctgagagattctggattgcttcgcggagcctgtcannnnnnnnnntccggacccgatggctcgcaatgacgaaacgccggagcggttgcccgctccggcgtcatgttcgttcacgtgatgacgcttacgcggcgttgaagccggcgacggccttcacttcgaggaagtcctcgaggccgaacttgccccattcgcggccgttgccggactgcttgtagccgccgaacggcgcggtacggtcgttgggctggccctggaggttgacgttgccggcgcggatctggcgaccgacacgcttggcgtcctcgaccgacggaccatagacatagcccgcgagaccatagggcgtgtcgttggcgatcttgacagcgtcggcctcgtccttggcgccgatgatggtgagcaccggcccgaagatttcctcgcgcgcgatggtcatgtcgggcgtgacgtcggcgaagatggtcgggcggacatagaagcccttgttgacgccttcgggcaggcccgggccgccggcgacaagcgtcgcgccctcgtcaatacccttcttgatcaggccctggatcttgtcccactggccgcggttgacgaccggtccgatggtggtgccttcggcgcgcggatcgccggccttggtcttgtcggcgacggccttcgcgatcgcggcgacttccttcatcttcgaggccggcacgatcatgcgcgagggcgcgttgcaggactggcccgagttgttgaacatgtgcatcacgccgccggtcaccgccttctgcaggtcggcgccttcgaggatgacgttcggcgacttgccgccgagctcctggctgacgcgcttcacggtgggagcagcgcgcttggccacgtcgatgccggcgcgggtcgagccggtgaacgagatcatgtcgatgtcggggtgctcgctcatggcggcgccgacctcggggccgaggccgttgacgaggttgaacacgcccttcggcacaccggcttcatgcaggatttcggcgaagatcagcgccgaggtcggcgtgaactcgctgggcttcaggatcatggtgcagccggcggcgagcgcgggcgccaccttgcaggcgatctggttcagcggccagttccagggggtgatcatgccgaccacgccgatcggctcgcgcagcaccatggcggtgccgacgggctcctcgaaatgatagttcttgagcacgtcgagcgtggtcatgagatggccgaggccggcgccggcctggagcttctccgccatcggcagcggcgcacccatctcgtccgacacggcggcgccgatctccttgaggcggcccttgtagatctcgatgatcttcgacagcagcgcgacgcggtcctcgcggctggtctgggagaacgttgcgaacgcgcgcttggcggcggcgacggccttgtccacgtcggccttggagcccagcgcaacctcgtacatcgcctcttccgtcgccggattgatcacggcggtggacttcttgacgaccggatcaacccaggcgccgtcgatgtagaattgcatgcgattgaccatcgttaacctcttcttgggggcttggagggggcgtttcggcaggtatccttgcacgaaagcgccggcagttgaacccgccatatgcggggccagcgttgcggcggacggaggttatatgagccgatggcgggaacgtggcaaggtggccccgctgtcattacggcgcgatgcgaagcatcgaacccggaatctcgagattccgggttcggctctccgagccgccccggaatgacagcggagtcaccccgactacaccgccatcttccggtgcagcaccggcgcaccagtggtgaggctttcggccgcatcaatgatggcgttggcgtcgatgccgtagtgccgatacaggtccgcaatgctgccggtctggccgaactgctcgacgccgagggcctcgacgcggtggccgcggacgctgccgagccagccgagcgccgcagggtggccgtcgatcacgctcacgatgccgcagtcacgcggcaacggcgccagcagcctttcgatgtggctgagatgctgcacgccgcggcgatcccgccgcaatttccgtgcggcggtccaacccgcatgcaggcgatcggccgaggtgatcgcgagcaggcccgcgtcgcggcggctctcgccgatgaagcctgtggcctcgatcgcctccggcgcgaccgcgccggtataggcgatcacgacctcggcattcggtcccggcttgcgcagccagtaagcgccgtcggtgatgccctgcctcagctccggcgtcatgatgcgttgcggctgctcgatgctgcgcgtcgagagccgcaaatagaccgaaccgccctcgcccggatcgcgctgcatgtgctcgaagccgaacgccatgatcgcggcaagctcgtcgacgaaagccggctcgaacgaggcgagcccgtcctgtgccatgccgatcaacggcgtggcgatcgattggtgcgcgccgccctccggggcaagcgtgacgcccgagggcgtcgccgccaccatgaagcgggcatcctggtagcaggaatagttcagggcatcgaggccgcgctcgatgaagggatcgtagagcgtgccgaccggcagcagccgctcgccattgatctggtgcgacagacccagcgccgagagcatgatgaacaggttcatctcggcaatgcccagctcgaggtgctggcccttgggcgaggcgtcccagttgtaggtcgagggaattttctcgctgcggaataagtccgccttctcggcgcgcgcgaacagcccgcggcggttgacccaggggccgagattggtcgagacggtgacgtcgggcgaggtcgtgacgatgcgcctggccagttcgctgtcgctgcgcgcgatctcgttcagcacgaggccaaagccctgctgcgtcgacatctgcgccgaaggcttgaaggccaattgctggggcacctcgacgacgggcgcgctcaggcggcggccgtcctggttgaacggcacccgcgcgaggaacgcttccagctcggccgcctcctgcgccagcccctcgaacttgtcccattcatgcccgggccggatgttctggctctcgcgatatttctccatctgcgcgaccgtcatcaggccggcgtggttgtccttgtggccctggaacggcaggccgacgcccttgatggtgtacgcgatgaagcagaccgggcggtcgtgatcgatggaatcgaacgcctcgagcatgctcgccatgtcgtggccgccgagattcgacatcagcgcgagcagctcctcgtcgctccgcttgtcgatcagcttcgtgatcggaccctggtcgccgatctcgtcgtgcagatgcttgcggaaggccgcgccgccctggaagcacagcgccgcatagagcgcgttcgggcagttgtcgatccagcgcttcaaggcttcgccgccgggctcggcgaaggcctcgcgcatcaggcggccgtatttcacgatcaccacgtcccagccgaaattgcggaacatgttctcgaatttttcccagagtccctcgcgaacgacggcatcgagcgactgcctgttgtagtcgaccacccaccaggtgttgcgcaggccgtgcttccagccctccgccaacgcctcgaagatgttgccctcatccatctcggcatcgcccaccagggcgatcatccgcccctcgcggcggtccttcatccagccgtgtgccttgacgtaatcctgcaccagcgaggagaacagcgtctgcgcgacgccgaggccgaccgagccggtggagaaatcgacgtcatcgacgtccttggtgcgcgagggataggactgcgcgcccttgaagccgcggaaattctccagcttctcgcggctctgccggccgaacagatactggatggcgtggaacaccgggctcgcatgcggcttcaccgcgacgcggtcctcggggcgcagcacgtggaagtatagcgcggacatgatggtcgcgagcgaggcggaggaagcctggtggccgccgaccttgaggccgtccgcattggcgcggatgtggttggcgtggtggatggtccaggacgacagccacagcgccttgcggctgagggcggtcaggatttcgaggcgagcggggtcaacgggcatggcgatgctccggcaagataagcaaccgatcatacgcccgagcgccgccgcaaacttctcaatttccggcgccaaatctccgaatattgggataatttgccatgccggatcatgaaaagcaggttctattccaatgcacgagctcgacgccattgaccgcaagatcctcagctatcttcagaacgacagccgcatgaccatgcaggagctggccgagaaggtcggtctttccgtttcgccctgccatcgccgggtcaagctgctcgaggagcgcggcgtcatctcgcgttacgtggcgaccgtggaccagaaggcgctggggctgcatgtcagcgttttcatctcgatcaagctggcgcggcagaaggaggaggacctcaaccgcttcgcccgcgcgatctcgaaatgggacgaggtgctcgagtgctatctgatgacgggcaaccgcgactatctgctgcgcgtcgtcgccgccgacctcgcctcctacgagacgttcctcaagaccaagctgacgcggctcgacggcatcgcctcgatcgagtcgagctttgcgctaagccaggtgaagtattcgatcgcgctgccagtgtgacctgcttcagcgggatcgcatgtcacatggtcgcaacaa

SEQ ID NO: 185 - DNA, 5742 bp, Bradyrhizobium colbertium
aggtgtccactcattcggaggaagttcacagcctattctgtcgatctctggcttgagccagatcttgaagcgcagcctccattcccgctcttttgaattcgtccgcaagaactgcatcgaacccggcaaaaccacaaccagcggcctcgttccaacgagacagcccgtgctgataagcgttgcggctcgatattgctttcccaacactggttcgaggaccggtactcttctctgcgtttgcgcgattggcttcgatttgtcgcatggacgccaatgtacctccttgatttcgcgcgctagcaatcaaccatccgccgatctgagaattgacgaggtcagccttcgtccccgcggccgcagcgcgagagtggttgatgcagtgaatcatgagaccggcccgcttagcaacgggacgataaaggtgtggagattggtaccattgaacagatagccggcgatgccggccgcctgtgccgaggcaaggtcgctttgcttgtctccgatcatgaagctagcatcgatatcgactggatatcgctcaagcagagctctgatcattcctggctgcggcttacgacagttgcagaggacacggtatcgctcaatcaatccatcgggatgatgcgggcagaattcgaaagcatcgatgtgggcaccaacactatcaagctcacgcgacatccattcgtgcaagttgcgaacatggcgctcctcgtaaaatcccctcgcaactcctgattggttcgttacgacaaacgcaaagtacccggcgtcgttgaccgctttaacagcctgctgggctccttcgacccatcggatcttgtccggatcaaaagcgtagccatcatcctcattgaggaccccgtcacgatcaaagaaaactgccggacgccgcaaagctcgctgacctacgttcgaggaaatacacgatactccgacaaccactgcttcaattcaacctgttgcggctggataggattggatttccatgccgcgccatctgcagccagctcgttgctgctcgcgtatgatttggcttccttttgtcatttttgatgtcggtcagcctacactcgcctggtgtaagcgcgcgagaacaagaggcattccctacggaaaagcgagcaacattattgctgcagaaaggactggcattcccccgcgattggagcgttactgagtcgcccgggcgctagcaccgatcatagcgccggtatctcgcctcgcggatgcggggcttcgggcagtgcggcatgtgaagccgcttgttcttgcgtaggagataccggtgacaacggttcaaacgaatggcgcggacgcgcccaatcacatcatcagattcaacccaaacgaccgacggcatttcattggcggctcggatgcccgcatcatcatgggggatgatcaagagagcctgatccgactttggcgcgaaaagcgcggcgaagcagagccgcaggatctctcggacagtttggttgtccaactcgggactgtgacggaagtcttgaaccgcgcctggtatcagcgcgcgagcggattcacggtgaaggacatccagaagcgtgttcgtcatcccgtgcacaaatggatggcggcgacgctggatgggaccgtcgagcaaaccggcgcggtcttcgaagccaagttcatgctgccctgggccttcaccgaggaagctgcagccgagaagcacatggctcagctgcagcacgacatgtggttcaccgcatctcgtagcgccgttctctccatcatcacaggcggcggcaaatgggtcgagatcaagattcacgcccacccgccctgctcacccacttgttcggaaggctcgccaacgccgccatgttgctctggcgctgtgtccagagtggcgagcctcccgctctgttcaacatcgagacgcctcgcccaggactggaggctgtcagagtggtcgacatgtccacctcgaaccaatgggcagagctggcggccacctatttgcgaacccgagaggcccacgggcaacatgaggcggcgaaggccgacctgaaagctctcatgccggaagacgccaaggaagccaccgggcacgggatcaaggccaagcgctccaagtccggcgcaatcagcttcgaagcccaggcgacgcaggggccccatgcatcagtccagtgagcagatcgggaccatcgccgccgccctcgcccgggcccaggctgacctgacaaaccccgaaaagaccctgaccgtcgtgatccgatcgcctttccgcgggaggatgatcgaaccttccgctacgcgtctctggcctcgggtctggatatcgtccgcaagacgttgagccgcaggagatcgcgaccatccagaccactcggattgagcaggtcacgggccaaattcatctcaccacgctgctcgcccacgcctccggagaatggatctcctcagaccttccggtctgcgcctcaaaggaggtcgaagccccgcaccggatgggggggcggcgctcacctatgcctgccgctatgccctgttcgcctggtttgaaataccggggaagacgatctaaatgcctttgatttcgtgacagtacctccgtcggcccgcgagcctcagagcccagcggagcccgaaaggaaagccgcccggggagcgttctgaacggccctcggtgttgccgcccgaactcgctgaatacgatcaagcctcttcttttgcttgggcgtcggtcacctcgattttcgataatcaaggtgtgctggatcgtgtcacgcacgtgttagacgatggccataaggcaatcacggactgggaccgagcatcgtcgcaagcttggaccgtctcgacaagtagctataagtcggagggccagttggacaacgttcagcagaagttagacgatggccgcatctatttcacggattatgacgatcggtcggtcttctcctggaagactgcggtttcggagtacgtcccagggcggcctctcgtctgtatctatttacggcgacgccggaggtgtcttcgttacgacctccgatgccgccggaacgcagtcgcgatcgcagccaatcaccggctatgactcacaagggatggactacgtaaccattatcaatgacgatggcacggctgcctatacggattacgatcaggcgaaccaatcgaacattttatggtgtttgtacatatgatcaacaaaaccaattggtgcacacctatgtgagctatgacagcggaggctatatcgcttagaacgtgctgcgctgcgcgaaatggaagacaagcccgtcagcgtgcaccgtcgcctccttatccgttccggccgggattccttacgaggttctgggcgagcacttgaaccgcggcattcggcagttggatgcccgaaagcttccatccgttgccctcgaagtgaaggctgacgcttccttcgttttccgcctcgccgacgaggatttgaagctcgaccggcttcgttggcctcacacgcttcaagatgtcgaagaccttggcggtgtcgatatcggtcaggcgctgcatgttagcgtcgaccccgccaacgctgatggcacccttgctcaagaccgccgtaaggttctccggcgttagcatcttcgcgatcatggcgtcggcaacggaggctccatacgtattggctgctaaccgctccaacggcttcactggccgctcacggccgatctgcttgaggtaagccgcgacgatttgatccactagggagcggcgcactcgtgccgtgtctgtccgcgcaagcacttcggcgccatcgccagccttgaccgcctggaccagaccaccgagagagacaatcgcggaaccaatgtagatcccaaggcaaacaagcaaagcaaccaaagacccgaaaaaccaacgcattgggcatcctttctggatcgcgccctgatggatgtcgtttgtgatgagattagggctcgctggcgtgaatagagccgacaattcagtcggtgttcagttcctcgagcattaattcaccggccgggagaagtgtatgcggagacttcggatattgctgactatcgccttggttaccctcgccgcgtctccaactgcagcgggtctgattaatgaggctcgaggtgtgccgcccgaggttcgagcttactggaacagggccggatcggcggtgtgtccgcaagactacgattacgtcgcccggatccgtcgctgcgtctcccgggcggcaatgtccggcgcagtccctgctcagcgaaaccgccgcggctctgctgtttgcccggcggactatgactacgtggcgcggtacaggacctgcctgccgaggcagtagaggcccgccaccgcgagccgcacggcaggacatcattggcgacatcgtcgtcgcagtctagaggggccggctcgatctcaatgacctgcgatcccgcttgagtttgcgcaaggaactgatcgcatagataacccctccttcgctcggcgcgatgtccaaagcagatggtcctcacggacaggccttgccgacacgggtaaggactagcaacgtcaattcaccgatggtgtagcttgcactcgcctacaaattgctcttgaattgcaacatgacccagcctctccgacaaattatgggccagctgcggattatcggtttatcgtaattttctccctggccagcggttgtgccggactttggcttggcggattggtaggcgcttcccttagggcaagccttttaccgatcgcagaagcatcggtcggaattgccgcgaccattgccaaatgatctgcccagatcccgtaccagttgggcgcatatagctcgatccagtgctctcactgggtgtagcgagagccttcacccactgggctgggtcagcgacacaagcggctagcacactttcgtgtccagcggcgtgttggcactggcgtagcaccggctttggagattaaaggcgttttgctacgagccggcgctgttcttctctgacggatcaactgggaatttcggtcggtcggcgatactctccgatcgccaatcacgaccaaccaagctgcgatcagcgctctgtttcgcacggcaatcaatacactgggaatctggcgctgatgccaggcggattcccggactacaaagctctgatcgtccgaccgggcatgatggccgatagcttgcgctcgccaggtcgggaatgcagtcttcatccaaagccatcattgacgcgaccaagaagcgcgcggagaagctgctatcgaagggtaaggatgtcgacttcaaggagcgcttcggatggagcccaacagcggcacaacggacattcggaacctaagtcgaagcattggacgcggtcactgggcgtcgagatccggtgcgtcgtccctttcaacaactttagcgagttcaacaaggctgaaggcgagaacacatggtccgcggttgacgagagccgccctcaggcttgctttgccggcctctagagcgtttcacattttgattgaagcataaccggcggttgcgaagtagttggcgcattcgcgaggctggatgtcctggacgaggtgaccgatatggcgccaggtgtcctcgatggtgcgcttctgagcttgccgcatccaatgtttgatcttggagaaggcctgttcgatcgggttgaggtcgggcgagtatggcggcaggtaccagagcctggcgccggcagccttgatcatctgcctgacggctttcgacttgtggctatagcgcgacaatctgggtgggaagcg

SEQ ID NO: 186 - DNA, 7700 bp, Bradyrhizobium colbertium
ccggacgtgggagctcataccggttacggttggggatacgcttggcgaagggctgggtcttgcgtaccagcttcttcaaccgctgctgcaggtccttcacagcagtaggttcgaagccatgttctaccttgccggcgtacagcagcttgccgccgttgtcccgaccgacatagatgccgtcaaagcggttgtccttgatcttgaagccggcgatggtcagagtctcgcggtgtgcgcaggtggtcttaacccagtaattgccgcgcaggccgccatagggcgaactggcgattttagagaccacgccctcgagctcgccggcgcagacgcgccgaaaaagctcggccccgtccatgtcgaaatgatcgctgtattcgatcggggatttgcccaccagagccttgagcgcggccttgcgctcgagcagtggcagccttcgaaggtcgcggccatcaagatagagcaaatcgaacgccaccatgatcaggttgtcggcctttccggtgaggctgttttgcagaatcgcaaagtcggtcttgccgccttcgccgggcaccacaatctcgccgtcaataatggccgccttggcgttgatcagatctgcatcgtgcgccaccttgcggaagcggtctgtccagtcgaggcctgtgcgggtgtagatcgtgatgtcctggttagcgatgtggagctgcgcgcggtatccgtcgaacttgatctcgtgaatccagcgctcgccacgcgggacgcggtcgacctgctcggcgagcacgggttcgatgaagcccgggaagggcgccttgatcccgatcgactcgcgctttcgatgccgcaacgccactgatgaactccacgcaacgaatacgttgattcgaatcatttcgaactgattcgttccgctgttcgacgaagcatctttgcatctttggaacctactgaatcctattgcgttttcgcgagacaacggaggtttcagcaaacatggcgaagaaagcaaagaagcagtcggctcgcggacgcaagcaggacagggcccgcgtggctggcgggcaggattatgaggtgcaatatgaagcgaagaaaactcgcaaatcagcgtcagccgtgaagaaggccgtgaagaaggtcggcagcagccgcaagaaggtagaacggcgtttgaggtcgaaataaatagccttggagctcaccccgtcagcgggtgatccatttcggtggcggggtcttccttcactccgcgagcgatgatctgcagcgtcccgtcgggaagcggccgctgcagtttcagcgcttcctcagcgggagcattcatccacgtctcgacctcttcgggggtggtcaggatgacaggcattgccttcggatggatggcgccgacttcggcgttggcttccgtcgtcaggaacgcgaacagatcgttggtggtctcgccttccttgacctttcggaccgacgtccagctggtccataggccggcaaagcacagaagtggacgactctcgtcaagcgcgaaccagatgtcgccgccctcggccttgttgaactcgctgaaagagttgaacggaaccacgcagcggttctcgacaccgagccagcgggcccaatgcttcgattttacgttccggatgttggtagttccggaatctggctccatccgaagcagttccttgaagtcgaccgtcttgcctttggcttgctgcttctcggcgcgcttctttgtcgcgtccatcagggccttcgacgacgaaggcatgccccagcgcgcggtagcgagctcacgaccctcggcccccgtcctaactatgggggccttgtagtctgggaagacgcgcggcatcggcgctagattgccgacgtattgattgaccacgcggaacagcgcgctgatcgcagcctggttggttgtgatcgaatacagattgcacatggtttcaactaacttgattcgcagctcgacctaacgttcttcagtcggatgcacccacttgtagggggtgatctgtcttgtctcggtcagtttgatcattcgggcagctggcgcgtagcgaggcgtgcggcaggagcggcacttcagagaggcctctagcttccagagcggcgtatctttaggccggcggacggcgtccagcggcaggctggcgcgtgtcttacatcgagcgcactcgacctccagccagccaagcccgccgttaaggcattgaccaatcgttggcgagggctgcgccgggcctccgtagccttccatgcggaccgaccaggcctcagcctccgctcggtcggcctcgcgcacagcctgttccgcacgttcacgagcgccgtcggcatggatcttggcgcccattatccggccgccccagatgacctctcgtgacttagtgctcatggcggaggattccgcggggcgcgcgaaatcacaagccgctacgtcttgcggtcctacctccagaatccactagtccttcgtcaacatagacgagcggctaagcaatgtgggcccacctcgccgagcggctcggcctcctgaatagctacacttcgactaaatggggcttgtgctcgccggaaggttgcatgatgctcatgcctttatttctagggggcgaatcatggcaaaactctcaacaaaagtcgctactcggataaccacccagcttaaaaggtaccagagcgtactgtcagggttgctgaagcgcgacgtcagcgaggctgacacggtcactgtcatcaacgatatgctttccgacatttgcggctatgacaaatatctgcatgtcactagccagtacgcgatccgcggtacctatgttgatcttgccgtgaagtttgacgacgagatcagattcatcatcgaggttaaagccatcgggatagacctcaaggatgcccacgtaaagcaagccatcgattatgctgccaatgagggtatcgagtgggtagtgctgacgaatggtgcccactggcggatctacaaggtgcacttcggccaaccaatcgagaaaatcctcgtttgtgagttggatgccattggggcgagcgcgaagagccccgaggccctagagtgttttggaaacttgagccgcgaaggcttttcgaagggcacgatggcagagttcttgctgcacaagcaggtcacgaacaagtttactgtggcagccgttctgcagaccgacttcattctggaggttctgcgccgcgagattcgtcggatgagttccggcgtcaaggtggaagtcgactatctgaagaccttgttgcgtgaggaagtcatcaagcgcgacttggtcgatagcgatgaagcgaaggcggctctcctgaacatcaagcgattgcagcgggccgcgacccggaagaaggctgcgccgaaagctgctgatgaagaagcgccgatagttgctccggttgaggatgcttctgcctccctcccgcgagcagtcgctactccctaatcatggatcgcgggcgcgccgcctagtaggacagtcgatgagccttgatccggagacctacaagcgacaggctgaagctgcgtatcaactcggcttcgagcttttgaaaagcgctagggcagcacagatcgaatacggccgttggcttgtcaataccctgtggctcatgcactcaggcgctatcgtcggccttcttttcaaagcgcattccggagaacatcctccatcctactcagttgccttgttttggttcgtggctggcatcgtgtcagcgttcatcgccgcattcgccgcttggtggaatttcaccttcgcggcggtgctgtttcatagttggaccgacgtgagaatgctttctgatcccaagtattggccgcagcccgacaagggtaaggctatgaaattgacaatgtggatcgcgataaccggcggggtcggctcgctggtttgcctagtcgtagggagtatcgccgtttggcggacgtggatttaagatgacctattgggagtagcgctctttgacgatcatcagcctgaaaaaggattggacccttggtgagcggcttggcgccggtgggtttggccaggtctttgctgccgagagtccagatgggtcgaaagccgcgattaagctggtgccgaaggcgcctggcgcgagcagagagcttctgttcgtggacttgaaggatgctcgcggaatcgtcccgatattagatagtggcgaacaggacgaacattgggttcttgtgatgcctcgtgcgagcaaatcgctgcgagaccatctgacgagctcgagagctatcggaacgacggatgcgacctcgatcctgatcgatatcgcttccgccctggcggaattggacggcagagttgtccatagagatctgaagcctgaaaacgtcctctatctagatgggaggtggtgcctatcggatttcggcatctctcgatacgcggaggcaacaacggctcctgacactcaaaagcattctcttagtcccccctacgctgctccagagcgatggcgggccgagagggcgaccagtgccgctgacgtctacgctctaggggtaatggcgttcgaaatgctctgcgggaacaagccctttccaggtcctcacatcgaggactatcgagagcagcaccttcataatgagcccccgcccattgacgcagggacctcggtcctgaaggccattatcaccgaggcgttgttcaaggcccccggtgctcgtccgtcaccttcgaatttgctcactcgactgacgcgctcacagcaacaacgctctgccggtctaggaaagcttagcgaggctcatcttggcgaggttgccaaacagagtgaagccgcgcgacaggcatcagcggctcgatctgccgctgagcagcgagcggatctgtttcgtggcgcttccgcgctcatcaatggtctctacgcggagttatccgacgccatcttggaggctgctcccagcgccagaaatgggaaggacgggaaacggaaaggccaaaccatatcgctcggcacagctcagctcgagcttgtgccggtctttaacacgcctcttaatccttgggagtggagagatgctccagcatttgacgttgtggctcaagccggcgtcatccttcgcgttccacgggatcgatatgacttcgaaggacgaagtcactcgctttggtactgcgatgcttttgaagcggggcgatttgagtggatcgaaacggccttcatggtctcgcccttgatgggcagaaacacgacgatgcggccttttatggcggatccgggcatcgaggcggcgaaggcgctctgggccggtatggctgaatttcagctggcctggccaatggagccggttgaatcggaggcgttcatcgaacgttgggccggttggctcgcagatgctgcgcagggccgcttgcatgcgccttcaactatgccagagaagccaatttctcagaattggcgccggaagtaggcggcggatcggtcctggttgcgggaagcagtaatagaggccgcagtttatcggtcggcgtcagcacgggcttgcgcaaccttgaagctgcgcttgcgttagaccgccgcgcgggcgagcccacccgaacaaagcggtggcctcatcatttattctgtgattaagttaacctctggttgacgatcagggtagcatgattcacaagtgcaagattcaaactgattcgcagggcactctatgttagccgccgtcccatcagatgaatcaaggacccttgagcttttcgatctcgcgctccgtattttgaaggacaaggggagcatccctcctcaactttcagaacatttcaacgcggtgcttcggcaagcaaaagagttggcaactacgccaaccaaggttcatggaagcccatcccctcaggcgatccagcttgcttgccgcatactcgaaatttcggatctgcgtgccgctgtggcggccgttgatggcattgatgcagtgacgccggatatggcatcaagaatccttctatctctggaggagcgcgttgcgccctaacgttgatctattccttattagggatagtttgcgggagtgtcaggaaacaacctatttcagcgggaagcttcatacgtttaccgctcgactgatcgaggtgatcgatcatgttcttcagaatgaatcgtcactagggcctgatatagttaggacgttcgcgtctcacgccttgagtgcgaaccgataccttgccggtagcacaacgaaggaatcaccgtacgaggtcgagtactgcctccaagcagtgataccgaagtggtccaagcgtgattgcctgatcactacagcgctgactgatgaacgcgactttcattttcgtccgacagatccctgggcgttcgtgaaggccgctttgccaaagtacgacaccgctggctttgatcctctgttggtccaactcggtgtgccaagggtgtacagtcacaagcctctctactgcgtgccattgtatcacgaactcggacactttgttgacgtctccaatggagtgacaaacctcagcagccttatccagaggccaaactcggcgtgggagctgcagcaccgactagagcatttcgcggatctatttgctgcggcctacataggaagatgcagcatcagagcgctggagattattgctccgaacaatgcaacgagcgccactcacccgtcgaccgctgatagggtcgctctcgtcgaggactttctagcaggtcgaagcaatgggctgatcccgctattccagacctgccttcaacacctcggattgccgcctcttcagatagagcactccgcacccgttcttcgtccggcatttgatgatatcagaacacacgcgatagcaaacaaaagcgagctgcacggtatcttcaatgcagcttgggaatacttagaagatgccctcgacaatcgatcggctccttggatcgcgcccaactcgacgattgcagaaatcgagcgcgttgtgaatgatctgacggagaagtcgatccgcaatgcgtcgatcagagagagatgggacagtggcgctactccataagggtgagctaattcgtcgcctcggtctcaggggtgatgacgctctattcatcgatccgttgctcgatcagagccagattggtgaggtcacgatcgatctgcgccttggatgcgatttccttgtgtctatccttacgcgccggccatacattgggactgtgaaaagtgatccatcctttcgaggaattgcgtcgtacttccaaacgacaaggagagaatttggcgacagctttatgctctacccaaatcaactcgccctcacgacgacactagaatttgtgggcctgccggtcgatgtgcatgccgacgtgttgacgaggagcagctacaccaggctgggcattcatttaaatacaatgatccagccaggatatcgctgctgtttcccgatcgaactgttcaacgagagcaacaacccggttgaattggtggtcggtagccgaatttttcagacgcggcttttccaaggctcattcaagtctcagtacagctcgtctccttctccgcgaaagtatcttggcaatgttcgcccgaccgcctcgagggcggctgacgacccagacttagagcgcttgttcatgatccgcgagaagcgataacggtgcttacccagtgcttacccgtcgccgcggtcaaacggcgcaaaatccactaagtagctgattttactggcgcacccgacacgattcgaacgtgt

SEQ ID NO: 187 - DNA, 17671 bp, Bradyrhizobium colbertium
aggtgtccactcattcggaggaagttcactacgccgattgctggaacggattggagaagcgcttcgatccgagcaggccgtagctttcgtcgccctctccccttgcgggagagggtggctcgtcgcgaagcgacgagacgggtgaggggtctctctccgcgacctctcttacgattgagtttgccgacagagacccctcatccggcgcttcgcgccagcttctcccacgaggggagaaggaagaaagaaccgagccaaacgtgacaacccaccccaacgatcccagcctccgctccttcatcgacgtggatcccgcttccgacttcccgatccagaacctgccctatggtgtgttctcaaccgcagccaatccgacgccgcgggctggggtggcgatcggcgactgcgtgctcgacctttggacgctcgagcaggagtccaggctcgacgtggggccgctcggcgtgttctccgaagcctcgctcaatcggttcatggcgctgggcccaaaggtctggtcgaaagcccgtgcgcgcatcagcgagctcttgcggcacgacaatcccgagctgcgcgacaacgaggagctgcgcaagcaggccctggttccgatgcgcgatgccaagttacacatgccgttcgccgtttccggctacaccgatttctactcgtcgaaggagcacgccaccaatgttggcgtgatgttccggggcaaggacaacgcgctgcagccgaactggctgcatatgccgatcgcctacaacgggcgcgcctccaccgtcgtggtgtcgggcacgaaggtgaagcggccacggggacagctgaagccgccgaatgtcgagctgccgagctttgcgccgtgcaagcggctcgacttcgagctggagatgggcgtcgtcatcggccagtcatcaccgatgggcggcatgctcagcgagcaacaggccgaggagatgatcttcggcttcgtgctgctcaacgattggagcgcgcgcgacatccagcagtgggaatatgtgccgctcggcccgttcctggccaaagccttcgcgacttcaatcagcccctgggtggtgacgcgcgaggcgctggagccgttccggctgaaggggccggagcaggaaccggtgccgctcgactacctcaagcagacgaagccgcagaactacgatgtcgagctggacgtctcgctccgcgctgcaggtgccaacgcacccgccagcatcagccgtaccaacttcaaatacatgtactggtcttcggtgcagcagctcatgcaccacgcctcctctggctgcgccatgaatgtcggtgacctcttgggcagcggcaccatctccggcccggaaaaaaaccagcgcggcagcctgctggagatcagctggaacggcaccgagccggtcgagctgcctggcggcgtcaagcgctccttcctggaagacggcgacagcctcgtgatgcgcggctggtgccagggcgagggctatcgcgtcgggttcggtgaggtcgagggaacgatcttgtcggcggagtgagatccgtttttgttgggcccgcgcggcgcgaacccggaaccccgaaattccgggctcgatgctgcgcatcgccccggaatgaccggccaaatcaccgtctttctggcggcacgtccttcacccgtgcgcaatgcgctgcgatatcctccacgctgtacttcaaatgcacccgcttgtccgacggcgcctgcttggtcgtgcacacgcccggccgccattcctgcgttggcctgatcgggcgcggggcaaagccgccgccgcaattcgggcagacgttgaagagtttcgtctcgacgcagtccgcacagaacgtgcattcataggagcagatccgcgcatcggttgcgttgggcggcaggtcgcggtcgcaatattcgcagttcggccgaagctggagggccatgtcgaatctccgcacatcgagctggatcatcgcagatcgcccacgccgcgcgaatgccatagttccctcgatttcagccggccccgatctccctgagcggcagctttgagctctccttcagccgatccagcacgatggaggaacgcacatgggccacgctctggtgcggcatcaggacgtcgttcacgaggttggagaggcccttgaggtcacgcagcacggccttcagcacatagtcggcatcgcccgtaagcgaatacgcctcctggatctcgtcgatccggttcaccaacgcccgaaaacgcttggagttatccggcgagtgagtcgcaagcccgacctggatgaaagcgatcacgccgaagccgagcgcctcgctggacaggtccgcatgatagcccgcaatcaccttcgcctcctcaagtcgcatccgccgcctcgagcattgcgaggctgagaggcccgcgacctcggcgagctcctggttggtaagccggccgtcgtcctgcagcgcgccgaggatcttgagatcgaagacatcaactgaaatcatgcgccgatcgcccaatatgtgcacggatcgtgcacaggttagcgaaaacgcgtctcgtttgcacgctccttgcaggcgccatgaaggatagttcctgccagcagcaatctgggagaataccatgggtccgtttccgcacgatgcaccgccggccgcgatcagtgccgacaacccgatgggcaccgatggcttcgagttcgtcgaatacgcgcaccccaatccggaagaactgcacgccctgttcaagctgatgggttatgcgcccgtcgcgcgccacagaaccaagaagatcacggtctatcgccagggcgacatcaactatctcgtcaacgaggagcctggcacccacggccatgacttcgtcgccgcgcacggcccctgcgcgccatcgatggcgttccgcgtggtggatgccagggcggcatatgaccgcgcgatttcgctcggtgccgaacccgccgacctatcatccgcgcagaagacgctcgacgtccccgcgatcaggggcatcggcggcagtttgctttatctcatcgatcactacggcgccaagggatcggcgtatgatgccgagttcgagtggctgggcgcacgcgatccacggccggccggtgccggcctgttctatctcgatcatctcacccacaacgtccatcgcggccgcatggacgtctgggcaggcttctatgagaagctgttcaacttccgccagatccgcttcttcgacatcgagggccgcgcgtccggcctgttctcgcgggcgctgaccagcccggacggcaagatccggattccgatcaacgaggacgccggcgatgccggccagatcgaggaatatctgaagacctatcgcggcgagggcatccagcacatcgcctgcggctgccgggatatctatcgtaccatcgagggcttgcgcgaggccggcctgccgttcatgccgtcaccacccgacacctatttcgagcggatcgacgcgcgcctgccccagcatggcgaagacatcgcacgcctcaagaagaacggcatccttatcgacggcgagggcgtggtcgacggcggccagaccaaggtgctgctgcaaatcttctcggccaacgcgatcgggccgatcttcttcgagttcatccagcgcaagggcgacgacggcttcggcgagggcaacttcaaggccctgttcgaatcgatcgaggaagatcaaatccggcgcggggtgctgaaggtcgggacggcagcgtaggcgctgctttgaggcacgctgttgcgacacaagaggtgtcgtccccgcatcgggcgggacctataaccacggggagtagttttgcgagccgataactcggcgtcttcgcccaactactcctgggatcatggatcccgggctcgcgctccgggatgacagcggaagttacttcgcggccttccacgcggccgtcaccgccccgatctccgccgcttccggctcgcgaaccgccgacggcgtacgcgaaaaccgcggcgccggggcgggctgcttcacgccgtggcgctcgacgaagacgttgcgggcgaccatgtgcggatgccgtgtcgcctccgacatggtcagcaccggcgcgaagcagatgtcggtgccttccatgatcttgcaccagtcctcgcgcgtcttgctcttgaacacggccttgagcttctccttcagtgctggccaggccttcgggtccatctgcgcgtcgaaatcggcatcggtgagcccggcatgttcgcgcagcagcgcatagaattgcggttcgatcgagccgatcgagacgaaatggccgcaagcgcattcatagacgccgtagaaatgcgcgccgccgtcgaggaagttctggttgcgtccttcggtccagcgccccatcgcggtcatgtcgaagaaaaacgacatcagcgatgccgcgccgtcgcacatcgctgcatcgacgacctggccattgccggacttttccgcttccagcagggcagcgagcacgccgacgaccagatagagcgcgccgccgccgaaatcgccgacgagattgagcggcggcaccggcgcttccttcggtccgatcgcggcgagcgccccggtgatggagatgtagttgatgtcgtggccggcggcgttggcaagggggccttcctggccccagccggtcatgcggccatagaccagcttgggattgcgagcgagcacgacgtcgggtccaagtccgagccgctccatcacccccggacgaaaaccttcgaccagcgcatcggcgctggccaggaggtcgagcacctgcgcgatcgccgccttgtccttgaggtcgagctcgatcaccttgcgtccgcgaccggccaccgacttcgtgctcttctttgcgccgatgcgatcgagcgtgacgacgtcggcgcccatgtcggccagcatcatgcatgcgaacggaccaggtccgatgccggcgaattcgacgatgcggaagcccgacagcgggccggaggtgcggacggatgaggtgggggctgatttatcgagcacgttgttgtttcctcgggtcgcggagatgccggtggcccggcaatcgcctcggacgttcctctgtgggcgagttaattgaccaattaacttttctcgccttcacggcagcgaggcaagcggttttcatgccgcacgaccaaataaaaacggcgcgcaccgaagtgcgcgccgcgggaaaattgtgtcgaggcgctatcagcgagccgctgcgaccgcgcgctgagccatcaccttgacgagattggcgcggtactcggccgtgccgtggatgtcggccagcaatccgttcgccgaaatcgtcacgctgtcgatcgccgacggcgaccagttcgccttcagcgccgcctcgatcgcgggcacccgcatcacgccattctgcgaggcgccggtcgcggcgacccgcacctcacctgacttggtctgcgccacgaacacgccggtcagtgcaaagcgcgaggccgggtgccgcatcttttcgtagcctgccttcgccggaacggggaatgacacggcggtgatgatctcgccgtcttcgagcgccgtggtgaacagacccttgaagaaatcatccgccgagatcgaccgcttgttggtcttcacggtggcgccaagcgcgaccagagcggccgggaaatccgcggcaggatcgttgttggcgatcgagccgccgatcgttccgcgatagcgcacggcgggatcgccgagcaccgaggtgagataggagatcgcggggatcgccttcttcacatcgggattctgcatgatgtcgtagtaggtggtggcggccttgatggtcagcacgtcgcccgacagctcaacgccctgcaactccttgatcctgccgaggtcgatgacgtcagaggggctggcgaggcgctgcttcatcaccggcaacagcgtctggccgcccgcgaggaatttcgcgtcgctaccttttgcgaaaaggcttgcggcctcgtcgaccgaggaggcgcgatgataagtggtctggtacatcttcggtcctccttcaagccgcgtggatggtgcgccacacccgatccggggttgcgggcatttccaggttgttcttgccgatcgcatccgtgatcgcgttgatcacggccgccgaagcgccgatcgcaccggcctcaccgcaacccttgatgcccaggggattgcccgggcacagcgtcgtggtgtgggagaggttgaacgagggcaaatcgtcggcgcgcggcatggcatagtccatgaacgaggccgtaaccggctggccgttggcatcgtagatcgcgtgctcgagcagggcctgaccaatgccctgcgcgaggccgccatggacctgtccctcgacgatcatcggattgatcagccggccgaaatcgtcggccgccacgaagttgatgaaggaggtcttgccggtgccgggatcgacctcgagctcgcagatataggcgccggccgggaaggtgaagttggtcgggtcgtagaaggcgctctccttcaggcccggctccatgccttcaggcaaattgtgcgcggtataggctgcgagcgcgaccatcggcagggcgatcgccttgtccgtgccggtcaccttgaactcgccgttctcgatgacgatgtcggcttccgatgcttccagcgcatgagccgcgatcttcttggccttggattccatcttctccattgccttcaggatcgcggtaagaccgacggcagcggagcgcgagccgtaggtgcccatgccgaactgcaccttgtcggtgtcgccatggacgatcgagacctggctgatcggaatgcccagccgttcggcgacgagctggcagaaggtggtctcgtgaccctggccgtggctgtgcgaccccgtgaggatctcgatggtgccgaccgggttgacgcgcacctcggccgattcccacaggccgacgccggcgcccaggctgccgactgccttggacggcgcgatgccgcaggcctcgatgtagcaggagaggccgatgccgcgcagcttgccgtcggctttcgccttggccttgcgggcggggaatccggcatagtcgatcgccttcatcgcggcatccagcgaggcgttgaagtcgccggtgtcgtaggccatgatgacgggcgtctggtgcgggaactgggtgatgaagttggtccggcgcaactgggccggatcgacgttgagctgccgcgccgccgtttccatcaaccgttcgatcaggtagctcgcctcgggacggccggcgccgcgataggcatcgaccggcgtggtgttggtgtagacgccgatcacctcggcatggattgccgggatgttgtactggcccgacagcagcgtcgcgtagagataggtcggcaccgaggacgagaacagggacatataggcgccgaaattggcgtaggtcttcaccttgaggccggtgatcttgttgttggcgtcgaaggccatctcggcatgggtgatgtggtcgcggccatgcgcgtcggtgaggaaggcttcgctgcgatcaccggtccatttcacgggacgctcgaccttcttggatgcccacagcgccaccatctcctcgggatagatgaagatcttggagccgaagccgccgccgacgtcgggcgcgatcacgcgcagcttgtgctcgggcgcgatgttgtagaacgcggacagcaccagacgggcgacgtgcgggttctgcgatgtcgtgtagagcgtgaaatgctcctcggccggatcgtaatcggcgatcgccgcgcgtggctccatcgcgttcggagccagacggttgttggtgacgtcgagcttcaccacattggcggccttggcaaaggcggcatcggtggcgctctcgtcgccgatcacccaatcgtagacctggttgcccggagcctcgggatgaagctgcggcgcgccgggcttgatcgccgcccgcatgtcggcgactgcgggaagctcctcgtaatcgacgacgacggcttcggccgcgtcgcgcgcgagattcttgctctcggcgatcacgacggcgacggcttggccgacgaaccggaccgtctccggcgccatcgccggccaggcgcccatcttcatcgggctgccgtccttcgaggtgatggcccagccgcagatgagattgccgaccttgtcatcgacgagctgctggcccgtgagcaccgcgaccacacccggcatcttcagcgcggcggaagagtcgatcttcttcaccttggcgtgcgcgtgcgggctgcggacgaaataggcgtgggtcatgcccgtcagcttgatgtcgtcgacgtaacggcccttgccggtaatgaaacgcttgtcttccttgcgcacgacgcgtgcgccgatgccttcaacacccatgtctggtcctcccgaccggaaatttgtccacccgcgctctccaccgagagccgcagtgacggttttcttgtttgtaacgggccgctctactcggccgcctgcgagaccttcatgcgcccggccgcatccagcacggctttgacgatgttatggtagccggtgcagcggcagatattgccttcgagctcctgacgcacggtggcctcgtcgagctggcccccgtggcgatgcacgatgtcgatcgccgacatgatcatgccgggcgtgcaatagccgcattggagaccgtgattgtcgcggaaggcagcctgcatggggtgcagctcgtcgcccttcgcgatgccctcgatcgtggtaatgctggcaccatcggcctgtccggccagcatggtgcaggatttaacggctttcccgtccatgtgcacgacgcaggcgccgcactggctggtgtcgcagccgacatgggtccccgtgagattgaggtgatcgcgcagaagctggaccagcagcgtgcggtcctcgacatcgacagcaacggccttgccgttgaccgtcagtttgactgtagacacggagagtcctcccgggattgattttgattgcttctaattagagacagcgacccggaactttgcaactaggattttggtcgctggcgtcatggaaaagtcattgatccattcgtggcgctgatccgcgggaggcatacgccgagccgggcggagcgccgggccggcgtgggatgccaggtctccgtctctggtcggcctttggccgagaggctgaagatgcgccgaatttaccggcccttatccattctgccttagttctgcgcattcaggtccgggggcggggcgcctccagatcgcggctgacgacaaaattgggggtgggaatgtccgggcgtatcgcgtcaccgtctaagcgcacactgtttccgaccctcaggttccgcgcaaagatcatcctcggatttgctgcagtgctggcaatctccgccggcagcatggccttttcctatttcggcttcgagcgggtcgctttcggagtcgggtcgtaccgcagcagcgtttcggaggccgatcttgcccgcaacatcgaccgcgagctgctggcctatcgctctgctgccaaatatttcgtcgtcaccggcaaggaagacgacgccaaggccgcgctggatgccgaaggcagcctgaagaatgcgatcgacgaggccgtcaagggtgtcaagaacccggcaaggcaggagagcctcgccaagctcgccaaggagttctccaatttctccagcacgtttggaaggatcctccaggccaagcgtgatagtgcgctgctggtgcagaaccagctcgggcgtaacgccaacctcctgaaatacaagctcgacgacatcggcaacaacgcgtccgattccgaagcacaggcaatcgagttcggcaccaagcaggtcaatgcccaattccagaccgcgagcgcggcggcgaccaacttcgtgctgacgtccgaccagacgatcgccaccagcgcgctggcccggctgaaattcgtcgagaactcgctcggcgcgatctactccatggacgacaaggtcgtcgcgggcctgaaggatgccaaggcgctgctcggggcctatcgcgaagcactggagaagctgattgccaatgccaagctcgtcgatgatctcgtcaccgcgatgaacggctcggccggtgcgatcctgcaaggcgcgaccaccatgaagtcggacctcgtcgccgagcagcggcggctggattccgaatcggaggcgaccatcggccagaccgagcaattggtgctgatgctggccgtcggtggcacgctggttggggtggtcctggccttcctgctcggcaccggcatctcgcgtccgatgatcgcgatgtgcaaggcgatgcgcgagctcgccgccggcaatttcgacgtcgtgctgcccggcctcggccgcaaggacgagatcggcgagatggcgggtgccgtcgaggagttcaaggttcaggcggtcgccaaggccgagcgcgacgccgccgccagcgaagcccagaaccgggagcaggccgcaagccgccgcgccgagctgatccgcttcgccgacgatttcgagagcgcggtcggcgccatcgtctccaacgtctcggcctcggccgtgcagctggaatcggcggcctcgacgctgacccgcaccgccgagaccacgcaaagcctgtcgagccaggtcgccggcgtctccgagcaggcctcgtccaacatgcagtcggtcgcgaccgcgaccgaggagctgtcggcctcggtcgaggagattggccgccaggtccgcgattccagccggatcgccgaagccgccgtggtgcaggccaaggagaccgacggtcgcatcggcaagctgtcgcatgccgcccagcagatcggcgaagtggtcaagctgatcacggcgatcgccgagcagaccaacctgctggcgctcaacgccacgatcgaggccgcccgcgcgggcgaagccggccgcggctttgcagtggttgcgagcgaggtgaagtcgctggcaagccagacggcgaaggcgaccgacgagatctcctcgcacattgcaggcatgcagggcgccaccgccgaatcggtcgctgcgatcaaggagatcggcgcgaccatcggccagatctcgtcgatctcgacgtcgatcgcgagcgcggtcgagcagcagggcgcggcgacgcaggagatcgcccgcagcgtccagacggtcgcgcagggcacccagactgcggctaccgacatcggcgaggtcaaccgcggtgccgccgagaccggatctgcctcggaagaggtgctcaattcggccaagcccctgtcgagcgagagcacccgcctgcgcgccgagctcgaccgcttcatggcgacgatcagggccgcgtaggggcgtgcgataggctaaccgccatcgcaccaccctccgctgtcgtccccgggcaagcgcgctctccggcgcgcttggattagtggttcatacccacaggattgggcttggcagggattcgggccacctgcagaacgtcagcatcgacagcgccgatccgggcgcctgtcttccgtgaatgtgtcgtctttctgacgtgagccatgcatcgagcccttgcggctccatcgcatcgagcggtgtcgacgggccttcccgcgggaacccggccacttcgcaggcgttgtcgcaggtggcaggcagaatgccgcactcccatgatcggatcgaccccgtccacgtcacctgggacggggctgcttccattgatcagacgcaacaaccgatggaattgcagcaaagtccagcgctgaactatgcacccgtagtcccggcggcgacggcggccgaccgtatcgtggagaccagcattccctcgaggctcgatgcgctgccgtggagcggtttccacacccgcgtcgtgctcgcgctcggcattacctggatactcgacggacttgaggtgacattggccggtgcgctctccggcgcgctgaagcagagcaactcgctgcatttctccaatctcgatctcggtatcgcgaactccgcctatctcgccggcgccgtgctaggcgctctcggcttcggctggctcaccgatcgcatcggccgcaagaaattgttcttcatcacgctcgcgctctacctgtcggcgacggccgcgacggccctgtcatgggatgtcgcgagctacgcgctgttccgattcctcaccggcgcgggcatcggcggcgagtataccgcgatcaactcgaccatccaggagctggtgccggctcgctatcgcggctggacggatctcgtcatcaacggcagcttctggatcggcgccgcgatgggcgcggtcgccgccatcgtgctgcttgatcccgccgtgatcgatcccgacctcggctggcgactcgcctatctcatcggcgcggccctcggccttgtcgtgctcctgatgcgaatgtggatcccggaaagtccgcgctggctgatgattcatggacgacccgacgaggcccatgccatcgtcggcgacatcgagcgttcggtgatcgggcacaatcaggatacgagcggcgggcgcttcaccaagattcggctgaggatgcgtgaccacacgccgattgcagaggttctccacacgctgttctcgctctaccgtcagcgtgcgctggttggcctcgtgctgatgagcgcacaggcgttcttctacaacgccatcttcttcaccttcgcgctggtgctgaccgatttctacggcatccgctccgatcacgtaggctggtacctgctgcccttcgctgccggcaatttcctcgggcctctcttgctcggccgcctgttcgatacgctcggccgccgcaccatgatcatgttcacctatggcgcgtcgggcctgttgctggcgctgtcgggctatctgttctcgattggtgtgctgagcgcgcagggacagacgattgcctggatggtgatcttcttcttcgcgtcacccgccgcgagtgcggcctatctcaccgtcagcgagaccttccccctcgaggtgcgtgcgctggcgatcgcggtgttctatgcggtcggcaccggcatcggcggcgtgatcggaccggcactgttcggtgcgctgatcgacacggggtcgcgcaacagcgtgttcgccggctatctgctgggggcggccctgatgatcgtggcagcgatcgtggcggggcgctatgccgtggcggcggagcgcaaatcgctcgaacagatcgcgcgtccgctcgcctttatggagtagactgatgaaatcggaacttgcggacatggcgatggaccagaagcgcaccataccggacggcgatgcaccggatgcggtgccggtgccgcatgcgctcgtcccgcatctcgatgaacttgccattttgctcgacattgacggcacgctgctcgatctgatgccgacgccgcgcgaggtatgggtgccgccgggcctgtcggaaacgctgaagcatctgaccgagcgcacctccggcgcgctggcgctggtcagcggtcgctccctcaacgacatcgacctgatctttgcgcccgacgtgttccgcgccgtggccggtcacggcgccgagatgcggctgtcggcggacaatgaagcggaggccgtgcacgcgccgccgttggacaaggagctgaagcggcggctcgcggcgcttgccaaactcagtccgggcattctgctcgaggacaagggctattcgctggcgctgcattaccgcctcgcgccgcatgcggaaaaggcgatctacgaagccgtttcgctggtccgcgcagagttgcccaatgcgccgatcgaggtgctgcctggcaagttcgtctgcgaaatcaagcattccggtttcacgaaggcaaccggggtatgcgagctgatgaagcacgagcctttcaagggacgtcgcccgatcttcatcggcgatgatgtcacggacgagaccgtgttcgcgatcatgcccgacatggatgggctcgcgttctcggtcggtcgccgcgccatgggcgtgaacggtcacttcgatgcgccagccgacgtccgtgcgttcctcgcgcgcctgctcgatccaaggtgaaacgaaggctgcgccacgccgcagacacaaaggtcttcgagcacggcgccgtcgcgcggcgccatgcgtgctgcgggagagacccgaagggatgcttttccaagcgaatcgggtgggttccgcgagcgaaaccagtgccaacgcgcccgcccgattttggtttcaattggttgaaacgatgatcaggaaccatattgatgaacggcagttaaacggggtggaatgaacaggaggggacgacctgtgaacttagttgtcgtttcaaaccgcgtcgcccgcggcaagccgaacgagcccatgacgggcggccttgcagcagccttgcttccagttgtggaacattccggtgcgatctgggtgggctcctccgggcgcgtgcgggatggacaccagaaagaacctttcgccgaaatcgaggcgctcgggacgggtgcaatcgcgacgctggatttgccggcggcacattacggcggttattacgaaggcttcgccaattcggcgctgtggccggcgctgcactcccgcagcgatctgatccgtgtctcgcgggacgattatgtcagctatcgcgaggtcaacgccttcatggcgagggccttgatgcgtttccgcaagccacagactgcgttctgggtgcaggattaccatttcctcgcgctcggcgccgagctgcgcgacctcggcgttgatgacccgatcggcttcttcctgcatacgccgtggcccgttaccaccgtgatgcagggcgtgccgaaccatcgcgagctggtcacggcgatgctggcctacgatctgctcggcttccagaccgaggaggatcgccagaacttcctcggctatgtcggcggcgagctcggcctcgcgatcgaggacggcgtcgcgatctcgcagcaggggcgcacccgctgcgaagtgtttccgatcggcatcgatgcggagaagtttgcggcctacgccgcgaagtcggtctcccatcccgacgtatcgcgcctgcgccgcagcctcaatggcgagcgcctcgcgatcggcgtcgaccggctcgactattcaaagggcctcctcaaccgaatcagtgctttcgaccggctctggaccgagcatccgcagtttgcgcggggcatctcgctgctccagatcgccaatccctcgcgcggcggcatcgaggcctatggcaatctccagaacgaggtcgcccgcctcgtctcggacgtcaacggccgccatggcgaggtcgactggacgccgatccgctatctgaacaagggcttcagccaggccgtgctcgcgggtctgtaccgcaccgcgcagatcggcgtggtgacgcccctgcacgacggcatgaatctcgtcgccaaggagtatgttgccgcccagaacccggccgatcccggcgtactggtactgtcgaagttcgcgggcgcggccaacgagctcgacgccgcactgctggtcaacccgcacgacatcgacggcatggcccgcgcgatcgcggtcgccgcatccatgccgttgaccgagcgcaagatgcgctgggacgcgatgatgaagaagctgcgttgccacacgatccagcaatggtccgccgatttcgtcgccaagctcgagaagtgccggaccgagaaggctgccgttgccccgctcgcagcccaaccgccgcaggcgctgcgttggctgaagtcggcaatctctggcgtgcggttgatctgagattattctcgggtctatcgacccctcgtggccgggctcgacccggccatctgccacgggcatgacggcaaacagccatagcgcccgccttcaatagcaatacgatacgccatccagaatcgcgcattgccgcttgttcggcgcgttcggattgtccagcggcaccacgcccttgccctggccgacgaacacgccggggcccacatgcacggagctcttgttgccgatgatcacgctctgatgcggcgtcgagctcgagcgcgtgccatctggccagaggatggcatcgcccgagagcatcccgcgccggccgtcgtcacagctgacgtcggcgccttgccggctgcagacctgtgcggcggcgggtactgcgaggacggagccgagggtcaaaatcaggcccagggcggccatggtcttgctgacgggcatgatgtgctcggtcgggtctggtgggcttcccgtgaatcgtcgcgccgaacccgcctcaggttcagccggcaagcgggccaaggtgcatatagcgctgggcaatgtctttaaaaaacaacaagttgcggaaaataacccgatttgccccgcgatcccttgcaaaatcatcggcgccccttcaagagagggcgctccggagagatggccgagtggcttaaggcgcacgcttggaaagcgtgtgtgcgggaaaccgtaccgtgggttcgaatcccactctctccgccaccacgttgttgttcagcagcggcccgacggcgagccgccagcagccgcatcacacacgaccgacccggcgaacgaactcccaaaccatttgctcgtcaatgagccgtcacggtcggtccacgggatcggtgggagctgcggcaggtaggacgcatacggcatcactttcgcaagcgttactcggccgggaaaccgcgcatggaaagccttgttcatgccgccgtcgagtccgctgtagatcggggccgccggcacattgtcttcgaccaattgcgcgtatgcgcgttcgtcggcgtgctgcttttgccacgccgctcgcgcgatttcgggattgacgacgaagggcgggcatttttcgtttgcgctgaatgcgagagggtgccgcgaacttggaggtggttgcgcatcgaatacataacggcggtcgcatacatccaccttgggttcgagacgcgtcgtctcgaaatgatcgttgccgaccttgagcattttccagaaggtcaggttgggactgtttcgatgccgcgccagatttgccggcgtcaggcggaacggataggcctggacctggaacgacgggcggccgccgaggaatgagtcgcgcgccaacgaatagatttcgctgatctgttcgtcggtcatggcatagcaaccgctcgaccagcagtcgccgtggatcatgaggaagctgccgttgcgcttgtgcgccttgtcgaatgcgttggggtagcccaggttgatcgaaaggtagaagttagagttgggattcatcaactcaggtgtaatcgtatagaacccttccggagcctgtcggtcgccttcgtacagcttcggcccgagatctcccgaccaccgacagatcggataggtcttgagaatctggaagcggccggtcgcgtcctgtttccagacctcgagctcggcctcctccttgaaaatacgtacgacgataggtgaatatttcggcatcttcttctgctcaagcagcgcgagcagctcagcgggtagttctctcgttgccttggccggcaagggcttgctgctttcgccgagacaaatgacaggcgccaaggcagtggcaagagccgccgccagcgcaaggataggtcggaccatggcgcggatcaccactgtgcctccagcctttccgaccgtgcgccgctacgtctcaaacccaacgaagaccgtcgcttcctcaacggacttgcgctccgacaccactgcgttctgaacttcctccgaatgagtggacacc

SEQ ID NO: 188 - DNA, 35834 bp, Bradyrhizobium colbertium
cccggacgtgggagctcataccggttacctagtgccgccaggacctcgtcttggcgcccaaggcgagcttgagcgcctggacggcctctgcgaatggcccgcgaggcaattgtgcctcgatggtctcggcggcgatgcgacaatcgtccgcgaccttgagcagcccgcttcgcgtgagatccatggtggagagggcggcctgctccaggcagacccgttcaagccgtcgaaactcccgcagctctctgttcatgcgtcagctctcgatatgtcccaacgccatgcggcgctgagtctccttaacgaatggtaaacacctctgtgtcgccgatcttgctggcgcggagctgttgcctgcgccgctatgcaggcgccccggagcacgggggagcgtaggcggggactcgtctcgaagccattcggcaaatgatccgccgggatcgcgaaagccgctgcacttatcgccggcggctcgacggaggcccgcgccagcttctatcgcccttcgttattggggctacgccaagcggcgtgtcagcggcgcttgcggtcaactggaaaggttgcgagctgtgtcgcaattgagctggctgggctcacacaggaagagagcgctcaggcaaacgccagggcaacgaggctcgagcagagcagaaccaaaccgccggcagtcaatgccaggaagccatcggatacaaagtcgtggttacgcatgggacacctgccgctctcgttttcgatgcttgaacggatcgatcaaaatcgcccgaacgccccgccttgaaagaggtgatgcttgccgcccgcgcgagtgccttcacgccctcgtgcggtaaccttcaaacgcatgggccaggaagatccccgcgctcaccaagcccatcagtgccgaaaccgtctcgatcatcgttaaattccaaatcccacccttgcatccgagagaacgcgtgcggccttgcacagtcaaaagaatttcggtcagcgacgcgacaatgggggcggggtgaggttttggcgcaacagaatgtccagccctggcacagagcagggggcatgcgccccgtagatcaacgggaagaagcgaacctcccgtttaccatcctgacgtgatcgctgtgggctccccatttccgccgtgttccggttgcgttatccttaccacttccgatgcggtggtgggccgcctcggtatttgaaggaccggacagcgcgccccgtagccaaagcgggttgggtatgcctccggcgaagtggtatttggggcgcatggggatccgacggtcagattcggttttgcgggccgcgcgcggtgttgcggcggtcgcgacctgccttgcgctcgccaattgcgcctcctccaacaagttcgccggccgcgtcgatccgaaatacggcgtgtcctcgagccccagggtcgtggcctggggtgacccggtcccgaaggggggtggcacttaccgagtcggcaagccctatgtggtggcgggccggacctacgtgccggaggaggacgtcaactaccgcgccgagggcatggcgtcctggtacggcgacagttttcatggccgcctgacggccaatggcgaggtgttcgacatgacttcgctgacggcggcgcatccgaccctgccgatgccgtcctacgcgcgggtgaccaatatctcgaacggcaagtcgctgatcgtccgcgtcaatgatcgtgggccctatcacggcaatcgcctcatcgacgtgtcgaacaaggccgccgaactccttgaattcaaaggaaatggcgtcgccaaggtgcgggtcgaatatgtcggccgggcaccgcttgagggctcggacgaccgccagctcctggcgacgctgcgcactggcgttcccgcgccgtcaccctcgatggtgcgggtcgcctcggccaagccgttcgtaccggagctgtcgtcctcgagccgcggcgccattcgcggcgaggtcccgatgccggaagggcgtccttacaatctcggcaacagccaggccgacatggcttcgctcaatgcgacgacggagatgtcggcatcgggacgcagccggggccgggcactccagaacgctcgggcgggtgtcctacgaggaggatggccgctacgccgccgagagcgctggctcgccggcgaatggtgcggccgaggcgcgcagcatcctgagtggtcgcgggctctactgagccgcactcgccttcaggaattgcaccagcgccgtgttcacctcgtcaggtcgctcctgctgcacccaatgcccggcgccctcgatgatcagcttccgcctcaggttgggcagcacgcgttcgagctcgttcacgcgcttggcgccgatcaggcctgtgatcaccgcgtccttcgagcctgcgatgaacagggaaggctggtagatctgggcatcctgccagggcgcggtcagctcccaattgcggtcgatgttacggtaccagttcagcccgccgcggaagccggacttgcggaagctttcggtgaaataggcgaggtcagcctcgctcagccagccggggagcggctcttcggcgcccgcatggccgagaaagcccttgccctcctgcacgaacatggccgcggacggatcggcgaggccgcgtccgccgagcacgatgcgcatggtgctagcgacgtcgcgctccagctcggcttcggcgacgcctggcgtctggaaatactgccaatagaaattggtgatgccaccctggcgcaacagatcgagcggcttgccgcggccgcggaatggcggcggcacgctcagtcccgcgaccgccgtgaagatgtcgggccggaacagcgccgcgtgccaagcgaccggagcgccccaatcgtggccgaccaccatcgcctcgcgctctccgagcgcctgcacgagaccgacgatgtcgccgaccgtgtcgaagatcgagtaggccgcagcgtcgggcggcgcggcgctctggccatagccgcgcatgtccggggcgacgacgtgaaagccggccgcggccagcgcggggatctggtgacgccaggaataggatagttccggccagccatggcaaagcacgaccagcggaccctggccggcttcgcggatgaacagctcgatcccgttggccttgatcatgcgggttgaggacattcgcttttccgccttgtttcaggggtttggtcgagaaacatgaggcaccacgataggggcgcggcgagaatcgtgcaatctcagggacaagcgtccagccgcgtgttgttcgcatctgttccaactgttagaacgctctctcagggcttcgccatgtcacttcgtctccctatgcttcgttgcaaccggttcaccgccggcacgctggcgcgcggcctgatcgcggcggccttgatcgcaggcatggcctggggcggggcggttctggctgccaaccagagcgtccagggcgccaagaaagcggacgatgttggcttcgatggcgatgccccgacggcgatcctgatcgaggcctcctcaggcagcgttctgttcgagaagaacgccgacgagctgcgcgctccgtcgagcatgatgaagctgatgaccgcggaggtcgtcttcaatgctatcaagaagggcgacatcaagctgacggacgagtaccggatcagcgagaatgcctggcgccgaggcggcgcgccctcgggcggttcgaccatgttcgccgccatcaacagcaaggtctcggtcaacgatctcctgcatggcgcgatcatccagagcggcaatgacgcctgcatcgcgctcgccgaagccatggcgggcaacgagcggattttcgcggccgacttcatgaccaagcgcgcgcgagaactcggtctcaccagatcgactttcgccaactccaatggcctgcccgaccccggcaacaagatgaccgtgcgcgagctcgccatgctcgcccggcacatcattctcgacttccccgaattctacaaactgttcggcgagaaggagttcacctggaacaagatacgacagcagaaccgcaatccgctgctcaattcgatggaaggcgccgacggcctgaagaccggctacaccaaggagggcggctacggcatggtcggttcggccgtccagaacggcacgcgcctgatcgtcgtcgtcaacgggctcgacgattccgacgaccgcgccagcgaagcgaagaagatgctggaatggggcttccgcaatttcgagacgcgcacgctgttcgcggccgagcagccggtcggctacgccaaggtgttcggcggcgagagccgctccgtcaagctggtagccaagacgccggtgaaggtgatggttcacaagaacggcagcgacaagctgattgcgcgcatcgtctatagcggcccggtgcgtgcgccaatcgagcccgggcagagggtcggcgtggtcaaagtctggcgcagcggcaacgtcgccgtggagacgccggtctatgcggccgaggcgatcggcaccggttcgaccatgcgccgcgcgatcgacggcgccagcgagctcgtgatcggcatgttccgcgcaggcgccgagaagctctgaccatggctgagggctcgctacagcggccgtccggacgcggacgcttcatcacctttgaaggcggcgagggcacgggcaagtcgacccagatcaagaagctcgcagaccgcctcaaggcggcaaagctgcgcatccgggtgacgcgcgagccggggggctcgccgggcgccgagatcatgcgtcatctggtcctgtcgggcatgggcaagctgctcggcccggaagcggagacgctgctgtttgccgctgcccgggacgatcacgtccgcaccgtgatccagccggcgctcagccagggcgtctgggtgctgtgcgaccgcttcgccgactcgacccgggcctatcagggcagccttggccgcgtgcccgatggcctgatcaacgccatgcagcgggtcaccatcggcgacctcaagccggacctcaccatcgtgctcgatttgccggtcgagatcggcctgcaacgcgccgccgcgcgccgcggcagcggcacgcccgacaggttcgaggccgagaagctcagcttccaccagggcctgcgcgaggcctatcgcaagatcgcagccgaggatcccgcgcgttgcgtgctgatcgacgccaattcggaccctgacacggtcgccgcgcgggtctggaccgcgctgcgcgagcgtctgcttcccacgccggcgtcagtggtgtcggcatgagcccacgtcaggccgagcgagaaaccgcagttacgcatccgcgcgagacgtcgctgttgttcggccatcgcgaggccgaggccgcgctgctgagcgcctatcgcagcgggcgcattcctcatgcctggctgatcggcggcccgcaagggatcggcaaggcaacgctggcctatcgcatggcccgcttcgtgctcgctcattcgcagccgctggcgcccgccgtgcagcgcgccgaagatcttgcgatcgatcctgacgatgccgtggcgcggcaggtggcggccggctcgcatggcggcctgctgacattggagcgtacagccaacgaccgcggtgtgatgcgcaccgtgatcaccgtggacgagacgcgggagacgattgcgttttttggctcgaccgctgcggccgaaggttggcgtgtctgcatcgtcgacaccgtcgatgaactcaatcccaacgcggccaacgcgcttctgaagattctcgaggagccgccgcagcgatcgctgttccttctggtgagccatgcgccggctcgggtgctcgccacgatccagtcacggtgtcgcaagctgcggctgcggccgctcgcgacggatgatgtgatcggagcggcttcttcagtcgccaacatcgatccgagcgatgccgcgctgcgcgaggcggcggaagcatccgagggcagtgtggcgcgcgccttggcgctgctcggcggtgatgcgctcaagctccagcagcgcaccgcggccctgctggcccgcctgccgcaggtcgacccgcgcgaattgcacacgctcggcgattcgctcggcaccagcgaccgcgtcgcgctcgccgccttcgtcgacggcatcgatcgctggatcgcggagcgcctgcatgcggacgacgtcaatgccaaccagaacctgccgcgccttgcgcgcttagctgaggtatgggaaaagatcgtccgcgccgcgcgcgacaccgaaacctacaatctggagcgcaagcccttggttttctcggtgttcggctggctggcggacgcaacgcgctagagcatgatccgaaaaggtgcgcagcggctttccgaggggatcatgcgcaaatcaacaatcgaactcaggttcgtttccagatttcgagaagccggtaaaggaattcgtggtggcaacgcgagctaggaaaaccgtcaagagcaagagcggcaagaaggctgcgaaaaaagccgtcaagaaagccacgaagaaggccgtgagggggcgcacgcgcaagactgcgaagagtgcaaagaaggcagccaagtcgaagacggctcacgccaagaaaagcgctgccaggacggcaaggaaggccggcaagaaggctgctaggaagcagctggctgccaagaagacggtgaagagggcggccaagagagcagctggagctccggcgaagaaagtggccaggacggtgaggggcactgcgcctgcagtgatcgtcaagccagcttccgccgttacgccgccgaaggcagcgaagccgaagatctcgactccgaaggtgccgcgtgcgccgaagcccgcagcgcccgttgccaccccctcgcgcgacaacgtgttctacgtcacgacagctatcgcctatcccaacggcagcccgcatatcggccatgcctatgaggcgatcgcgaccgacgtgctggcgcgctttgcccggctcgacggcaaggacgtgttcttcctgaccggcaccgacgagcacggtcagaagatggtgcagacggcggccggcgaaggcatgtccgccgccgcgcttgcgacccgcaatgccggccgtttcagggagatggacgaacgcctgaacgtgtcgttcgaccggttcatccgcaccacggaggagcagcatcaccgctccagccaggagatctggcggcgcatggaggcgaacggcgacatctatgccgacacatatgccggctggtactcggtgcgcgacgaggcctattacgctgaggacgagacgcgcctgaacgatgatggcgtcaggcttggaccgcagggcacgcctgtcgaatgggtcgaggagaagagctatttcttccgtctgtccgcatacgaggacaagctgctgaagctctatgccgatcaccctgatttcatcggtccggactcccggaagaacgaggtggtgagcttcgtcaagagcggtcttcgcgacctctcgatctcgcgcaccaccttcgactggggtgtgaaagtgcctggcgacgaagagcacgtgatgtatgtctgggtcgacgcactgaccaactacatcacgggcgtcggcttccccgacgagcaggatgcgaactggcgctattggccggccgatgtgcacatcatcggcaaggacatcatccgttttcacgccgtgtattggccggcgtttctgatgtcggccgggattccgctgccgaagcgggtctatgcccacggcttcctgttcaacaggggcgagaagatgtcgaaatcggtcggcaatgtcgtcgatcccttcaacctcgccgagcagtacggcgtcgaccagctgcgctacttcttcctgcgcgaggtgccgttcgggcaggacggcaattacaaccacgaggccatcgtcgcgcggatcaatgccgatcttgccaacgacctcggcaatctcgcgcaacgctcgttgtcgatgatcgccaagcagctcggcggcgtgctgccggagcccggcgagttcagcgacaatgacaaggcaatccttgcgatggccgacggcatggttgccacgtcacgcgaagccatggcgacgcagcagatccatcaatggctgaacgccgtgtgggccgtggtcgcagaagccaaccgctactttgcgggagaggcgccgtgggcgctcgcgaagactgatcccgtcaggcagaggacggtgctttatgtcaccgccgaggtcgtgcggcagatcgcgatcctggcccagccggcgatgccgacggcctcgggattgctgctcgacagcctcggcatccccgcagacgaacgcaatttcgcgatgctcggtggcgccaagcggatcgcgcccggctcgatcttgccggcaccgacgccggcattcccgcgctacgtcgagccggcggcctagaggcgttcgcgcaatgttggtcgacagccactgccatctggattttccggactttgcggaagatctcgacgggatcgtgtcgcgggcgcgagctgccggcatcgtgcgcatggtcacgatctcgacgcgggtgcggcggctgaaggacctgctcgcgatcgccgaccgttacgacgacgtatattgctcagtcggcacccatccgcacaacgcggacgaggaagacggcatcgcgccggacgagcttgttgcattgacggagcaccccaaggtcgtcgcgctcggcgaggccgggctcgactatttctacgataacggctcgccggaggcgcaggcgaggggctttcgcacccacatcgccgccgctcgtgccaccggcctgccgctggtgatccacacccgcgaggccgacgaggactgcgcacgcatcctggaagaggaatcagcaaagggatcgtttcgcgccgtgctgcattgttacaccggcgggcgagagctggcgctgaaggcggtgtcgctcgggctctatgttggcttcaccggcatcctgacgttcaagaaatcggaggccttgcgcacgctcgccgccgaattgccgtccgatcgcatcctggtcgaaacggattcgccctatctcgcaccgggtaaatttcggggcaaacgcaacgagcccgcttacgtggtcgaggtcgcaaaggtgttggcagagactcgcggagtctcgctcgacgagatctcgcgccagacgaccgaaaacttcttccgtctgttctcgaaggtgaaagcttgagactgggagctacatgacgctgacattgacgatcctgggctgcggctcctccgccggcgttccccgcccggcgctcggctggggcgcctgcgatcccaacaatcccaagaaccgccgtcgtcgctgttcgctgctggtcgaacggatctccgagcatggcacgacacgcatcctgatcgacacctcgcccgacctgcgcgagcaattgctctcgaccaatgtcgaccacatcgacgcggtgttcctgacgcacgagcatgccgatcagacccacggcatggacgatcttcgctccgtcgtcatgcacatgcgccggcgtatcccgacctatttcaaccagtcgacggccaaagacatcctgtcccggttttcctattgcttcatttcgccagagggcagcgattatccgccgatcctgacccggcactcgattgaagctggcgaaagccagaccatcctggggaagggcggggcggtgacgatgaccgccttcctggtgcagcacggcaacattcccgcgctcggctaccgcatcggcgatgccgcctacacgcctgatctcaacgacatcccgcgcgagagctggggcgcactggaaaatctcgatctctggatcgtcgatggtctgcgctataccagccatgtcagccatttcagcatcaacgacgcgctgtcgtggatcgaacggttcaagccaaagcgcgcagtcatcaccaacatgacggccgatgtcgattacgaggtcatcaggcagtcgctgccggccggcgtggtgccagcctatgacgggctgcggctggagacgcattgaacctgaggtagaaattccggcacatgccggcacactccttgcttgcacaggccgcatcatgttgatctaacaggcgttgggtggggcgatattcagacacgatccggcgtggtcgattgaatcgcttcgtgtgaggatggggattgcgttggcaggagacgatgtaggagctcgaggaccggtgcgccgcgctctggacctgctttatctcggcgcgggctacgccgcgggcgtcttcctggtcgcaatcttcgcaatcatgatggccatgtccgtcgggcgccagttcgcgatcaacattcccgccggcgatgatttcgcgtcttggtgcatggcggcgatggctttcctcggtctcgcgcacacattcaagcgcggggagatgatccgggtgggactcttgctggaacgcctgcacgggcggaccaagcagatcgcggagatcttggcgctcgggattgccaccgccttcattctctatttcacgcgctatgccgtgcagatgacttacgactcctggcgcttcaacgatgtggcccagggcgtcgtcgcacttccgctctggattccgcagctcggctttgccggtggcctcgcgatcctgtcgatcgcgctcatcgatgaattggtcaatgtcgccggcggcaatcgcccgagctacgagaagggctcgccggacgagacgccggacgaattcatcgagcgcatctcgcagggcggcggaggttgaccatggccaatctcggcatgatcgagctggcgttcgtcctgctcggcgtaatgattctgctgctgggaagcggcgtgtggatcgcagtctcgctcggcctcgtcggcttcgtagcgatggcgctgacgaccagcttgccgctcggcgccgtgctcgccaccacaacttggagcgccagctcctcgtggacgctggccgcgctgccgctgttcatctggatgggcgagatcctcttccgcaccaaattgtcggaagaaatgttccggggactgtcgccctgggttcagtggctgcccgggcggctcacccatgtcaacgtgatcggctgcggaatcttcgcggcagtgtcgggctcgtccgccgcgacctgcgcgaccatcggcaagattgcgctgcccgagctcgacaagcgcggctacgacaagagcctcagcctcggatcgctcgcaggcgccggcacgctcggcctgctgattccgccctcgatcccgatggtggtttacgcggtcaccgcgaatgtttcggtgcttcaggtgttcctcggcggattcctgccgggcgtcctcgtgatggtgctctattccggctacatcatcatctggtcgctgctcaatccgaacaaggtcccgccgcgcgatccgccgatgccgttccgacagaaattgcgagagtcggccaagctcgcaccctgcctgctcctgatcctggccgtctttctttcactcgtgttgggcttcgccacggccacggaatgcgcggcatggggcgtcacgggcgcgttgctgctggcatggtggagcggcacgctcacgcgcaagaatttcctcgagagcatcatgagcgcgacgcgcctcacctgcatgatcatgctgatcctggcaggcgcggcctacaccacggctgcgatggcctatacgggcattccggccgcgctcgccacctgggtgcagggccagcagctcacgccgagcatgctcgcactgtatctgagcatcatgtacatcatcctgggctgcctgatcgacggcatatcgatgatcgttctgactgccgtcatcgtgctgccaatggtcaggcaggccgggctcgatctggtctggtttggcgtttatctcatcattcacgtcgagatggcgcaaatcacaccgccggttggcttcaatcttttcgtgctccagaacatgagcggtcgtgatacgttcactgtagcgcgggcgacattcccgttcttcgtgctattgctggctgccgtattcatcatcacggagtatccgcagatcgtgatgttcttgcccaagcttgctttcccagactgatatagccgtttccgattgactgtgaggagaagcctgatgatgtctcgtttagttcgcgcatccttgatcgctggcgcgatgctggctgcaacccccgctttggctcagaccaaatggaatctgccggcagcgtatcctgccgacaatccgcactccgaaaacctggtggccttcgccaaggatgtcgaagccgccacttccggcaagctccagatcacggttcatcccggcgcctccctgttcaaagcacccgacatcaagcgtgcggtggtaaccgggcaggcgcagatgggcgaagtgctgttgtcgatccacgagaacgaggacccgctgttcggcgtcgacgtcgtaccgtttctcgcgaccagcttccccgacgcgatgaagctgtatcaggcgtccaagcccgcgatcgccaagaagctcgacgcgcagggtctcaaactgctgttcgtcgtgccatgggcgccccagggcgtctacgtcaacaagccgctcgcggcgatcgaagacatgaagggcttgaagtggcgtgcctacaatgtcgggactgcgcgtatcggcgaattggtgggcgcccagtcggtcacgatccaggcggccgagctgccgcaggcgctggcgaccggcgtcgtgaactccttcatgtcctcggggggcaccggctacgacgtgaaggcctgggagtcgctcaagtatttctatgacgtgcaggcctggattcccaaagactacaccttcgtcaacaaggccgcattcgaggcactcgacaaggcgacccaggaggccattctcaaggccgctgcgaccgcggaaacccgcggctggaaggcctggcaggacaagagcacctggtacctcgatcaactcaaggcgaaaggcatgaccgtcgagccgccgagcccggcgctcaagtccggcttccagaagattggtgagcagctcacggccgactggctcaagaaggccggggccgacggccaggctatcgtcgacgcctacaagaagatgtgagaccgatgcggccttccgctcaccgctttccggcgctggggcggaaggccatccggcagttgaatcagctcgaaatcgcctgcgccgagccaacctcgttgcgcagcaggaatttctggatcttgccggtcgaggtcttggggatcggcccgaacacgacggccttcggggtcttgaaccccgacatgtggctgcgacagaacgcaatgatgtcagcctcggtcgcgtgtgcaccgtccttcaattcgacgaaggcgcagggcacttcgccccatttcggatcgggctttgcgaccacggctgcaaacaagacggccgggtgcttgtagaggatgtcctcgacctcgacggaggagatgttctcgccgccggaaatgatgatgtccttggaacggtccttgatgatgacgtagccgtgctcgtcgagcacgccgaggtcgccggtgtgaaaccagccgccttcgaaggcttccttggtcgctttctcgttcttgagatagcccttcataacgatgttcccgcggaacatgacctcgccgatggtctcgccatcgcgcgggacttcctgcatggtctgcggattgatcacggtgacgctttcctggagcgggtagggcacgccctgccggcgcttcatgcgggcgcgttcggcaggcgcaagctcgtcccagccgggctgctcggcgcagacggaggcgggaccgtaaacctcggtcagaccgtagacatgcgtcagcttgatgccgatgctttcggcgccttcgagcacggcgaccggtggcgctgcgcctgcgatcaggcccaccaggcggcggacagcatttcctttcggcgcatcgggcgcgttgatcagcgtgttgtagacaatcggcgcgccgcacatgtgggtgacgccgtgctgcttgatcagctcgaagatcttggtcggctcgaccttgcgcaggcagacattgacgccggcggcggccgcgatcgtccagggaaagcaccagccgttgcaatggaacatcggcagcgtccagagatagaccggatgctgaccgagattgccggcaaggatgttgctgacggcgttgagataggcgccgcgatggtgggtgacgacgcccttgggattgcccgtcgtgcccgaggtgtaaccgagcgcgatggcgtcccattcgtcccgcggcgggatcgctgtgaagttcggatccccttgcacgaccgccgcctcatattcgatctcgccaatgcgcttgccgcctttgaacgcggcgtcgtcgacgtcgaccaccagcggtttcggaccgctcatctgagccagtgcgtcgctgatgacgcccgaaaactcgggatcgaccagaatgatcttggcgccgccatggtcgagctgaaacgcgatcgagggtgcatcgaggcgtatgttcaatgcgttgagcacggcgcccgtcatgggaacggcgaagtgcgcctcgttcatcgccgggatgttcggcagcatggccgcgactgtgtcgccaacgccgatgcccttgctcgagagccaggacgcgaaacgcttgcagcgatcggcggtctgcgcccaggtgaagctgcgtccctcgtagaccgtgctgacatgatcgggatagacggcggcactgcgcgcgagaaagctcagcgggcttaacggcacgtagttggccggagtcttgtcgagcccgacattgtacgggttctgccgctcactcatcgactcactccttaaatggcgtcaaaggaatccaatcgagatccaggggaagatcgcgacgatgatcaatcccaccagcagcgccagcaggtagccccagatcggccggataccttcggccggatcgacgcgtccgatggcgcaggcggcataatagccgacgccgaagggcggggcgaatagtccgatacccatggccagaataatgatcatcgcatagtgcacctcgtgcacgccgacggcgcgggcgatcggaaacagcagcggcccgaacagcacgatggccggaatgccctcaagcacgctgccgagaatggtgaaagccaggatcgagacggcgatgaaggtcgcggcgcctccgggcaatcccgtcatggcggatgccagcgagcgcgagaagccggattgggtcagaccccaggccatgcccgtcgctgtgccgatgatcaggaggattgcgccggagagcgatgcggtctccaccagcatcggaaatatccgccgccagtcgaagcggcggtagacgaggaggccaacgagggcgccatacacgatgccgatggtggagacttcggttgcggtcgcgataccctcgaccacggcgtagcggatcacgaagggcagcgcgagcgcgggcagggcgacgatgaaggtcctgccgatctcggatgccgtggcgcggcggacatggctcatgtcctcgtggcgatagcgccaccaaaccagcatgcacagcgtgatcgcaagcacgacaccgggcaacaggccgccagtgaagagggcggcgatggagacgcccgtcacggagccgatcgtgatcagcaccagactcggcggaatggtctcggtttgggcgcccgtggccgcaagaagcgcgacgagatcgcccggcttggcgccgcgctctttcatctccgggaacaggacgggcgccaccgccgccatgtcggcggccttggcgcctgatatgccggagaccaggtacatcgcgccgaccagcacgtagtgcaggccgcccctgacatggccgagcaggcttgccaggaacgccaccatggcgcgggccatgcccgtcatctcgatcagaacgcccagaaacacgaatagcggcactgaaagcaggatgaggtgactcatgccttcgtccattcgcccgaccagcaccatgacgggcgtgcgcgtggtcagcgccagataaccgaagatcgcgaggccaaagccgaatgcaatgggaacgccggcaaagacgcagaagccggcgacgccgacgaagaagatgacgaggttgagattgccgagcggccgcaggagcggctccgaaagccagaacaggccgatcacggcggcgacggtgacgagcgccgcggcgaccatccggtaatcggcggaacgcagcaggcgcaacaaggcgaaggccgccatcaggccgatgccgaccggcagcgccgcagctcgccacatgttggagatctgcagcgccggcgtcgtgatgtagctctcctcataggcatagtcgcaggctggccagacgatcagcaatagaaacgccagcgccgccgaggtcgcgaccagatcgagatacgcccgcatcgccggcctggcgctggcgacgatcgccgtcatgcgcatgtgctcggagcggcggaatgcgaccgccgcgccgagcatcgcgagccacaggaagagaatcgaagcgagctcgtcggaccagatcagcggccggtgaaagccgtagcgcgcgaccacgccggcaaacaggatcacgatctcggcgacgaccaggatcgccgccgggatttcgacgacgagaccgagcatgcgctcggccgaagccagcaacgaaggtcggcgaggggactgagccgccgcctcacccgccagttcggtcatttcgatcccgacatgagccatgacggccgcaacgcgttacgacagcttgccgacggccttttccaggaggccccaggcctgctcgccatacttccccttccactcggcatagaagccggcagtgcgcaacttgtcccggaatggcgcgacggcgggctggttgaaggtcaggcccttgcccgcgagctcctgctggaggctggcgttgagcttggcggtgtcctcacgctccttgacggcagcggcattgatgttcttggcgaccaccgtgcgcacatcctggggcagcttttcccaggccctgcggttggccaggaaccagaagccgtcccacatgtggttggtcagcgaacagtacttctgcacctcgtagagtttggcggtcgagatgatcgccagcgggttctcctggccctcgacgatcttggtctggagcgcggaatagacctcgctgaaattgatcgaggcgggcgccgcgtcgaacgccttgaacatcgaggtccacagcggcgacaccgggacgcggatcttgaaacccttgaggtcatcagggccggtgatcggcttggtcgaggacgtggtctggcggaagccgttgtcccagatcttgtccatgacctcgaggccggccttcttgatctcgccgcgcacgtgggcaccaagatcgccgtccatggccttccagaccgtgtcgtagtccgggaacgcgaagccgatgccgttgatcgacgcggccggaaccagggtcgacaggatcaggccggacagcgtgaagaactcgacgccgccggagcggatctggctcagcatgtcggtgtcggaaccaagctggttgttcgggaagatctggaggtcgaacttgccgttggtctcgctcttgatcgctgccgccatttccctggcgcggacgttaagcggatgggtgtcaggcaggttgttggcgtatttgtaggtgaactcggcgctctgcgcgcgggccacatgcggtgcaccgatgccgcccaggaccgccgtcgcggcggaggccttgagaagcgtgcgtcgggaaaagctcatgggtctgcttccttgggaagtgtgttgttgttgttgtgagatgcaaacctatacggacggtcagcctgaaggtcatcagcgatctcgcgggccccgcttattgcagccggacgaagtcacggcaacatcggctttcggcgcaccggtccaatctccaaacctgaaaaacaaccccatgcacagtagccgtcaaggatctgacgcgatcgtcgatgcgtggaggcgaaacggtgccgagcgaaggtagcgcggcaacatttcgatctaagtgtctgatccggtggaagataaatttattccataatataccttatgcgaatccgacttttaggctgggcgcggttgaccgagccgattgtcgttcgcgtttgaatttgtcactgggcctctggttgattttgtcactcgcctactgatgcaattggcctttctagccggcggcgtcttcacgcttgtcgcggctcgatcggaccctggcgcttcgagattcaattttggcactgagcgatagctcggcctatcgcaggataacttacactgcgataggccgagccacactgcgctcgtcgacgggatctaccggccggtcatcgggaccgggtttgggctgttgctggcgcaccctgagcctgtgcaggctgcggcgcttgattggatcggcctaggggcaagcgctcggacgagcggtcatcctcatgggatgcatgtccgtagacgatgtcgccgccgggagcattcagcaacggcagggctgctcctcccagaacgtgatcaatcccggcggcagtccgtcccatctcggcgcgatcaatcaatccaatttcgggatccacaacgatcaccgagacggtctctcccgattgcgcaggttccggaaccgagattgggctgacccagcggatcaggccttgaagcatttcgagactcgaccgcgctgctgtacggtctccgaaggaattccgccgtccaaggacgatcgcagagctgcgaatagccttcgaccctcctaacgaaaagccggcatcggcgccctctccttccgcggccaggattacatccccattgggaagggtcgcgagaacgcgcctgggagagccgcacaatcgcctgagctcagcgggtgtggggtctacctcctcgacgacaatccgtcgctcgaacgggtctattgcaacagccttcacgctacttatccgatctgcgcgtctttgcagaatcatcggtcgacgcacggcggaggtcaacccgatcggcaaggcttgcgccggagagttgtgaattccggttaccgttgggctttctaaacccaagtttgcgctctcgtccggccggacgggtaaaatgtggtctgcgccaccaacgttgatcatggcgcatactgccctgtgggcctgatggtcagatgccgtgcttggccactgattggatggcggcagataggagttgtgtcgctgctccggggtcgaattccgggtcaagaagatcgtcgagcgagagcggacaggtcgacggcaattgaggtacgactaccgcgcgattttccaaggtgcgggtagctccgttgcaggcgacacgccagattttctcaagatcgagtcgctgcttcagtcttggcgaaaaggccaggacggcatcgccttggaatgtgacgatttcctcaaaccaacgcgtttgagtctgacattcgggctggagggctgatttcagcaagtgaattagggtttgtcgaagtagactagatatcgccaggatttcggcacgtcccatcccttcgatctcttcagccagattgtcgatgtcaaggcgcgtgtctacaggggaagttgccctaaggatgccggcttgctcccgggtccacccgtagaaatctgtgtcgtgttcactggcttgcttcgtcagcatgaaacccccgagcacctgaagataaaggcgggcggagcataatcaaagggagaagccttcgaccaagcgaggatcgggctgtctatccggggctggaggctgttgacagacgtagctctggccgcggccggctgcggcggccggggtgacgcatttcctcgccggctcaggtccacttggcgggtcggacctgtggacggcagggcaattcgcacttgtaagtgcacccgccctccccacatcgaacgccggaaccagccgctaggccgcaaggacactgcacgttatgggcgtcggggaagacttccaaaaattcaaggacaactaccagatcacgactgagctaatcacatcgatttcctatcgttacaagcgcatcacccgtcagctcaacacagatttctggaacacgaattccgagacagcacatagtctctatgtcggctcttacggtcgtgacactgcagcccggggcctgagcgatctcgacatcggctttatcctgcccaacgccgtgtatcatcagtacaacgcccatcaaggcaacggacaatccgcgctgcttcagtccgtcaagcgatcgatccagaagacctatcggacctcggagagtttcggcgatggccaggtcgtggtcatctcgttcgacgacaatttgaccttcgaggtgctgccggcctttgagaaccagaacagcgatagctggacctatccgaacgccaacaatggcggcagttggaaggtgtgcaatcctcgagctgagatcgccgcaatcgacacacgcaacgccctcacgaacaagaaccttaaatatctaggccgaatgatgcgagtgtgggcgcgccactgtgcggtgccgatcagtggcattctcatcgacacgttggcgtatcagttcatcgagacatatccgcaccgcgacaagtctttcttgtatcatgacttcatggcgcgcgacttcttcgactacctcgcaaagcagaatcagaaccagaccgtctggcgtgcgcccggaagtggttctcacgtgcaccgcaagggtgtgttcgaattcaaggcgcgtagcgcatatctacgcgcgacggaggcgattcagtacaatgacgacaatcatcaatggtcccgaaggcagaaatggaaagacgtgtttggatccctctatcccggctgacccagagcgcgtcgccttcgaaagtcaggtgcgagagagtttcggacgctgcgcctacactcacaagacgcacgagaaaatggccgagggctatgccgcgcgcctcacgcacataaaactcggccagatcgtgctgtccgcgctgaccacgggcggcgccgtcggcgtgatatttgatcgcaattcggtcttctacccctacgcaacggccctgctcgccatctctctcctcatcctcaacagctacgtcaaggacatcgatcccggcgaggctgcccaaaagcatcgcgaagcggcttccgacatctggaacatccgggaagcctatctcagcctgctcgcggacatacgcgacgcttcgatttcgctcgcggagctccgccgacgccgcgacgaactgcaggcccaactccacaagatttatcgcatcgcgccccataccgacgcgagggcttacggcaaggctcaggacgctctgaaaaacaaggaagatttgaccttcacagacgccgaaatcgacgccttcctgccggcaccgctgaagcggggcgccaataccgacctcattaagtctgaaacgaactcttagatgctgtcacccgcggttctgtccagcgattgcggcgtcggacttgccggccggcggccggaatcccgaaagtctcgttgaggtcgggctcgaacccggtcgaaagaccgcggtgcaggaggatgcctacgcatcacaaaccaatcgagcagaactatgaatcgctgcggccgtttcggacgaaggtatgcatcaagccgggtctggcgtccccgtttttttcggagatgacgatcctgttcgccgggttcagaaccgcttggcggtcagaacgatggtgtcgcctccggacgaattttctgggaggtcgtcggcatcgccgatcgcgatccactcctgcggatttccggacacgcgcatcatgtagtcgttgccggcaatgccgacgagcacgccggcgtaggctcggcctgcggtcgttgtggcgacgtagagatcgttccacgggaccgaatgcgatttttggaggaagctgagcgcttttctgagcgccttcacccttcttggatccgatatctcctggaacagacgctttgctccggacacgtcgccgtcgattcccgcgacgctaatgtcgatcatgcgctctttcgtgacgacgtcgaaagcaagttcatggccggcgttttcggcgagcgcgctaagaaataagcgctgcgctctcccgttgccttccctgaagggatggaggttgttgatttcgacgaagaggtcggacgcgtggtcgatgaaatcgttcagggccaatccgcgcaattcgttgtctcggaccagcgcaccgaagattcggtcggcttcagattttatctttgggctggccgtgaaatgttttgggctttcgtccgagtccgagtatgccgccttacggaggtcgcatgttctaggtttccccgcccattcatagacatcttggaagagatatcgatgaatctgccttaacttatcgaagtcaaagggggaagtaggccgtctgcgggcaagaaccatctgcctgagagacacgatctggtcctctttgcgcagaagctctgaaggatcgtcggtcccgaatttgttccgaagggttccgttggggagcagatacggatcaggcaccggggccgaacctcttgaggccttgttcgatcaactcgtcgtcgtcgatctctccccgcacccactcgttcatcaattcctcggtttcgggcagcacgtggccgccctcgatgacggtattggccaccgcgaaccgagcggctttggagcgcgcttcgaactcggtcttggccttttcagcttcattctgccggaaagcgatcagatcggacatacgaatgcggtgatgcgctccgaccatccgagcgttcaaatcaccctgcttgatacgttgaacgactgtagggcgcgagatgccaagcaggtccgatgcctgttccggcgtaacttcgggatcgtcggcaaacaagctgatttgccggcttccttcgatgagacctgccaagtctttgatgacatccactaacccgtctggcaccacgactgtcgactttcggccgaggatgggttcaaacacgagcttgacctggccgattccgccgccgccagcctcggcgagaagatccagcaagcctttcgccgaagagcgttcttcgggagcgacgacgtgtgtcttcaatgccgtagcgaccatgattgtctccttatctgaaatatctgaaagcgaatgcctcttgtcaagtcaaatagctggcggttaccgcccgacgacaggcgtcggagggagagctggggtgtcatcctcccgcattcgtgacgcacgctgccagcgaggcgctgccctccgacatcgacccacgggcgcgaattccgctcgccgggcgagcggggtgcggatttgggggcgcccccccgcgcataggatcgacctagggcggcataagatgaccatcatcggcgcaaacgggccgcgaagcgctgaagcgtaacccgatcgccatcggtcatcagaaagccgcgtgatggatagtcttccgtgcctccatgaaggacccgtctatcgtcgatctgcgaaaccaggtaggcgaaaggtggattgaagcgtcgaagcggccagccggaggccgcatgcaattcttccgcatcgacggtcccggtcccagatttgccgagagcaagatcgacgagcgccaccacgtccgtttcgggggtgctttgcccggtatggggatcgaacgtgataaaaagctccgcggtggtgaacatccgcggaagccgcgtggaaatcatcgagctcgttttcagatagccatcgctttcgagctcggcgacggcaaacgccaaatcgtcgatgttggattccggaaacgcctcgatgaggtcttgctcgggaatgaagcagtcgaagcccttttgggattgttccgatacccacaatcctatccggatcgccaatggcccgagttcgccgatcttcaactcggacttcttctttgctggcggcgcgatcagcggaatgctcagcctgaccttagtcggcggcggagcttcgcctgcagcaagccatccgtcgagaccgtcgatcaccaactgaccaatcgcggcgaactgcaggatgtcgtcgccgaccaggggcaccgtttcgcccagtcgggcctccgcggcatgttcggcgaacttcgcgtcggccacgccgagattgtgtccgatgacatgccgcttctggatgttcagcgtcaggacggcgagagcgtcggccgtcaaagtcccgaacggatcgaagtcgaactcggcgaagcgcttgcggccgcgctcgatgttctggaagtcgttggcgaccggcttcgtcgccgcgacgtcgggcggccgagtggtcgccttgtacaggtataccgtctttaaggtcgcttcgaaggccgtcaatacgtcctcatgcgcattgcccatcatcctgtatgcgagttcatgcctttccgagccaacttggcccgcgagttccacctgctcccggacgagcgcgatttcccgcgcaaagtgcaagtgaatgttcggcgctccgcaatccggacagaacaaggaaatggcgtagacgccgtagtcccggccgcactcgtcgcataccaactcgcggagaagatcgtttcgagcgaaccgcggtgcgggtttgggcgacggccgtgcgccagtcgttatcttgaaaaatttgttgccagcgttcttccgggcgaggtcatcgaacatgccgtggattgccgccgcggcgtcggcgtgaaaggcatgagcgacgatttccttggcagccgcgaggtcgtcaggatgcgtaaagttctcgtcgtcgtccagaacgccgctatacggacagactgtgcctggcgtaccgggcgcgtgcgtcatgcgagacgtcaacgtctcgggtagagtgaaatccgatactcggtcgcccagaagaaagaggcgcggatgtgcgtcttcgttgggtgaataccggtacacccggccatccggcgtcttcggcagcggaatgccaagcgtcaagttgttgccagagccacccgtcttgtacttctccagattccgcaagcgcatgagtccacctcggatagttgatcgttgagccgatggaccgacgcgaggagatgcatctcctcctcgcgtcggagatcatgattcctcaccttccgagcgagcccgccgggacctattttcgccggtcgctgcccgccgcgtacgttttgcggatgaggccgccgcgggctgggcggcagcgggcacctcaagcgtgtcgcagcacgccagcagggcccgcgcgaactgatcgccggcgtcccgaacccaatcgtcgcgtacgacggtaaaccaggccgtcaatgcgacgagatcgacgcagatcgctccgatcgctgcgggcttaatggccgccaacgccgtgagaagtgacgacatcgagaaactggacacggctgggatgatgttgtcgtagcgccagacgacggtgagaactgaaatcagaagagccgccaagcaggcagcgacccctatcggtttcaatccgcgcaggttccggcgaaaaccatattcggcattctccttctcgacgagcggataggcctttccgcggcaacgttcctgaagccacttcacccccgatgcgtacatggcgtccgcggccttcggatccgccctctcctgttccgcgcttggcgtaacgaacaacggcacattcttcgcgaagaacgcgtggtatcgggccaacaccggcggcggaagatgttcttccctatggcgcagccagatcgtcgatggccaacctccccattcagccaggagacgcttctccaccttcttgccgcgcgatctgctcaggacgctcaagccatacaggagcccgcaggacgtcgcgatggtcaccagcgtggcgccccagctcgaggtgaccagccgaggaaaccacgcgatcgcagtgaggatgatcggaaacagcgtgagcaaacccggaaacaggcgcgcctgtcgtgaatagggatcgaagagcttcgaaatatcgatcaccggatcgcctctgtgcagtcgtgggtgctggccggcgacaggtccggtgatctcgggttcttcatcttgccaccttgaccacggcgctgtgcgagctggcggccccggacaaggcttcagcggtgaaatggacgtatccagccggcgtgtggatcagcatcagcaacggaaaatactggcggatcgaaagcagagcggcggtcttcacgtccttcccggacgggccgcttgggacgagatgattgtgccaggtcccgagcgcgtagagtgcaccgccagatccttcgatcagatcttccagcatgggcctcagtccctcggtgcccagcacgaactcgtcgcgcgagaatttgctgtcgggcggcgcgggcatggtgcctacgacgtggaagacgttggcgacgtccgaatatcggccgacgatgatgccgcccgtctccgagccacggcgcgcagcgacctctcgccggatcgtgtcgtcgacctccggactaaggcgcacgacgctgtccgtgccgtcgcctacgacgatgcgcggccggatatccttgcgatgccatatctggttcagcccatcggccgccaaactgccgaccagcacctcgccggtctcgggaagaccgtcgcgttggagccggcgaatatgctcggacatcggcgccgcgaacgaggacaagcggccgtccgacagcggcatcgtgatggccgcgcagccctgaccgatcgcgatcgcttcggccttcgtgttgaagacctcgttcctgagagtgggatccgaatggatcaggcgataggcctcgcagatcagatcggtcgccgacgggttggccgccggtccctccaccgacatcaggccgacgcttccgatgcccagcatgcatgcctcgaccacccggggccggtcgatcgtgactccaggcaagaccagcgcctcgcgcacgcttgcggagccggtcgtattgactacggcaaagctgtctcgggcgaccaaaggagtgatcgattggtcatcgaatgcgcgcgcgacgacgtccacgacgtgcggcaccgtcggctgcttgagggtcgcgagtgcctcggccaggtagtgcgcctttggaatggaccagaagctttcgactttcgtgtcagacggaagcgtggcgtagcgcgcgaaattgtgaggttgcaggatgccgtcgtcgatgagagccgcgggtccccgtccggacctggcgagatgaacggcgagtttggatccgatgcttccgcagccgaggagcgtccagggacgcagcgcctgcccgtcgtcgcccgcagcgcgtcgcagcaattcgggggatacctcatctcggtgcgtggcggtcctgaccagcttgccgctgcctgacgagagcgcctcgccgccgcgcaattccacgacgtaggggcatatctcgatcggcgaagtcgtgccgatcacctcgaacgggcggcgcgccaacagaatgacggctatcggctgcttctccttcaatttcgattgcgaaacccgctcctgcaggattccgagcttcggctccaggaattcgcggcagcctagttcggccgcccgcttcaagagctcgtcaatcgtcgtgaccgtttccggaaggtagcgatccgccacgaacggccgaccggtcgggagtttaccggaccacgcgatcagtgcgtgagcgttgccggtttgcccgtcatcgccgacaggcgcatatcgccattcgccggcgaaccgcggccccagcggtaccggagcggcgcgcgggatgccgatccggtaggtagacaaagttgcttcgcggtaagcgtagtaccacgccgggaagaccgagcagccgccctctctggtgggcagacccgtcaaccaggtcggatccgcgacgatcacgtcgtcgatcccgtcacgccgcaccggctcccagccgtgctccggatcgatcagctgcgccatcgcagccttgtccagccagtcgaccagttgctcgaaaaggccacctattccgcgaacgcgcagaacctcacgcggcgaaccggcgacgagacacggttcaggtggactgccattcctcgagggctgaatgtgcggatgactgcgattgaagtccgtgcggaggcggataagcggcgcccccaagggatatcctgccgtgaagatgaacgttacgggctcgaccgcgcggacgcccgacgggctctcgcccgcggccctccacgcgttcggtagttcggtccggatctccaccatggcccggacggcgtcgcttccttcgatccgttcggcggtcacccgtttgacggacgggtgagcctcaatgaggcgcagcgcccgtcggacgggtatgggaatgtcgtctgccgcggagatcgccgccatcggctcatccgtgggcgagcggctggcttccgataccggtgccggcggcgacgctgacggcgaccgcagcgcgcttgatgcgcggtccggccgaagtgacctcgatcgccagcggatcgtcgcccggactgtcggcgacgcacttgaattctcccttcacgggatcgaggatatcgatgtattcgcgcttcgcacggatgcacggcggatcgttcttgtcgtccttgatggtcttgctgctggccacgatcagcgcgccatccagcggctgcccgagggcgctccgggcgggctcggacaccttggctttctcgcccttttcggaccagctatcgtaggaaaggctgtgccacgaacagtggtgcggagcgatcagaacgtcgtactgcagacgctcgggccacttcttgttgcgctcccagatgcggtcccagatcgcgacctcggcgtcgccgccgagaaggaagcgcccgcgggtgaccttggacaccttcaggtccagacgcatgatgacgctggagttgttcttcgtcagaacctcctcctccgcttcgtcgtcggcaggcatcggcgccagcagccgcgcctcgaaggaagtgtcccgtacgccgcagatcttcgagaacacctcgtcgaccttcaccaggatttccgtcaggtcatcggtcttgccgtcgacgtcctcgcccaggatcaggatgcggttgccgtcctcggcggtccgttccttcttgaacctgttggcgcggcggcgggcctcgtcgcgccaagcctcggcgtcggcgcaaaggacgtgatcctcgtccttcgccttcgcccggcggaacacgatcggcgaggaccacatttcacggatgatgatcttgtcgtcggccttcacccaggtcgacgggtcgccgagatggaagtgcttgaccaagccccggatgtggtcggcgtccggatgggtgttcagaaagccatcgacgaacagcctccccttatcgtcccgatcgagcttgttccggagctgcttccccacgttgggggtgtcgtcatcctcgtcgtcggccgcctcccggatgttgatgtcggtcaggatccggcgaccggactcggtctcgaacagcaccatgtcgccgttgtcgactttgaaaagtgatgctttaactgccattcccatccccctgattcaacgatcgaaaggtcggtcgcggctccttgaccgattgcagatcggacgggcgcacttaagaagatatgatggcaatttggccacgcaagatgtgctaccagattatttttatcacgctatatatatgaaattgttcaagttttaatcatctggaaccggctttgttcacccggtgttcttggttttctagccgagaggcggcatgatcgcggaattagggcggcaccggcgtgaggccggccccgcagcggatgaacaggttcaagatgagcaagaacatcgtcgtctattccgacggaaccggccaagacggcggcgcgcgtccggagcagcgcatcagcaacatctacaagatgtaccgtgtgagccgtgaccacgcggacacggccatcgatccgtccaggcaagtggtcttctacgacgctggccttgggacggatatcggcgcgaccgccctcaccgctccggtgcgcttcgtccagaagatgctcggatccatcgcgggcgacggcatcaagcgcaacattgccgactgctacgaattcatcatcaaccactacgaagacggtgaccggatattcctcttcgggttcagccggggcgcctacacggtccgaagcctggcgaacctgctgatgctctgcggcgtccccaagaagacgccctccggcccattgatgcgctaccgcaaggccgtgaaggacatcgcttgggaagccgtggataccgtgctggaacacggcgcgggccacccgcgtgagcagttcgaggcggagaggctcgaactggcgcggcgatttcagaccaagtacggctccggcgacggcttggatgccaacgccgcggcatatttcgtcggcgtgttcgatacggtcgctgccctcggcgccagcggtccgcgacgccggatgatccaagccggcttgactctcggcgtcgctgccctcgccttcttcgcttcgctcgttccggccgcgatcatcggtgcgctgacggccatcgtctcggaggccggcctgctatggggcttcatcgtgccggcgtggctggtcacgcatctggcgatgctgattgccgtcatctggttctggaaacggcagcggacggtcaatctcaagaccatctacgacttcccgaacaagggcgatccgccgcgctctcataccgccgagtggacgggcaagaacttcgatcgccttctcagcaaacatgtacgttttgcgcgctcggcgaacgcgatcgacgagacgcgcaaggatttcgcccgggtcggctggggcggcaccgagccgtctgtgcaccccgcaacgccgggtgttccgcgtctcatccagctctggttcgcagggaaccactcggatatcggcggatcttatccggaaccggaatcgcgtttgtcggatatcgccctcgcctggatgtgcgagcaggccacgtccatcccggacggcttgatcaccgggccgatctacgtggacgggatcaggatgccgaagactgatgacaacggaccggcactgaacgtcttccccggcgcgaacggcgttcagcattgcgagatcgcgggcatgcgcgacacgctcgacgcctacgccgccagtctgccgaaatggcgatggctgcaaaacctcgtcggcaccaggaactgggaagtcgaagtccgcgagatcaaccaccaggcgccggtacatccgaccgtgcgcacgcgcttcgacctgccggaagtcagacaatgtgctggcgtcggcgcatatcgcccaaacgcattggcgagccatgacgacttcaaacgctactatccgcaggtggagtcgacagcacagtcgaccgggtccgcctgaacgttcgaggagacgctcttggtcgcgcttgccgacatcaaagctgacctgccggattggccggacgacgtggtggatcaatggctattgaagttggcgaaccaggagggcatgggctggcccccaccggtccccttcaacggccatcggtggcagtacgtcatcgtgaagccggtatcgtggtggaagaaggtcacgtggacgaaggaatcgcgcgactgtagcttcgacgagctgtcgcttaattcccgcaagatcatgaattccatgttcgaggcgttggtcctcggaatcgagaatggctatggcggcgacaacagcaagaagcgctttgaatcttgcgtgagctatctggcggtgaaaggacagttcccgcgcgtgcctgtcaccatgccgatagaaacgggcctaagtatcctcgacggcaatcatcgagtctactcgctcactttcctgcaaagcgttcctgagccggaattgaagaagcaagccatcactcgcccttccgtcatccacgatgtttgggcggcgaagcacgccgatggagaggttctggatagctgacgcggttctggtcgccgtcgatcgagcaagtggtgccgcgcaatttccggcaccgtcggcaattgacgggggcttgccgagagatcggttcgggacgctagtgcgacaatcgggagacctcggcgaaccttagaggctcgcaggaaacctgaaactcgccatcaccgtcgaacctctttcccattaagtgaagaagcgcgcgcccatgcacaacaggcacagggtgcgctgtcataatttccggatcttccggaaagctcggcccgacgatgtcgcgaacgttctggacgctcaaggacgtgctcgcaccctcaaagagaagctcgtcggtctccggatgccagacgcaaactacgatcgcgagcatgaagatgttccttggggccaccggtccggccgctccgacaaaaggccggcgtcggctgcctcgacttgcttccgcttcgcccagttagatcatctcgattgcgatggggagccgcacaaaagatcgttggagggatcgaaagatacattgacggccctccatcgagccaagcactccgttgctttggtcgtcagctgcggcccggactctaacgatcgggaagatgtagggcacttgatcccttcgccctcccatcgaaccgcgatgcctacggcaacttcggtgcttccggctttttctcgggcctcaaacttctgatataggcaatcgctcgttgctggagtgccggatccagatttgtctcatggatccgccgttcgacgaggtcaaggtcaagcgggcgttgcgcatgaatcgcctcgacgaattgcttgtccctgtcatccagtcgcgcaagtttggaggcgatcaaatcctccggagccggcgctatgccgtacacgcttcgtcctgcgacttcggtccttactttgatcgcgcgaacctgccagcccgccggcagtttcgccgtcgtctcgtcgacgccgtcgatgtagaagccgtgagtacggtggaattggctgctctcaccgaacaagccgtcgatgtgctccgacgcaacgttcggatcatcgcccggcgacttggcattctcttccagctcccagatcctagcgttttccgggaaagcgtcgatctccggcgatgctctagccggctcaggcgcatcgggcatcgatgccagaatggcttggctgccgacgacgaagacgttgtccgtgttgaattcgaaggccaaggcgcggacgacccggagaaggtcatccaaagtccgtatgccgcgatcttcggccatcacggacctcccggaacaaggaagtcaggctgcgcagacaggctgcgtttgacgatccgtctcgccgccttcctcaagcggacacgggcatggtagtcgccaaaatcgactccctcggcgagccaaaacggcgaggtattgcgcagccgcaccatctcgcggtcgcggctgatgagtttagaggctagttccttgggcggtagcgcaagcagttcctgccactcgcgcacgaagggccagccggcgaactgactggcttggcgctcatgagccaacttcgccttctcgaccaatgacgggtcgcggcgaagcatccgcacgatcagccgatgcatcatcagcttcgcggtgtcgccaactatgccttcatttagcccgtcgcccatcgcgtggagcgcctctccgcccgcttttccgaccgtcgtgtggaacagaatataaacaagcagtgggcaacaaaaaagggcgcaaaccgaagcggatgggagatggttaccgcttcggcggcgactgcctaggagtttcgtcgcagtggtcccggcggggccgtcggccgcatccccgcctctttgcagcgtcctgcaggtcactttcgcgataatggccgaagcgatggagacttgaagcgcgtgtgcagagcagcaaccataggacgtaagaagaaggtctgggttgcactttcggagaacggaacgtaacaacgcagcgctcggcagtcgcggtgcctttcctctgctcgcgcaacagatatttcgattccaaaagctttttcaggcgagagattgccgatgtggcccgataacgagaccgagcgggacttcctgaacttctccggcgtcgccgaaaccgtggccgagatcattgtgcaggccaagggacgcccgatctcgatcggcgtgtctggcgcctggggcatcggcaaatcctcgatgatcaagctcacccgctcggcgatcgccgccaggaaggacgagagcgggaagaaggccgccgacaagtacgtcttcgtcgagttcaatgcctggctctaccaggggtatgacgacgcgcgtgctgcgttgatggatgtgatcgctgacaagctcgcgaaggaagcggagagccgacagacggcactcgataaggtcgcgtcccttgccaagcgcgtgaaatggctccgggccgcgaaactcgcagcgacctcggccgcctcgatctatttcggggtgcccccggtcggcgcggtcggcgagatcttcgagctcgccaagaaggtctggtccgaaggggtcgggaaggaaaccggcgaagccgccaagaaagctgcggcggacgcggcgcaggaaggtggcgaactgctgaacccgaaggaggaaacgtcaccgccgaaggagattcaggcgctgcgcgacgcgttcgaacaggcgctcgaggagctcgggataactttggtcgtcctgatcgacgatctcgaccgatgcttgccggagaccacgatctcgaccctggaggcgatccgcctctttctgttcctcaagaacaccgccttcgtgatcgcggccgacaacgacatgatcaagcacgccgtccggaagcacttcgtcggggtcagcgacgacctgctcgtcaccaactacttcgacaagctcatccaagttcccattcgggtgccgcagctcgggacccaggaggtccgcgcctacatgatgctcctgttcgtggacaacagcgagttgtccgacgacgacaaggagaagatccgcgctggcatgattggccagctcaagcggacgtggcagggaaagaaggtcgaccgggccttcgtccaatcgcttggcgtgaagttgcccgagcatcttgtcggtcaattcgacacggccgagaggctcgcctcgctcatgacgacggcgtcggggattctgggaaatccgcggctgataaagcgcttcctgaacgcgctctcgatccggatgacgatctcgaaagcgcagggcgtcggcgtcgacgaagcggtgctcgccaagctgttgcttttcgagcgcatcggcgacaccgcagcgtatgccgaactggtcaagaacgtcagcgcctcgggtgagggaaagcctacgttcctccaagaatgggaagacgcggcgacagcggggggcgatctcgatctgaaggcgccgtggaacgctcccttcgtgaaggaatggttggcgctctcaccgccccttcacgaccacgacctgcgcggcgcgctctacgtcggccgcgagcaggcgccgcttatcacgcccgaagaccgcctgtcgtcggaggcggccgagttgctcacggccctgctcgagcaccccgacatggcccaccagctcaaggacaggctgacccgggtctcgcgtatcgaagtcacggtgatgatggatcgcctgctcgagcgcgccagaaaggagcaggactggggtgtcccgcctatcctcaacgcctgcatcgctctcgcagatgccgacccaccacaaggagcccgtctcgctgcattcctcgcggaccgcccttcgcaacagatccaaccgaacatcgtgccgaagatcggcgaccgtccatggtcgagaagtgtcctcgatgcatggaattcgtctcctgacgtttcgcgcccggtgaagacggcgatcagaaagacgagagagcatgggaacgtcgcaatctagtgacggtcccggcccaggcgtgccgttggtccctccctggacgccggccgccccacaggctgtctcttatacacatc

SEQ ID NO: 189 - DNA, 125569 bp, Bradyrhizobium colbertium
  misc_feature (18891)..(18900): n is a, c, g, or t
gaagcagccggtccatcccattagcggacatccactcgttcagtgaaaattgaggatgcggcaatgccggaggttgaccaggagtaattccgcaatcaaaaagacgatgccctggtacgcgtaaaaacacgatccgagaatggaatgcgtaatactacgttcgccttccttcttacgctctttttggcggcgaccttcgcgataagctacattcttgcattcggatctggcgaggcggcttgcatagttgctcatacagtcagattgcagctgaacgggatcgagtatcatattccggctgcgctccagccgtactactcgcctgaacaagctttatcaacgcgggactatctcctgaataatcttcgaaccaagcactattgccaatctccgcagagcccgccggcgatggttaacagtatttcctttccaaagaaaagtctgattgcttgggctggcgggggtaccgaccgtgctgaccttgccggtatttttcctttggccatctatagatcgcatatcgcgagccgcagtgttgcagaaggtggccaaccaacgccaggcggcttgtttcgaaaaatcgtccgagagccatggtttgagctcacgtcgatcgagcccattttttttggctccctagtcacagcacagtgcggtcccgctgctacccagcgaccaagcaacagctgtacaattcgcgggcggctccgcgacggatcagtcgtttcgcttggcgttctcgacgttgagaagccgatcgatgtttggccgcggatgttgcggcaagtcgaggcgtttatttcgtcaatggcagttggcattcgctagaacgaggcggctgagcaaagacggcgcttgctcggacaaattgcgacgtcttcttctggcccatcgccgccgtatgccagggtcgagcacatgtcgtttgtcagggtaagagcggacctcacttaaactcggtctaaccgtcgcgattgacccgaagcggatgtggccgcggctaatggtaaggtggttcgtggttcaacgtatagaactttaccaatttcctggacatatcgtttgacgtgctagagccaagttagtggggattgcagcttggtccatgacggagtggtggggatcatgccgataagtaagatgccggattatccctcgtatattggctattgccttctttggctggttgcgggtttcgtcgtttggctctttagcattgcgctattcgggtctggacactggatcattggcgttattgccattctcgcgaccatcgctctctacttccgtcacggaatggcaattgcaaagcagcgtaaacgatggctgcgcttttcatacggcgcccactaccggcggtattctctccgagagcgtttcggcacagcttctctgtttcgacgtcgtaacgagagctgatccggtgcaaatcagacttccgcttctggcccttctcgggagtccgacaaagaccgctttcgcgccgctttggaggacgagcggacatcactcacgcctactcttggcagcagatttcatgagtacgtaccctagtcggacgcgatcttcgccagcagcgtctccgcgtcactgatcagcgcccggatcgcccgccgctcagcgatcccctcttgtgtgaacgcgccgtgcgtttcggcattgcggtttccccgcggcgcacccgatccccgggcgccgccgtgcatgcggcagcggaacttgccgcgtatcgcgggcgcggagcaggcgaagccgccgcgtgtgcgggcgccgcagcgcgggcttgccgacatcgcgtgcgtgttgcggatgtgaccggtgctcatgcgctggcggcctgccctgcgccggcccattcggggtcgccggctgcgcgagacgcggcgtccggattggtgccgatcagatgcgcatgttgcgtcagattgcccacgatcgctcgtccgccgtcctgcaccgagaggttttgcaccgtgatcgcgctttcgtcgctgttgcggtggcgattcaaggcttcgacctgggcggcgaaggtgcgggcgagccgcgtcaaagcgcgggtcacgccctcctgctgcggaagatcgtcggtgcaggccaggcggcatgcgcagcgcatcgccgccatgtgcaccgacaccatctgcgacaccagcatcgcctcgatggaatccttcggggcgatgctcctgatcgtcgagatcatgaaggcaagattggcctcgtcgggcttctgcccgacagcgctggccttgaccaattgcctcagcatgccgtgcagcgcatcgcggtcggccgcgcccagcgcctcggccagcagccgctcgcccgcttgcgggtcgggatggctgatcgcgatgcggcgcttgtagagtttgacgcgcgggttcgcggcggggctgctgccatcgcttgccgcgagcggcgaagtgttgaggggctggagggctgtcgtcatgtgctgtgtcctgtgaaggcaggcgcggacggccgttcgctgccgcgcgcgaatgcgaattcgaaacgtcgatgaagggtttaggccgcaacggcgccggggaggctctactcggcaaggcgggacgcttgcgagtgttgcgatgatgccatcctgccactgttttgcccgacgagtcaaaatcgaattcgtaaatccggaaatggcccaatcctcggcgcaagctcttggatcgacgaggtctcctactgtgcatggggttgttttcgcattttttgttcgaagacagcgtttgcctgccgtgccgcggaatgccggcgctcaaacgcgattgcgaaatccggcgcggccgctaatcatgcggtcgaaggcgccgcaccaacaagcatgcacaagcggcgccaagaggtctgggagatacgaatgcaacgaacggctcgcgtgctggcagtcatcgccggattatgcgctttggtgctcgcgacagaggctccggcgcagaaatatccgtcgcggccggtcaagatcatggtcggcttcagcgccggcgggccggtcgacgtcgtcgcacggatcgtcggggatcgcttgagcaacaagctcggccagcccttcgtcgtcgagaaccgggccggcgccaacggcatgatcgccgccgagggcgtggcgcgcgccgatgcggatggctacaccatcctcgcctgcaattcgtccacgatcacgctcaacaagacgctgttcaaggatatccgctacgatccgcaagccgactttgcaccgctgaccacggtggtgtcggcgccgctcgttctcgtcgtcaatcccgagaaccccaagacggccaacgtcaagacggtggccgatctcgttgccgcggccaaggccgcgcccggcgcgctcgcttacggttcgggtggtaacggcaatctggcccatctcgccatggagctgctcagccagaaggccggcatcaagatgatccacgtgccctatcgcggcggctcggccgccgaggtcggcgttctcgcgcaagaggtgctggcggtgttcgatccgctctcggccgtgccgctggtgaaggccggcaagctgcgcgcgctggcggtatcgtcggccgagcggctgccggcgctgcccgatgtgcccaccgtcgcggaagccggctatcccggcttcgacatctcgttctgggtcggcttcttcatgccgaaggcaacgcccgcgccgatcctggagacgctgcaccgggagatcttggcagccgccaaggatccgacggcccaagaaaagctcggctcgcagggtgtcgtcagcgtgctcagccagaccgaatatgccgcgaagatcgcgaaggagaccaaggagcttgccgaggtcgtgacggcggcgaacatcaaggcggagtagggcgcgaagcgctatccgccgatcagctgctccaggcggtcgagcagcgggcgctgtccggcgttgatcttctcccgggccgcgtcgagcgcaaaccattcggcgcgatcgacttccggaaaggcctgccgcctgccgctgcgcggcggccattccatctcgaacgtgttgctgcgaacgctgcgcacgtcgacatccagctcggccgcgaacgcggtgacgagcttgcctccgcgctgcctgatctcaccgagcgcgatcagcggcgcggacggctcgagcccgagctcttcggcaaactcccgccgcgccgcgacttccgcgtcttcgtcgtcggcatattcgcccttggggatcgaccaggcgccgagatccttgctgcgccagaacggcccgccgggatggacgaggagcacctcgagcttgccgcgcttccgataggcgatgatcccggcactcttggatggcattgcaggttccgtgcagcagcgctccggctttctcctcggaaacgtggagccgcgcaacgggcggctccgatcacgaaccggacggccgttcgcccgatgcgaagcgaacggcgcgcgccttcgcgctcttgccggccgcgcgtgccgcgatcatgctgcgtcccttgcgctgggccgccgcattgttccgcaattgggttgcaaaccgcttgcgcgcacggttcgtcgtcgaccgggcggcgacctgctcggccttgcgaatgatgctcgcaaccgaagtcgtcaggttcaccggaacccaggcgacgtccttggccttggagaggctgccgatgccctcgcagggtgcttcgcgcggcaggtcgatccggatcgcgagcgcctcggcgcgctcggtccagtcttcggcctgggtgccggtgatgatgcggacgtaatcgcgggtctcgcgcggcagctggccctctctcgcaagccacttctggacgcggcccggaccggcattgtaggcggctgcggcgagaccgagattgccgaaatcgtcgcgcagcttgcgcaggaacttcgccgatgcgggcagcgccttcatcggatcgaagggatcatcgagtccgacttcggcggccgtacccggcatgaattgcgcgacgccctgcgcgccggcatggctgacctcgttgggcttgaagcggctctcctgccagatcaggcgcgcgaagaacggcaccggaatgccgctggactccgcggcttcgcgcagagcgtggcagagcttctcagttggtgaaaccggttcctcggcgccgggctcgttcgcgcgcggcggcgcgggtgtttcctcatacgccgcgcgcgcgttggcgacgtcgatggcctgcacgctggcaaggaagagctcgaccacaggaacaagtggcgaggcgtgattgttcttgagaacggcggtgtcgggagctgggtttgccgcgacgtcgacggatcgaggtcgcacatcagaagcaggaacgcggcgcaagccgcgacgacaaatcgcatttgctgggacaacctcgaactgtggggtgaacggccagcgatgcgccggcgacaggaagttgttaaccctccgattgcggcaaagctgcgatctcgccggttccttcggtgttactacggtgttcccagagagaaactgtccgcgggtttgcagatcgtcattttgccattgggacgagcgatcatgatgcgatggatgcttggcgtggtgatgtcgctgtggctgatcagcccggtgctcgcgggcaatctcgatgcgaaagcggtgaacgatgcgccgcgtcccgtgaaagagccgtccgctgacaagctcaatcctgcagtcgtgaagcttcaggtactgctcgaccgcgcgcaattctcgcccggcgagatcgacggcaagctgggtgagaacgcgcagaaggcgctcaaggcattcgcggagcagaacggcatcgcattcgacaaggccatatcgcaggagctctgggacaagctgacattggcgagcgaagctcccgtcctcctcgactacaagatcgacgatgcagacctgaaggggccgttcatcaagaagctgcccgccaagctcgacgacatgaagtcgctagaggcactgggctacaccagtccgctcgaagggctcgcggaaaaattccacatgagcgcggatctgctcagggccctcaacccgggcaaggccttcgacaagataggggagacgatcgttgttgcaaacgttccggcccggcgagagctgccgcgcatggttcggctcgaggtcgacaaggagaacgggaccttgaaagcgttcgacgcaagcggcgctttgctggcgttctacccggcgtcaatcggcagtccggaccgtccgacgccgagcggtacgctcaaggtgaccggcgcgcacgagaatccgacctaccgctacaatcccgactacaggttcaagaacgtcaaatccaaacggcccttcgacatcaagccgggtccgaacaaccccgtgggagcttattggatcggcctgtcggcgcagggctacggcatccatggtacggccgagcccgacagggtcagcaagtcggcgtctcacggctgcgtcaggctgaccaattgggatgcgcgcgtgatcggcgagaacgtcaagcgcggcacgcccgtggtcttcctcgagccgccgacgggtacgtcctcgacgagacagggcagccccgtacagaagcgcgcctcgaactagtccttgggaaaatccttgcgcatcgcgatctcggcggcgtcgcccggcgacagcacggcctggtcgaaagccggttgcggcctcgtcatgatgtcgtaaagcgagatgcccttgaccggcttgcccatgagctcgcggacgcattcggcgagcgtgccgttgtagacgagatagggcggaccgcggtccttctgtcgctcgccattcagcgacggccacttcttcagctcggccggcgcgtcataggcgatcggcgatccctctttgaacatgcgtatggtcccagcgacttggattcccggagtcctaccggccgctgggtaaacattcgttaaagaattggttcaagtcagccggacacgaaggcgagcagggtgccgttggccctggccggcggcacgcagatcgcatcgccgcttcgcacggcagccgaacccagcgctctttccgttgccgcgagatcgccgctgatgagcaccagcgcagcgccgccacgctcggaaagcccggcgagcggcacgccgggataacgcttgccgagctgttgcagcgtcagatagacgaagtcggcgcgatctccgccggagggcacggtgaccgcgccgtccgcatcggccgtcggcgtgcggtcgatcagccggccgagatgcgcggcttccttcgcggggtccggcgttgcgatcagcgtctgcttgatccgcttcgccgcattggcgtgctttatcagttccggaatccagacggtctcgcgggttttgtgctggcaggcgaaaatgcgcacgccgccgggcgcctccgcggtcggccacaggaaagtgcggaattttgctgccgagaccgtgccatcgggcagcgtcaccggccgttcgaaatcggtcgggccgatcggctccaggccgcgtgcgcggatctcctcggcgccggctgcggaatcgaccgcggtgaaggcgatgcgctcgataccctcgccgtgcttgtcgaggaaggcacgcgcgggagcgttcagctcggtcgcagcgagcacgccgagcagctccatgtagtcggggtcgaacatgatggtgtaattgcccgtgcccatatggacgctgtgggtcccgcgcggggacacggtgaagccaagctgccgataattctcggcggccttgtcgaggtccttcaccatgaccaccgcgtggtcgataccgatgacgttcttgagggccactgttctttccccgcacgagcagactgactttggccgcggcagcggcgacgactcctctctacgatggatgggcagtcaagtcatttttcaattcggtgggggaagccggttttcgctccgcgcgaggcgtcctcgcgacgacatgccgctcatcgaagaagtggcggatcgccgggttcggcgccaggatgatcgcccccgatccggttgaaggcacacggcccccagcgccgcatgggaatctgcaaggcgaaggacttgctgccgaacgcttgcgggtcggtcgacgttgacgtttgctgggggcaaggccggaggacgacgtgaagaacagaatttggtcaattgcgatttgcgccgagctgctggttgcggctggcgcgcaggccgagccggcattgcagggcaaggatgcttacggcgactggcgggccgacaagcccggtacggtcaggctgatccgcccgcaggatctggtgaagccgggcgctacacggtcggttgccagttccgcgcgcgtggtgccgcgtccgcgagacgcctctccccaggtgccggctggtttcaaggtcgaactgttcgccgaaggcctgcgcgcgccgcgcatcatccgcgtggcgccgaatggtgatgtcttcgttgcggagacgcggaccggcaatatccgcgtgctgcgcccaggcgaaggcggcaaggttgcgaccaatgaggtgttcgccagcggcctgcggcaaccattcggcatcgccttctttccgagcggcgacaacccgcaatgggtctacattgcgaacaccgacagcgtcgtccgctttccttatcaggccggtgatctcaaggcgcgcggcaaggccgagactatcgtgtcgagcctgccgcatgacggcggccattccacccgcgatatcgtctttacgcccgacaacaagcgcatgctggtttcggtcggctcgctcagcaacgtcgctgagggcatgggcacgccgccgggcggactggaggcctggtcgaaagcgcaaccgcttggcgccacttgggcgagcgagaccgagcgcgccgccgtgctcgctttcagccctgatggcaaggaacggaagatctacgccaccggtatccgcaactgcgtcggcctcgcgatccagccgcagacaggccagccctggtgctcgaacaacgagcgcgacgggctcggcgacgatctcgtgcccgactacgtcaccagcgtgaaggagggcgcgttctacggttggccttggttctatatcggcaacaatgaagacccgcgccatgccggtgcgcggccggacctcaaggacaacgtgacggtgcccgacgtgctgatccagccgcattcggcttcgctcgccatgacgttctatcaaggcacgcagtttccgccggagtaccagggcgacgccttcgccgcccagcacggttcatggaacaggtcgaagcgaaccggctacaaggtgatccgcatcaggatgaaggacggcaagccgaccggcgagtatgaggatttcgtgacgggcttcgtggtgagcgacacggaggtgtgggggcgtccggtgggcgtggcggtggcaaaggatggatcgctgctggtctcggaggatggcaacggcacgatctggcgggtgagccggcagtaatggaatctgccgcgagcagctgccttcgcctctccacgccagcgggagagggagaagaacgatctacccccgccttacactggcgccgccatccaccggcagcgtcacgcctgtaatgaagttcgcctcatccgatgccaggaacagcgccgcgttggcgacgtcccatccggtgcccatcttcctgcgcagcggcaccttgctgtcgcgctcggcttcgacctcggcgcgcgtcttggaccattcgcgggcgcgggtgtcgaccgccatgggcgtgttcatcaggccgggcaggatgacattggcccggatgccgtattcggcgttctggtaggcgagctgttcggtgaaggcgatcatcgccgacttcgtcgccttgtaggcgacataaggataggtcgtgatcgcggccatcgatgagatgttgatgatcgcgccgctgcgttgcgctcgcatgatcgggatcacctccttcgcggcaaggatgcagctcttcaggttgatggcgacgacgcggtcgaacgcctcttcggtcagctgcagcaactcggcatcgccgccggcgaggctgacgccgacattgttgtgcagtacgtcgattcgtccccagcgtgtttgcgcatctgccaccatcgcgttgatgtcggcggccttggtcacgtcggccttgaaggccgtggcggtgccttcccgggcggtgatcatcgcgaccgtttcctgcgccgagtccagatgatgatcgacgcaaaagaccttcgcaccctcgcgcgcgaaggtgagcgcggtggcacggccgttgcccatgccttcgccggggctttgcccggctccgaccacgatcgcaaccttgtccttcaggcgcatctcggttcactccctcatattttcgtgcagattagcaatcgccccggtcgcagagaagggcgcggctcctgcgttcatgtcattgacatcgcatggaattgcatgtcgcggcaggcctgtcgcgcctcgctgcccccttcaatccaggaaccgttctgaggtcgcggcgtttgctgccggagcctttcccgcgctaggctctgcgtcggggtttcccaaccgccagtgctcaccgatgaatctgctcgatccgcaagggcccgtggctgctggcaacagcacgatcctggtcgattccgtcttcatcatgctcgtgatcgtggtgccgaccatcttcgcgattctcggctttgcgttctggtttcgcgcgtccaacccgagagcacgatatcggcctggtttcgtctactccggtcgcatcgagatggtggtgtgggcgatcccggcgctcaccgtcatcctgctcgggggcgtcgcctggatcggctcgcaccagctcgatcctgccgcgccggtgccggggaccggcagcccggtgcgcatccaggccgtctcgctcgactggaaatggcttttcatctatcccgatcagcgcatcgccaccgtcaacaccctcacggtgccggccggtgccgagctgaaattccagctgacgtcgtcgagcgtgatgaacacgttcttcatcccgcagctcggcagcatgatctacaccatgaacggcatggtgacgaagctgaacctgcgcgccgacaatgaaggcaagcttcagggcctgtcggcgcatttctccggcgacggatttcccgacatgatgttcgacgtcaacgtggtctcgccgctcgcttttccggagtgggtcgcgaccgcggcgaagacggatgccgtgctcaatgagaacagctacaggaaattgatgcagcagggcatcgagaaagaccggccggtgtaccgcctcgaagacccgcgcctgttcgagctgatcgcgacccagcacattccgccgggacccgggccggagcgaatctccgatgccggccgtccgcacagtggaggccacgatgctcggtaagctcgattggtcggccattccgttggatcagccgataccactcattgcgggcgccgtggtgctggtcgcgatcctcggcgtcctgacgtgggtcgtggtgaagggtcatcttagctatctctggaacgaatggatcaccagcgtcgatcacaagcgcatcggggtcatgtatgtgctgctggcttcggtgatgctgctgcgcggcggcagcgacgccatcatgatgcggattcaacaggccgtcgcctatcagtcgcagggatatctgccgcccgagcactacaaccagatcttctcggcgcacggcaccatcatgatcttcttcgtggcgatgccgttcgtgatcggcctgatgaacctgatcgtgccgcttcagctcggcgtacgcgacgtcgctttcccgacactgaattcggtcggcttctggctgaccgcgagcggagcactgctggtcaacatctcgctcgtggtcggcgagttcgcgcgcaccggctggctcgcctttccgcccctgtcggaactgtcctactcgcccggcgtcggcgtcgactattacgcctggtcactccagatctccggcatcgggacgttggtggccggcatcaatctcgtcacgaccgtgctgaagctgcgcaccaagggcatgaattatctgcgtatgccgatgttctgctggaccacgctggcctcgaatcttctcatcgtggcagccttcccgattcttaccgccaccctggcgatgctgctgctcgaccgttacctcggcttccactttttcaccaacgaggccggcggcaacgtcatgatgttcatgaacctgatctgggcctggggccatccggaggtctacatcctggtgctgccggccttcggtatcttctccgaggtagtctcgaccttctccggcaaggcgttgttcggctatcgctccatggtgcttgcgacgatggcgatctgcgtcatctccttcatggtctggctgcatcacttcttcacgatgggcgcaggcccgaacgtcaacgcaatcttcggcatcgccagcatgatcatcgcggtgccgaccggcgtgaagatctacaactggctgttcacgatgtatggcggccgcatccgcttcgcgacgccgatgctgtgggcggtcggcttcatggtgacgttcattatcggcgggttgacgggcgtgctgcttgcggtgccgccggctgatttcatccttcacaacagcatgttcctggtcgcccactttcacaacgtcatcatcggcggcgtgctgttcggcgccttcgccggcttcgaatactggtttccgaaggcgttcggctttcgcctcaacgaacgctggggcagggctgcgttctggttcacctttctcggcttcttcatcaccttcatgccgctctacatcgtcggtatgctcggcatgacgcggcggatgcagcattacgacgtcgcagcatggcggccctggatgatcgttgcggcggtcggcgtggcagtgctgacgatcggcgtgatctgtcagatcgtgcaactcgtggtcagcatccgcaaccgggaggccttgcgcgaccggaccggcgatccctgggatgggcgttcgctggaatgggcgacttcgtcaccaccgccggtcttcaatttcgcgttcaatcccgacgtgcgcggcgaggacgcctattggcacatgaaggcccgtgccaaacaacaatcgcccgagcgcgacgggccggaatatcaggacatcgagatgccccggaactcgccgaccgggttcgtctgcgcgttctttgccaccatcatgggttttgcgctgatctggcacatctggtggatggtgatcgtgggcggcctcggcgcgtgggcgaccttcgtcgtgtttgcctggcgcgaccatgacgagtacgtcattccggccgaggaggtcgcagtgatagatcgcgtcaatctcgagcagcggcgcggcctcgtcagcatggcggaggttggctgatgtcgatcacggccactgccggccatgcgcacaccgatccccatcagatcggcgtcctgatcgagcatcctggacccgccccgaagcggatcgtgaccgcctacggcttctggatcttcctgctctccgatatcgtgatgttctcctgcttcttcgcggcccacgccgtgctggctggccagaccgccggaggcccgaggggatcggagatattcgagccgagctacgtcgcgatcgagacggtttgcctgctgctgtcgagcttcacctgcggcatggccagcatcgcggccgatgtgcgcaatcggctgtggttccatgtctcgatggcgatcacctgtgcgctcgggctcgtgttcctcgtgctcgagttccgcgagtttgccgatctgatcgcacgcggctacggtccctcgcgtagcgctttcctgacctcgttcttctcgctggtcggttgccacgggctgcatgtctccgcaggcctgctttggctcctcaccatgatggcccaggtcttcgcaaagggctttcgtgccgacatcctgcgccggatgacgtgctttgcactgttctggcatgcgctcgacatcgtctgggtcgctgtgttctccgttgtctacctgctcgggagcgcgccatgagtgatcagacgcatgggatgggcaggaatgacctcgcaccgggcgaggaggagcagcacagtgtcggcgcccgcatcctcggctacgtcgtcggcctcgttctggcgctgctgctcacggcaacatcgtttttcatcgccggaacggatctggtctggcagccatcgatcccggtcgcgctgatcgtgcttgcgatcgcgcagatgggcgttcatctggtgttcttcctgcacatcaccacgggtcctgacaacaccaacaacgtgctggcgctcgccttcggtcttctggtcgtcttcctcgtgatcggaggcaccatctggattatggcaaatctgaatgccaacatgccgcccatggatcacatcctgcggatgcagtgatagcgccctttggtgcgacgagattggagccggtcggtgttcggcaaagagtcacctttgctccagcgacgcacaaaaaagaagagccgcttgtggtgacaagcggcccaagtcgagggaggaaacgcccaagcaaggcaatcgggccgaagccggattgctgccaaggaaacgctcgcgcgaagcgcttgcgtacgcatacaaatgcagcaattgccggtacggttcaattccggatcaatacggtctcgaactaccactcacggatgcgtaaggaagttgttcaccttggccgacggcaattgtaggccttgcggaagccggccgcctgggcgtcgtcctccgagcagaaccagcggtccggattggtggtcgcgggatagcttgggcagccccgcagatgatagatgccgacattgccggtgacgcgcgcgcgcaccgcgagcttgcctttgatgctgcagcccggcggcatgatcagctcctccggaaacagcacggcgcggatctccttgtcgcgatccgggcggcaggccgtgcccagcagcgcgccgtccttcttgccggcccgaaaatcttgcggtgcaacaaagcagcccttccagattccggccgcagccgccttggcctcagcggctgcctgcttgacgttggccttgatcggctcgcgcgcgagggcaaagccgagcttgatcagctgctcgttcaggctggccttgtcgccttcggccgtgcagattgcgcgatggcgcttgccaaagctcttttccggcccgacgtcgtcgcagcgcaccgtccgtttgttaatcaacttcgtcagctggtcgcgggcctcgatgccgcacgtccaggaatcggcgtgatcgtcgatgcagatctggtccagctcgggtgcgtcgatgccgtcgagccggtaagtgacatcgccgatctggacagagttgccgtcacgcaccgttgcggcaccggtcagcgcggagacgggcccggaggaggccagaaatccggacgaggtgaaaaacaaagcgagcgcaaaagcgcgggcgtcggcaaagaagttctggaaggacatacagtctcgctatcgatggctcgtgcatcccgttcctagcatccggatgtggcgataccaatggtctgcgtctcgcgaagtgcgaacattccgggctcgtggctttactcaacccgtgctctgatcctatcgttcgccggcctcgctgaccgcgaaaggccgaatcgcccgaaaagcggcgagggggaggaaaaggttgcgatgaaagaccccgtggacgtcctgatcatcggcgccggcgcttcaggcgcggcggtggcgtggtcgctggccgagaccaagatgcacatcctctgcatggagcagggcggctggatgaacccagcggaataccccagcaccgggcgggattgggaggccaagttctacggcgaatggtcgtcgagccccaacgtccgcggccggcccgaagactatccgatcaacgacgacaactccccgatcaaggtcgtcaactacaatgcggtcggcggctcgacggtgatgtacacggcgcactggccgcggctgcatccctccgacttcaaggtgaagacgctcgacggcgtcgccgacgactggccgatcgattacgacgccttgaccccgttcttcgaggagaacgatcgcatgatgggcacgtccggtctgtcaggcgatcctctctcgccgttgacgcatccgccgatgccgcaacagccgctcgggttgtccggcgccatcatcgcgaaagccatgaacaagctcggctggcattggtggccctcggacacgacggttgcgaccatggactatgagggccgggcgcgctgcatcaatctcggccattgcacgccggcctgcgcgcaaggcgcgaaatcctcgaccgacattacctactggccgcacgccatccgggccggtgtcgagctgcgcacccattgccgggtgcgcgagatcacaaccgacgagaacggcatggcctcgggcgtggtctattacgacaaggacggcgtcgagcagtttcaacccgcccacgtcgtcatcatcgcctgcaacggcgtcggcacgccacgcctgctattgaactcggcttcgggacgctttccgaacggtcttgccaattcgtccggcctcgtgggcaagaacctcatgttccatccctatgcgcagatctacggattcgtgaaggagccgacggacagcaatcgcgcgccgccgacctgcctgtggagcaaggagttttacgacaccgacctatcgcgcggcttcgtgcgcggctacgccatccagttcggccgcggcgcggggccggtgttcgaggcggtcgcgagcgagcagaaaggcattctgccatggggcgccgaccatcatggcgtattccgcaggcttaacggtcatcggctcgcggtgtcggcaatctgcgaggatctgcccgaggagcacaaccgcgtcacgctcgatcccgtgctgaaggacagtcacggaatccctgcgcccaagatcgactatacaatcagcgagaacagccggaaaatgatggagcacgggttggcgcgtggccgggagattctcgaggccgccggcgcgaccgacatctgcatcaacaatccgatcccgtggggtggctggcacctgctcggcaccgcgcgcatgggcaccgacccccaacgttccgtcgtcaacgaatggggccgctcgcacgatgtgaagaacctcttcatcgtcgacggcagcattttcgtgacctcgggcggcgtgaacccgacctccaccatccaggccctcacgctgtacatcgccgaccagatgaagcagcgtttggccaatctgttcgattgaggccgtcatgtccgcagacactctattgacacgcaggcagcgcgacgatctccgaaccgtcgccgcgatgatcattcccgcgagcgacgaatacaaggtgcccggcgccgacgatcccgcgatccaggctgacatgctggcaacgcttggccgcgataccaagttggtcgcggcggcgctggatcatctggcacggctcgccggcgcgccgctcgccgagctcgatgccgccaggcgcgatgccgtggcgcaggagtttcgcaagcaaggcggtgccgccgccgcaacgctcgtccgcgtcgtgctgcaatgctattaccgcgacgaccgcgtgctgcgctcgctcgggctcgagctgcgtgcgccattccccagggggcacgtgctcccggatggggactggtcgctgctcgacccggtcaaggcaaggggaggatcgctgaggcgggcgccctagccatctgggcagtccagccccgcgctccaggtggacgccttgcgcggcagggggcagaccaccatctgtgtgagccttcaaggacgcctgccatgttggatttcacctcggacatcatcgatgacgcttcgtcatcgcgaacgactccatctgccccggttgacgacgggccgctgctggatgcctattccagtgccgtgatcgacgtgaccgaccgcgtcggtcccgccgtcgtgcgcgtcgagaccgggccgaaagtgccgaacggccgcgagcgcggcgggctcggttcgggcatcgtgatctcgcccgatggactcgtgctcaccaacagccatgtggtcggctcctccaaggagatccggctgcgcgacgtcgagggccatgccggcgatgcgcaggtgctcggtgtcgatcccgacaccgatcttgcgctcttgcgcgccaacggcgttcgccacttgccctatgccgcgctcggcaattccaagacgttgcggcgcggtcagctcgtggtcgcgatcggcaacccgctcggcttcgaatcgaccgtgaccgccggcgtggtctcggcgctcggacgctcgatccgctcggtgagcgggcgcaccatcgaggacgtgatccagaccgatgccgcgctcaatcccggcaattccggggggccgctggtgtcgtcgaatgccgaggtgatcggcatcaacactgccatcatcaacggcgcgcaaggaatctgcttcgcggtcgccagcaacacggcgcaattcgtactgtcggagatcatccgccatggctatgtccgccgcgcctatatcggggtcgccgggcagaccgcgccgatcccgcgacgacatgcggtgctggccggggtcgagaacaagatgggcgcccttctgatgcagatcgagccagacggacctgcggcgaaggcgagcctcttgcccggcgacgtcgtgatcaggctcgacggcgtcgagatcaacggcgtggacgatctgatccgcgtgctcgaccgcgaccggatcggccggcgactggccatggacgtgttgcggctgggtcggctgcgggcgatcgacatcgatccgatcgaacgcaaaccggcgcgctagcgcggagcagtggcgagcacgtctccgcaatctcgtcattgcgagcgcagcgaannnnnnnnnnttctgcgcaagcagtctggattgcttcgtcgcaagggccccccgcatcgcaagcgccttcgctctccgctactccgccgccgctgcgaagcggctgttctccagctccgcttccagccgcgccgtctcggcggccgccagcttgatgttcgattccttgatatggccgaagccgcggatgctctctggcacgcgcgcgaggcgcgtcagcagcgggagctgctccgccttcaagcccgcgattcgctgatcgatcatgctgagatagtccgcgaccagctttcgctcggtccgacgttcctcggtgcggccgaacggatcgaacggaccgccgcgcaggaacttcagctttgccagcacgcggaaggcgtggatcatccagctgccgaactcctgcttctgcagccggcccgtcgtcttgtcgcgccttgcgaagatcggcggtgccaagtggtacttcagcgcgaagtcgccctcgaacttctccgacaccttgttggcaaagctgccgtcggtatagagccgtgcgacctcgtactcgtccttgtaggacatcagcttgaacaggttcttcgcgaccgcctcggtcagctccgtagcggcaggcgaaacggcgctctccgccttgcgcaccttggcgacagccgtgagatagcggttagcataggccttgtcctggtaggaggtcaggaactcggcgcgggtggtgatgatgtcgtcgagcgatttcgtcggcgcggatgcgcggctcttgaactggagcacgctgcgcacccgcgacatgtcgtgggcggcgagccggccccaggtgaaggcgagcttgttcatctcgatcgcggcgccgttgatctcgatggcgcggagcagggcctccagcgacagcgggaacgcgcccttctggaacgcaaagccgagcatgaagggattggtggcgatgctgtcgcccatcagcgccgcggcgatgcccgtggcatcgatgatgtcgaggttcttgtcgccgatggcatcgcgcagcacggtttgcatcgtgcccatctcgaaatcgagatcggggttctgcacgaagctcgcggtcggcagcaaatcggcgttgatgtaggccttcgtcacgccgcgttcggcgcggctgagcgccgaaggacctgccgagacgatcatgtcgcagccgaggatgacgtcggccccgccggtggtgatacggaccgcggagatgtcctccggcctgggcgcgatgcggacatggctcatcaccgcaccgttcttctgcgacaggccggtgaaatccaatgccgagcacccgcggccgtcgacatgggcggccatgccgagcagcgcgccgatggtaatgacaccggtgccgccgatgccggtgacgaggatgttgtagggcccgtcgagctctcgcgcgggcggcagcggcagatcggcgaacagctgtccggaatcgaccgccgaggtcttcatgcgcttcagcgttccgccatgcacggtgacgaagctcgggcaaaagccctcgacgcaggagaagtccttgttgcagttcgactggtcgatctggcgcttgcggccgaactcggtttccagcggctgcaccgagacgcaattggaagcctgcgagcagtcgccgcaaccttcgcagacgagctcgttgatgaaggcgcgcttggccggatcgggataaagcccgcgcttgcggcgtcggcgtttctcagcggcgcaggtctggtcgtagatgatgacggtgaggcccttgatgtcgcgcagctcgcgctgcacggcgtcaagctcgcggcggtggtggatggtcgcaccttgcgggaagtagttgccttgcgggtatttgctcggatcgtcggagacgatcgcgagccgcttgacgccctcggcccagacctgatgcgcgatctgtgcgacgttgaaggcgccttcagccggctggccgccggtcatcgccacggcgtcgttgtagaggatcttgtaggtgatgttgatgccggcagcggaggcggcgcgaagggcgagaaggccggaatgggtgtaggtgccgtcgccgagattctggaagatgtgcgtctcggtggtgaagggcgactggccgatccagttcacgccttcggcgcccatatgagagatcagatcggtgcggcgggtgggcatgctcagggccatgccgtggcagccgatgccggccatggcgcggctgccctcaggcacgcgcgtcgaggtgttgtgcgggcatcccgagcagaagaacggcgtccgcgcgagcttgatcggcgcgctcgtggtgacaggatggtcgaacgcttcgagccgggcgagacgctgttccagcaccgggctgtgatgcccgagcttgcgcaaacgggccaccagcgcggacgcaacgatggtcggcgtcagctcgccctcgctcggcaggagcggcgcaccgcgctcgtcgcgcttgcctgtgaccgtcgggcgcctggacgcatcgacgttgtagaggatgcgcatcagctggtcttcgatgaagccgcgcttctcctcgaccaccagcacgtcctgaagaccttcggcgaagcgcttggcgccgctttcctccagcggccaggtcatcgccaccttgtagatgcgaaggccgaggtcctgcgcgtccttgtcggtgatgccgaggtcggcgagagcctggcgcagatcgagataggccttgccggtcgcgacgataccgagccgtgccggcttggaatcgagcacgatgcgatcgagctggttggcgcgggcgaaggcctgcaccgccgccatcttcgggccgaacaggcgcttctcggcctcgagcggcggatccggccagcggatgctgaggccgccgggcggcatctcgaaatcgtcgggcagcctgatctgaatgcgttccggatcgctgtagatcgaggccgaactctcgaccgtctcgctgatggccttgaacccgacccagcagccggagaagcgcgacagcgcaaaaccatagaggccgagatcgagatagtcctggagcgtcgccggattgatcaccgggatgagcgcggccgcgaacacctgctcgctctgatgcgccagcgtcgaggactggcagccgtggtcgtcgcccgcaagcgccagcacgccgccattgcgcgaggtgccggccgcattggcgtgcttgagcgcatccaccgagcggtcgacgccgggccccttgccgtaccagatcccgaacacgccgtcgaccttggcgccgggaaacagcccgacctgctggctcccccagaccgccgtcgcggccagatcctcgttgaggccagggacgaaggcgatgtcgtgctgctggaggtgcgccttcgcccgccacaaagcgtggtcgtacatgccgagcggggacccgcgatagcccgagatgaagccgccggtgttgatgccctgaagccggtcgcgttcgcgctgcaacatgggtagtcgaacgagggcctgggtgccggacaggaagatccgcttcgattcgagccggtatttgtcatccagctcgacttgcaacagcgtcatttcagagatcctcgtctcgttcggcgtggggtgctgcgctgcggaagggactgcggctgcgcgacgcgaattgtgacagtcaaaagcatgcaacggcgaagtcaatatcgctggccgcatccgtggcgctcctgctactcatggctgaccgtggagagcaccatgaccgtaaacgcattcgacgccgagatcactgacaccgccgaggcgctgatcgggccgtggcgcaagccgcgccagatgctgcaagcgcaaatctacgacgcgcacgcctccatccacgacgacgccaccgcgcagaagctcggcttcaagggcggcaccatcgaagggccgacccacttcagccagttcgcgccgctcggggaacggctatggggacgtgcctggttcgagacgggttgcctttccgcgcattaccgcagcgtctgttacgaaggtgaggaggtgcaggcgatgctgtcgaagccgctgtcgggcaccagccagtgccagatccagatggtcaagcgcgacggcaccgaggtgctgcgcggtactgcctcggtcggcgatgcgccggttgcgacggcgctcgagacgcgtctcggcgagctcaagccgctgacggatcccgtgatcttgcgcgatgtgaaggtggcgaagacgggcaaacgccagtcggtccgcatggccttcgaacagaacatgggcgacctctatccgttttccctccggcagaagctggccgtcatcacggagaactcgccgtactactcgggcacggaaaatccgtggggcaagcccatcattccgatggagatgctgagcgtgctgttccagtatcgctccaaggacgatccgctacccgccaaggggccggcggtcggcctgttcgccgatcaggagatccgtctggtcaagggaccgctctttgtggacgaggagtacgaagttgagcgtgaggtggtcgcgctctccggcagtcgccgcaccgaaagcgcctgggtcaagacgcgcgtgttcgacaaggcgaatgcggtggtcgccaccatgctgctcaacatggcgacgctgaaggactcgtatgcgccgtatgaggaggagtatcggcagttgtatggagcagggcactaggcgcgaggcttcgctccgcgcgccccggcattgcggcggaggccgcccatcctgtaggcaaatgcacgtcgcagagccgtcgcacagggagtaagcagacgtcggcagtcgatataaccatctgactaaacagtaaattcgcgcgtcgcccacgctccatcgtaattgtacacaatggcacggcgcttgcagaactccgatcaagagagttctcgcggggcctgcgtcatgttgaactcacccgagccgacaaggggcgtcatcagcgccgagcccgagccgatcgagctcgactggtccaagagcgcgcttctcatcatcgacatgcagcgtgattttctcgagcccggcggcttcggcgaaacgctcggcaacgacgtcagccagctttcgcgcgcggtgaagccgatcggcgcggtgctgacggcggcgcgcgacgccggcatgctggtcatccacacgcgcgaggggcatctgcctgatctgtccgacgcgccaagggcgaagatcgaacgcggtgcgccgagcctccgcatcggcgatgccggcccgatggggcgcattctcatccgcggtgaggcgggtcacgacatcatacccgagctgtatccgctcgacagcgagatcgtgatcgacaagccgggcaagggcgccttccacgccaccgagctgggcgaggtcctcgagaggtacgggatcgagaatcttctggtgtgcggcgtcacgacggaagtgtgtgtgaacaccacggtgcgtgaggccaatgaccgcggctatcgctgcgtcgtcatctccgacggctgcgcatcctacttccccgagtttcatgcgatgggcctgaagatgatcaaggcccagggcggcatcttcggctgggtcgcgagctcagccgcagtcttggaggcgatgacgagttcgaccactttgggggcaacatcatgagcacattgacggggacgaccggcaagtctgaaatcgatgcgtccgggttcaagccggcgctctggacatcgggcgactggaacgcgcttttcggcttcggcaccaacattctcgtcaacatgctggtgctcacgggactcttgcgcttcgtgctgaagatgcccgacagcctcgtgttcggcggcatcctgccggcgctcgggctgatgatgtgcctgtcgaccttctactacgcgtaccttgcctaccggctggcacagaaaacgggccgcaacgacgtctgcgcgctgccgtccggcgtcagcgtgccgcacatgttcatcgttaccttcgtgatcatgctgccaatcacgctgaaaaccggtgacccgctcaagggctggtcggctggcctcgtctgggtgttcttccagagcttcattctcatgatcggcggtttcatcgctccgttcatccgcagaatcaccccgcgagcggcgctgctcggtacgctggccggtgtctccgtcaccttcatttcgatgcggcctgcgctcgaaatgtacatgacgccgcagattggcttgatctgcttcgccatcatcctggtgagctggttcggcggcgtgaaatactggcgcggcattccagcgggcctcgtggccatcgccgtcggcatgatcatcgcatggggctcgaacctgttcggccttggcctcggcggcatgagcatcgcaggcgtaggcgcggcctttgccaatttcggcttctcggtgccaattccagcgctgggttatgtcttctccggcttcgaattcctcggcatcatcctggtcaccgccattccgttcggcatctatgacctcgtcgaagccatggacaatgtcgagagcgcggaggctgcgggcgacgactacccgaccacgcgcgtactgacggcggatggcgttgtcagcctgatcggctgcctgatgggcaatcccttcatcaacgcagtttatatcggtcatcccggctggaaagcgatgggaggtcggatcggctactccgcggcgacaggcatcatggtggtcgtgctgtcctggttcggcatcatttcggtgctgctggcgctcgtacccgttgtcgcgatctcgccgatcctgctctacatcggcatgctgatcggtgcgcaggcgttccagaccacaccggtcaagcacgcgcccgccatcgtgctggcgctgaccccgcatctggccgcctgggccaagctccagatcgacacgatgctcggctccaccatgacagcagcagccacggttggaggcttggcggccgacaaggccgacgcggtcaaggcggccgcgattgccgccctgccgcagcagggcgtgttctatcatggcctcgaggtgatgggcgggggatccatcctcggcgggctgatcctcggtgcgatcggcgtcttcatcatcgaacgcgatttcgagaaagcgtccgcctttgcgctggtcggggcgatcctgacctacttcggcttcatgcacggcgaggccgtcggcatcggcggcggcttcggcgtgacgcccgcggtcgcactggcctacgccgtgatggccgccggcctgttcgcagccggcaagctcggcaccagcgagcattacgtcgcgcatccggagatgacggccgcgccggcggagtagtgatgaatcggaagccttgcaaaacggccgggcgatgtcccggccgctttggttcagggacgtaccgccggcgtctccattggcaggccatgcgcccgcgacttgaggtagagctcgagcgcgaccaactcgggcgagccgtagtcataggcttgggcgcggacgccggtcatgcagctgcgcagccgccgctcgagcgatcccagcgtctgccattccagccggtagagcggatagcccgtcggctgtccttgcgtgatcggcgcaccggcaagacgtttgtcgaagttgtcgtcgtggcagttggtgcaggcgaggttgagttggccctgccgctgtgtgaaaagcgcgcggccccggtcgatgaagggttttacctgggggtcttcgccgacgctgatcggagtgccacgtgattgatgggcgacgaaagcggacagcgccagaaggtcgcgactctcgtgaggcagcggcgttgcctgctgatgattggtgcgacagagattgatgcgctggtcgagcgcgacggggcgcgcaagcgccttgtcgaaggcgggatagcgagccgcaatgcctttcatgctgctgcgcgcatcgccatgacaatccgcgcaggccttgtcagccacccctgtcttcttcgtccagagcgcttcgccgtcgagcacgaacagcatgccggggttgctggtgtcgtcatcctgcatggcgcgcgtctccaggcccatgaaggcgtagccggagcggcgtgcatccggtggaatttcaccagcgagcagggcaggagctgcggcgaacaatgtggccgccgctatcgcgcgccggaggctcattcgacaataatcgacgccgatgcagtcgacgaatagccgttgtcgccgacccactcgaagtccagcttgccgctctccttggccaccgtgaagaacgacaaatatgggttcgccgcgatcgccggaaacagatcagctcgaaaaacctccgtgccgttgtaacggcaggcaaaggtcgtgatgatgtcgcgcggcaccagctttccatcgacggtgtggcggaagcctgtctccatgatgtgcgaggtcagcgtgcgaatctcgatgatgtcgccgcgcctggctttggccggaacgttgatgagggcggccatcagttcatctcctcggtgcaggcggccaacgttacgacgacgtcggcggcggtttgccagaacgtgtcgtcggagagacgcgcgattgcaacgaccttctgggtgtcggcgagccgaatgcgcgtcgagacctgggctcggccggaggaggggccaagatagaaattgccgatattcggctgggggttcttctcgttgaagatgtggatggacttgacgtgatcgtccgcggtcatcgggctcgcaacgctcaccgtcataggcacggtgtttccgttttcgaccagcggcggaatgtcgagcttgaccttgccggtgcgcaactgcgcctcaccgacgacgttgcggattgcggcggtgagcatggccggcgtcgcttcgaccggccgcagggtgacgatcgggatcgtgcccgcggccgtcacgctaccggcaaggctgaggaatcgtcgtcgcgtggtcggcatgggcaatcctagtcccgaagcgttgcaagaaaggccacgatgtcctcgatctccgcagccgacaagatcggcttgccggcgaagttacgtccgaccctgacgaggccgtccttgcgataataggacggcatgatggtgtccgaattcaatctcgaggcatcgaccagtcgaagccgcaactggctctcagtccatcggttcccggatccggcgaggtcgggcgcgagatcgccctggaaccgcgtttccggaaacggaccggaatggcagaggatgcaggtcgtggcgcgcgcgagcaccagagcgcggccgcgtgcggcgtcgccgggggagcctgtgagtgaggctggaatgccgtcgtcgacgattgtgtaggggacgagttccgccgccttggtcgatgacagtgtgaggcaggctgcaatgaatacggcaatcgcggatatcggacgggatgcatgggggcgccgcgaactccacttaccgctcccgcttgcgagagaggtcgagcggaaggcgagggtgagggttgtttcctcttggggggtctcgcgaacggagacaccctctccccaattctcccccgcaggcgggggagggggcgcaccgcgttcatgccgacgtgctcgtctcatcatgtactagccaaacgtctccgccgtgatggtctgaaaccagcgctcggcttcagccgactcgcgggcgcgcagctcgcgcggcgcttcgaccgggctggtagcgccgccttcgacctcggcgaagatgtcgcccctgggctggtagttgcccgcgagcgagaagccgtagccgggcgcgacggtgctgtagcagacccctgtgagtcgtggcgcctccggtttacgaccggcgagcaggccgacgatcgcgttagcgcaggccttgccctgcgagctcgcagcggaggccgacttgggaacgccgccgccgaggcaggcgtcgccaatgacgtggacgttcgggacaagtttcgactcgaacgtgacaggatcgatcgggcaccagccggtcgcatccgcagcgcccgcgatcccggcgatgcgtcccgcgcgttgcggtgggatgacgttggcgacatcgggggtgtagttgccgaactccgtgacgatggttcttgtcgcgggatcgaccgaggtgacgcggccgccttgcgacagcgcgacgcgctcgatcatgtcgccgtagagctccttccacgccttctcgaatagccgctgctgggagaaactgtccttggcatcgaggatcagaaccttcgagcgcggcttcttcgtcttcaggtaatgcgcgatcagactggcgcgctcgtacggcgcgggcgggcaacgggagggattggccgggattgcgatggcgacggtgccgccgtccgccatcgcctccaattgcctgcgcagcagaagcgtttgcgcgccagccttccaggcgtgcggcatcgtcttcgatgcggcgtcgtcatagccgggcagggcatcgagatggaaatcgatgccgggcgagagtatgaggcgatcatatgtcagcgcggcgccatctgacgtggtcacgatccgcttgtgcggatcgatcatcttggccgcctgaacgacgacggcgatgccttcggcggcgagcctgccgtagccgaattgttgcgcctcgatctcgcgcaatcccgcgatcacctcgttgctgaacggacacgagatgaaagtctcgttcggctcgatcagggtgaccaccaattttggatcggcgcgcttgagcgcgcgggcgcaagccgcgccgccgaagccgccgcccactacgacgatccggcccgccggttgcgcgcgcaggatcgaaggcgcggcgagcgatgtggccgcgacggctatgccgaggacggcattccgtcgtgtcaccggcgcattcatgagccttgtccggaaaatgctgcggcggcccgtcgtggccgccgcagctcttgttatgcgaaggtgatgttctggtcgcgcagcggcaccgagcgaatgcgcttgcctgtcgccgcgaagtacgcgttgagtaccgccggggccgcgacgccgatggtcggctcgccgacaccgccccagaacccgccgctcggcaccatcaccgattcgaccttcggcatctcgctgatgcgcatcgagttgtaggtgtcgaagttggtttgctcgatcctgccgtccttgacggtgcagccgccgtagaacagcgcggagaggccatagacgaaggatcccgcgatctgccgctccacctgcgccgggttgacgacgtagccggggtcggtggaggcgacgatgcgatgcaccttgatcttgctgccatctgtcaccgagatctcggcggcgcccgcgacatagctcccgtagcccatgacctgcgcgatgccgcgatagactccctgcggcgccggcgtgtcccagccgatcttctcggccacggcattgagcaccgcaaggtgcttggggtgattgcccatcagcttgcggcggaactcgagcgggtcctggcctgcggcatgggccagctcatccatgaagcattccatgtagatcgcattttgattgacgttgacgccgcgccagaaaccgggcggaacgtgcgggttgcgcatcgcatgctcgatcagcaggttcggcaccgaatagccgaacgcggcctctccggattgggccacgccctggaatgcgatgggatccattccgctttgcagcgcctccgggcgaagcgagaacaggatcgattgcccggacaggcggtagtgcagcgcaacgagattattgttggcatcgagcgcgcccgtcatcttgcactggctgatcgggtgataccggccctgcgccatgtcctcctcgcgtgaccacaacagcttgattggcgtgcccggtatttgcttggcgatcatgaccgcttggcggacatagtcggtctggccacgccggccgaagccgccgcccggcatcaccttgtgcacgtcgcacttctcggccggaaggccggacgcctccagcacagccgcgaaggccgcctcgccattttgcgtgccgcaccagacctcgcatttgtctgccgtatagagcgcggtggcgttcatcggctccatggtggcgtggttctggtagggataggagtagacggcttccactttcttggctgcgctggcgatcgccgccttggcatcgccgttcttgttgccgacataggccggctgcgaatcctcgaggccctcggccagccacttcgcgatcgacgcgctggagaccttggcgttatcgccctcgtcccaggcgatcggcaacgcgtccagcgcggtcttggcgtgccaccaggtatcggcaacgaccgcgaccgcggtatcgccgaccttgaccactttcttgacgcctttcatgccggcgatcctcgcttcgtcgaagctcttcagcttgccgccgaacaccgggcaatccttgatcgcagcattgagcatgccgggcagcttgacgtcggcgccgtagatcatggcaccggtggtcttgtcgacggtgtcgagccgcttcacacccttgccgatcagcttccagtccttcggatccttcagcttgacatccggcggcggagccagcttggcggcggcctctgcgaccttgccgtaggtcgttgtccggcccgacggcgtatgggtgatgacactgctggacaccgtgcactcggacgccggcactttccacgcatcggcggcggcctggatcagcatcacgcgcgcagttgcgccgcctttgcgaacatagtcctgcgaggagcggatgccgcggctgcctccggtcgagaaatcgccccagacgcgcttgcgggcgacactctggccgggagtcggatattcagtcgtgaccttggtccagtcgcattcgagttcctctgcgacgagctgagcgaggccggtgagcgaaccctggcccatctcggagcgggcgacgcggatcactaccgtgtcatccggcctgaccacgacccaggcgccgatctccggcgagccgtcggcggcgcgcaccacggcggggccgccgaagggaatgtcgaggccgattgcgaggccggcaccgagggtggcgcttccaatcacgaaagcgcgacggttcatcctgggagagacgtgcttgttcatgagcggctccctacgcgcttgcgatcatgtggatcgcctcgcgcacctgctggaaggtgccgcagcggcagatattggtgatggcctcgtcgatatcggcgtctgtcggcttcggcttctcgttcagcagcgccgctaccgccatgatcatgccgctctggcaatagccgcattgcggcacgtcctgggcgatccaggcttcctgtaccttgtgcagcgaatctctggatgcgagcccttcgatcgtggtgatcttcttgccctcggcctcgctgaccgagattccacaggagcgcatcgccacgccatcgaggtgaacggtgcaggcgccgcattgtgcgatgccgcagccgtatttggtgccggtcaggcctgcattctcgcggatcgcccagagcagcggcgtatccggctcgacgtcgagggtgaaggtttttccgttgattgttaggtttgccatcgcaagtcccctgattggcccaatccaccgattgaactcaggggcgcaatctgtccggcaacctggagccgttcaaatcaacactccgcgggtagccgggaatgcattgcccggccgcgcggaaggatggaccgggccgctgtcttgcctcatccctttgctatcgattcgggttggcggctcttccatggacgccaatccgcggctttaggcgacgccaggtcgcgaaggggtgggttcccgacccgatcacccaggtgcagcggcgacagtttgtcccttttgccgggatgcaagacgccagcgctttgatacactgcgccgacgcaaaaggagttccatgaacgtgccgagtccctgcaacgtactgatgctctacccgctgttctcggcggagtccttctggaccttcggcgaatcctgcaaagtcatgggcgtcaagcggcccgccgcccccttgggcctgatcaccgtcgccgcgatgttgcccaagagctggacggtccggctgatcgattgcaacacggcacccttcggcgaggaggatctcgcctgggccgatgtcgtcttcaccggcggaatgatgccgcagcaggccgatacgctgcgcctgatcgaggtctgccgcgcggccggcaagcctgtcgtcgtcggcggccccgatccaacgtcgagcccgcatctctatgaacgggccgacttccgggtgctcggcgaggccgagagcgtcatcgacgatttcatcgcggcctgggaaagcggcgcgcgctccggcaccttcaccgcgccgaagttccaggccgacgtcaccaagacgccggtgccgcgtttcgatctgctcaagttcgaagactatctctatctcggcgtgcagtattcacgcggctgtcccttcacctgcgaattctgcgacatcatcgagctctacgggcgcgtgccgcggaccaagacgatcgagcagatgttcgtggagctcgagacgctttaccagatgggctaccgtggccatctcgacttcgtcgacgacaatttcatcggcaacaagaagtcgctgcggcaattcctgccgcaactcgcagaatggcagcggacgcacggctatcccttcgaattctccacggaagcctcggtcaacctggccgacgatccggaactcttggatttgatgggcgcggccaatttcttcggcatcttcgtcggcatcgaaagtccggaccctgcgacgctcatcgcgatgcgcaagaagcagaacacgcggcgcaatatcgccgagagcatccacaagatctacgccgccggcatgctcgtcaccgcgggctttatcgtcggcttcgacaacgagaaggtctcgatggcggaggccatgatcgaattcatcgaggaggcggcgattcccgtcgccatggtcggcctgctctatgcgttgccgaacacgcagctcacgcgccggctggagcgtgaggggcggctgcatgccggccacgacgtggcgccgaccatcggcgccgatcagtgcacggccggcatcaacttcgatccggtccgcccgttgcgcgacattctgatggattacaagcgggtgctcgagcacgtctacagcccggctgcctatgcgggacgcgtggaccgcctgatgacgctgctcgaccgctccaggcagcgttccgagctcgccgaaggagatatccgctccaagctcggggcgatggaaaccgtgcacaaggtggtcaccgcccttcccgaggcgcgggggccgctctggcagactttcatgaactgcgccaagcgcgacacctcatctgcgcgcattgccgtgcagatgatcgcggcctatgcgcatctcgggccgttctcgcgcaaggtcatcgcggccatcgatgagcgcctggcggcgctggacgggcacgtgccgaatcccatcgtggctgcaggcccggctgaagagcgacatctggcctgacatccgcaaagtcgatagcgatcgccggcggcgccttgaggcgccggcggccaaactggttgtcatgtgtgagatccccgcttgacagccggacaagcctaagctgatcgtcatcgaggcgacattgggcctgccgtgatttcggggcccggaaaagttccgagcggggtatttgaactgacccgcgctgctttgtgttcgtgcgccgttgcgactgacgtcattgccaggttagctttcgcggggttgagccatggtcacgaaggtggtccgctggtcgattgcactgattgtcctggccgcgctggtcctcacctatctgccttcctacatcaccgattccatttacaagaacgtcgaggacatcacggacggtgagatgcccgccaccgtcactgcctttcaatcggggccggacgtcgtcagcaccattggtggcagcggcgaaggcttgaattgcagcctgccaccctgggccaacatattgttcgatagcgagggggattcccgccagaagcgccatctcgtcctgcagcgcttcaggcaggcctgcgtcttccacgacctgtgctatcggcatggccttgcgacctatggctataaccagaacgattgcgatcgcattctgcagaatgcggcctttcggctctgcgtctacattcgcaacggcagtcatgacagcggtgcggcgcgctgtcagtccgattccaaattggtgctggccggtgtgagcctcggaggctacgaagcctatcgcggctgggatcgatcgacctatttcgaattcgactcggacccgtcgcggtcgaacgggtttcaggtcagccgcgtggtcggtcatcccttcaaggcgatcgtgccggccaaatacgccggtgaccctgatcaggtcattctcatgttcgagaaccttcgttccaatcttgcggtgacctgcatcacctgcgcggaagttcccattctcgattggaccaccgatcccaatgccgtcagcgctgagctgcgctcggtcggcgtgacgcggttgccggacgtgctgctcaggcgcgtgcccatgcttacggaaaccatgccggtctggttgccacctcgccggcggcacgcggctccgcatctcctggtcgatggaacgggcagggaccatctgatctggatgagccggaacaactcggagaacagcgtatcctgcatcgtcggcgccgatgctgcgcgtctcctcaccaatacttcaccgatccgggatctctgctcggtcgatgcggggccatcgctcacccgcgtggagatcgacatgttcgcgagctctccgcttccgatggaagtacccggcagtcctgacatcatttatgcgacgtcgatcagcccgcagaagacgagggagcacgatctgagcttttgttcgcgttccgcgtccaggaaggtcgaggggaccggcgacgaccggtccaaatgcgtcaccttcaccgaagcggaggtccgcgacggcgcggggctcggtgcatttcagaactttccgctggttcgccggggacagcagatctatttcgcgcgggacctcgcgcagcggacggactcgccgctgactgcggcctggcagcgcgcctttggcaataccttttcgccggacggcgcgctgctggtgatcgacgtggcaccgccgcccgtcgatcgagggcccctctcggccaagctgaagaagatcgtccggttcgacatcgacgatcgcttcgatccgatgatgccgatcacgcgcaaggtggacgatttgcgattcctgagccttgaggcgacgaagtcgagcgtgcaccttcgcatgatcgatttcgccaaggacaacccctccgtcggcaatgtgcagctgatgatgagtaacggcgaagtggacctggaccgctcctgggcgcagaggccgatgctggtggtggagacccgcgacgcgcgacccaagaccaggctcgtgttctcgcgtggagagatcgcggccgaaccgggcaagcccctctccgcgacgacggaggcgttgacgctccagactttggtattcgagcgtgatgccgctgccccctcgaatacgcctttcgtgaaatcggcgggagcggcatgccggatcgtctacgagttcgaaccggaccgcaccgattggccgtgctaccgcgcgttcgaccccgagcgcaccatgcgggcctcgccggccacgcggatgcgggcatcccagatgctggtcgggcggttcattcaaggcgagggccatggcatcgcgtttccagatctctgtttgaagtcggagccgatcgtgctgaagccgcaaggaagtacgttcgtgccgctgagcgagaccgcgggctggaagggaccgccaaggtttcaacggacgatcacttgcgagccgctcgatgccgcgtccgtcgtgagccatcccatcacgcagaaagcgccgtgatggccggcgctggagcgcgcagatcgggcctacttcaccgcgagccgcaagaagctcatcacgctgcccagcgcggcaaagcctgcgccgagcgccagcgccaaggtcgcgccgccgtgtccggccagcgcaaagcaggcggcggcgagcgcggctccagtcgtctgcccggtcaggcgcgcagtggcgacgatgccggaggcactgccgctgcggtgcggcggcgcgcttgacatcaccgccttcatgttcggcgcctggaagaagccgaaccccatcccgcagatcaccatccgccagatgatgtcaggaatcgcaggattggggggcagcatcgcgagaagcgccatgccgacgccgagcagcacgaggccgatcccgccgagcaggccgaccgcatggcggtcggacaggcgccccgcgatcggggccatgatgccgaccaccagcggccatggtgtcatgaagaagccggtctcgacctgcgagcggccgagcacgtcctcgaaatagaacggcagcgagacgaaggcgagaccttggactgcgaaggcgcaaacggccgttgctgccgacagcgcgaacatcggccggctgaacaggtcgatcggcagcatcggcgccggatgatcggcatggcggcgcgtcaggatgaagccgagcacgagggcggcgatcaactcggcgcccacgacggtcggcgagaggttgtgcgcggcgctgccgatgcccgtgatgaacaggccgaggcaggcggcggcgaggaccgcgccgagcagatcgaacccgtgaccggcgcgcggcgtcttcggtagcatcgcaaagccgatacagatcgcaatcagcccgaacggaatgttgacggcgaacagccacggccatggcccgaatgcgaggatggcggaggcgaccgaggggccgaccgtgaacgccgtcgcgaccaccagcgcgttgtggccgaagccacggccctgcatccggcccggatagacgtggcgcaccagggccgtgttgacgctcatgatgccgctcgcgcccaggccttgcagcgtgcgcgcgacgagcaggctgtccagcgaccatgccaccgagcagaacaacgacgcgacggtgaacaggatcaggccgcccagatagatgcgctgatgcccgacgatctcgccgagcgctccgagcggcagcagcgtcgccaccagcgcgatctggtagacgttgacgacccagatcgactgctccggcgtgacacgcagatcggcggcgatggcgggcagggcgatgttggcgatcgcggtgtcgagcgaggccatcgcgagcgccgtgaagatcgcggcgatagcccagcgccgctgcccggtgggaaggccgtcggcggtcggctggtcgggctcgcgcgccgcagcaggtaacgtgattgtcattgcgctggcgcgttgctccggcggcgttggctatgcgccgtgtactacggcttggcggccggccacaggctcgtgcgtgcatgctgtgtatgcgccgatgccggacgccgcggaaagggaagggcgaccgagccgggtcggctgcacaggttcttggtcacgacgatcgatcaaaactcgaaaacaaccccatgcacagtagaaggacctttgatcgcaaaggcttttttgagccaggttgcaacgacacgcgcagttccggacaatttgacctgttcggcaaaacactggcacgatgttgacttggcagcggtagggcagaggcctgcattctcttgcggagcccatcatgtgtcacgttgcagctgtcgatgggtttcgcttcgcccgaccctgtccattcgatcggcgccggcagcgccattggccgcgcgggatcatgccaatcccaggccgccgtcgatcgcgatcacctgaccggtcacccacgccgacgcgggcccggcgagttggacgatccattcagcgacatcgtccggcgcgccgcggcgaccgagcggtatgctgacgcgctcctgttcctcgaccaccgcggcctgttgagccgacaatcccatcatgccggtcagcgcgcctgtctgcgtcgggcctggggcgacggcgttcactctgatcccgaacggcgccagctccagcgcccagcaccgcgtcaaatgctccacggcggctttgctggctgcgtagtgagatagccttgccgccgctttgtgcccgaaagtgctagagacattgacgatcgtgccgcgcgtggccttgagatgaggaagtgccgcggacgcgagcagactgggaccgagcacgttgacggcggagatatctgtgatgcgatcggcagtgacatcggcaagcgacaagattgcgccggcgccggcattgttgaccagcgcatcgaggcggccccatttgtcgagtgcctttgcaacggttcgctgggcatcgtcggcggacgccgcatccgccgtcattcccgcgatatccgggtgttgcagcatcgtctcctcgatcaggcccgcccggcggccggtgatgagcacccggtagccctgcttcgcgaagcgcagcgccgctgcccgtccgatacctgaagtgccgcccgtgacgacaacgaccttttgatcttgcatgttctggtctcttgcgcggcggaccgcatcgattggttggattgaagacgagtttgcaggccacggcggtcgattgtcggtgtcccggccgccgtgagggctgtgatccggagcgcgagctcagtcagccgagagggcgctccggtccggcctgtcggatagcggtcagtagtcccagaagaccggtacccagcggaaggcgtcgccggcggccgcaacatgaccgaccgatgggaacggcatgtgcgtggccaccagcagctcgccgctctctgcgagctcccgtaagaggtggatgcgaacgcgcgccgcctcctcagggtcgtgctcgaagccgttgtgccagtcgggctggtcgaacccgacggcaaacacggcatcgccggcaaatgtcagcgcctcgccggcggaggccacgcggaccacgctgtgtccgggagtgtgaccaccggtgcgacgggcgacgacaccaggtgcaacctcgtgctgctcgtcgaattgtcgtatctggctgccgtacattccaacgaactgcttggccgcggctcgaagcgcatccgggaatcctcgcggcatgttcgtgtaagtgaaatccggagattcccagaacttgacctcggcggccgccacgtggatccgcagatccttgcgcagccgttctttcacgccctcgaccagcaagccgccgacgtgatccatgtgcatgtgggtgagcacaaggtcggtcaccgatgccagatcgatgccggcggcttccaggcgcttgatcaattggcctgcgcgcggcaaatgcaagtccggatcggaccccagtccggcatcgatgaggatggtttggtcgccgctgcgcaccatcaccgcattgagggcccagtcgaacgcgtccggcggcaggaacatgtctttcaaccaactggcccgtgcagccggctcagcattgtgcgccagcatggcggttggcagcggtagcacgccgtcgctgatcaccagcacgtcgatgtcgccgatgcgcactgcatagcgcgacgggacgagctcttcgggtttcgatgcaatggagatgttgtgcaggttcattctagtctcctgttgaaggctggggtggctagcttgcttaaagagcggtgacgcgctccggatcggccgaggcgagggctgcggcacgttcagccttgggcggatatatccagacagtgttgatctcctgcttggtcttcttggcgacatcgccgaccatcgcgaccgtgcgctcccagccgcgcgtgaacagcgcgcccgcttcgccaaggtcgaggcaggtgacgtaggctttctggtgataggatctggtcggaacgcccagcagctcggcggcggcgttgttgccagcgaaggcgcccatccgggtcgcatgctggcacgacatcagcgcgtaattgccgacatcgtcacatgcggcccgcgcggcatcgccagtggcgaagacaccgcttaccgatggaacgcgaagatcacggtcgacgagcagtcggccaaactggtcgcgttcagccggaatctgtgccgtcaacggagccgcgcgcatgccggcggcccagatcgccgtctcacattcgatccgttcaccgctggagagcgtgactccggacttgtcgagggaggccactccgacaccgagcctggtctcgatgccgagcttctgcagcgcctcctcgatgatcggccggggccctgcgcccatatcgggggcgatcgtctcattgcggtcgactatgaccacgcgcagccgggcgtccttgccgagaattttgtgcaggcgcgacggcacttcggttgccgcctcgataccggtgaatccaccccctgcgacgacaacggtattgcgtgccagcgaagccggacggttcgacagcccgtgcaggtgacgatcgagcgcgatcgcatcatcgagttggtcgacgctgaagccgtgctcggcgaggccgggaacgttcgggcgaaacagccggctaccggtggcgaccaccaaccggtcgtaggacagcttcttgcgcgcgccctgcgcggcagcgacctcgacgattttggacctggtatcgatcgcctcggcatgacccctgacatagacgacgtcgatcgcctcgagaacgtcctgcagcggtgccgtcagggtctcggggttcggttcgtagagccgcgggcgaaccaccagcgtcggctcgggcgcgacgagcgcgatctcgagttcgtcgggcggagcgccctggatgtcgcgcaggcgggcggcggaaagggcggcatacatgccggcgaagccggcgccaatgatgacgatgcgcatgttgactggtccttgagttgattgcgatgaagacgaggctacgctgtcacgaacctgagcaagtcgccgttgacgatgtcgggatgggtcgtgcaacaaccgtgcggcagcaggtcgtagattttcaaggtgctgtgcttcagaagccgggccgacagcggtgcggagtctgcgacggggacgatctggtcgtcgctgccatgcaggacgagcgtcggcacagcgatgctcttcaggtcttcgctgaagtcggtctcggagaaggccttgatgccgtcgtaatgggccttggcgctacccatcatgccttgacgccaccagttccagatcgtcgcctgcgaaggctcggcacccggacgattgtatccgtagaaggggccgctcgcgaattcatgatagaattgcggcctgttggctgcgagtcgaccgcgtaagccgtcgaagaccttaaggggcaatccgccgggattggactcggtcttgagcatcaggggtggcacagcgccgatgagcaccagcttggccacgcgatcgcggccatgacgtgcgacgtagcgcgctgcctcgccgccgcctgtcgagtggccgacgtggatggcgttgcgaagatcgagttgctggacaagggcagcgacgtcggccgcatagtggtccatgtcgtgcccgtcgccgacatggctcgagcggccgtggccgcggcggtcatgggcgatcacgcgaaagcccttgccgaggaagaagagcatctgggcatcccagtcatcggcgctgagcggccaaccgtgatggaagacgatcggttgtgcggacttcggtccccagtccttgtagaagatctttgcgccgtcgctggtggtgacagaacctgtgccgtcgttcctgccggtcgagagggccgcgatctccacgtcgttgcctactgccgaggtggagcggatagtcaatgccgccgcgtacaagagagttgttgcgagaatgcttcgccgcgaggtgctcacgagctggctgacagagctgatcaaggtcatttgccatttccgtttcaggtgcgggcaccatgattcctagcgaaacgcatgcgccgatgccccagcgcgattgaggcgattgcagcgcgattgctgctaacgtgcgcgtcgccgccaatcgctcggcgattccccggtgagctttcgaaacgcggcggcaaaagcggtctgcgaggagtagccgagcgtagccgcaatcgagaccactgacgcatcggtgtcgcgcagcatgttcatggcttgctcgagccgatgctgacgcagccaggcatggggagacagtcccgtggagtccttgaatgcacggcagaaatgaaagcgcgacaagccggcgtcggcagcaagagctgcgagcgagacgtcggcatcactgtccgagcgcaaccgctcgattgcgcgaagcagtgtcttaggcgacaatccgcccctcgtcggcgcgatcgcgcttggcgaaccggtgtgcgcagccagaagacgtgtcgctagcaaatccatgagttgttgcctgaagagcgtatccagcgcttcgtgcccttccagcacatccgcggcactcagcaacagtcgggaagtcacgggatctggatgcgcggtgcgctccaggagttcagtcggtgatccggttgccgcttcgtccgccacgcgcttcagcgttgtctgcggcaggtagagctgaacgacatcgacgggttttgggatgtcccatcgggaggtcgatccctccggaatgacgatgacgacgccgggacgaaacgtcccgatcgcgatcgaccgtccggaccgtcgctccatgcgctggaccgtgccattataggccatgatgacgtggtggctcatgggctcgacgacatcgtgcaatgggtcgtgcttccagtgagcaattccggcgccggaggagtccaacgccatgcgaaagggagccgtccggagcacgcgagccatctcctcaccggcaactgaccggtcgcctacgagggcaacgtcccgctgcccacgaggggcggcgaggatgtcattcgcggattcgcgcaagacgaccttgctcatggactctcgctcgtgtgcgcgcctcgctgacgcgtgacctcttgatcgtggtttcagccgcagcgaagcggggccgaacggccggtgccgtgatattcgctcggcggatggattcggggtccgaaggcaatccgtcgaggttcgatgccgcagatttgcgggttctaggcggcgcggaaatctgcgtctttcctattgctgccgtgttttgcctgatcctgctctgcggacacgaggagcgcgcggtccgcgtgcgtttgtgaaaaatcgtgatgtccgcgcctctattctccaggcatcccaagccatcgggtccgggcacatcgctttggaataactgacaattctgacgtcgctcggtcgaggcgaaggaccgagccgctccggggcgacgtcgccggtcttggacagcaacgagccaatacccgatatagtgctctggtaatggcagcttgctgtggcctgctccctcgacatgacggaagagacacaggatgaccaggacaggcgcttacggtgaacggctcgcagagttccttcgcctggaggaagcccctcccactctgacgacggggtcgctgcgcagcaccaagattgcggtcactgaaacgcgccacgacagtcccgtgccgggcctttccggttcgttcgccgcggaagatgcctatctggtcagtctgaagctgcgcgactatccggagtgcgagatctgggagcaggggcgtcacatcaaaaaggcggatgtccacgccggcacgacgtatctctatgatctcaaggtcgacccgcgctacctgatcaacaagccattccactctctgcacttctacgtgccgcgttccgcgctcgatggtctcgctgatcagtcgggcgcacggcgcatcgatacgctcgactgcagcccaatcgggcacgatgatgccatcgttcgtcacatcggcgcctccttgcgcgagggactgcggcggccggacgaggcaaatcagctcttcgtcgaccacatcatgctggcgcttgccgcccacgtcgctcaagcctatggcggctttcgaaacaaggtcgagagcagccgcggcgcgcttgcgtcatggcagctcgcgcgggcctgcgacaaactcgaagcggatctcagcgggaagctgccattggaggcgatcgctgcggagctaggcctctccgtcagccatttctcacgcgcgtttcgcgcggcgaccggcctgccgcctcatcgctggcttctgcatcatcgcgtgagaaccgcaaagcgtctgatgagcgagcccggcccatcattgtccgaggttgcgatctctgccggctttgcgaaccagagccacttcacgcgggtcttctcggcaattgccggcatcagcccaggtgcatggcggcacgatgtgctgggaacagcaagccgcgaacggtgatctgcctttctctgagactggtactgcaggtcatgcagacatgttcacgaccttacggcagaagcgtcatgagctcatagagcacaacggcagcgccgagacagcgtcgccaggggttcacgccgcgaatgatctcgtcggcgccccagatgatgagcccgcccttcacgacgatcgtcaaggcgaggctggccttgcctgcggacggccatatccagagcagaattcccgcgacgatgacgatccacagaacgaggttgggccactgggcgatggtgatggcgccggtttcgcggttccggaagaaccaatcaagaattcgccgcatgaccggggccgatcagagctcgacctccccctcttcacgacctttccaataggccatgcggttggctctgaccgtgatcaggacgaggccgggcgtatcgatgccgtggtcgaaccatttgtcgagatcgctcgtccagtgctgctggaaggccgtcttgtcccggatcaattcggcactgccttcaacggcgaggtagattcccttggagaaaagccccgcctcggatgagaatccgagcgctgcctttggatttcgttgaatgtccgatcccgtccgcgcctgttcgtaggtgaagtaatacgaggtgccggcgtaggcgacgtcgccgctgttgctcatcggacggttcgcaatctcgccgttctcggcgtgggtcgagagaatggcgatgtcgattccggccatttcccttgaggtatcggcgagcggtttcttggccatgaactttcctccagtggagcgggagcaacgaccggattgggcccatgttcccctgaagcctgggagtgcgcgcccgcacgtttcagcaatgactcgcttgttgcctgtggccggctcgacgtcactatccgatgttacgaccaacctcgacctcgtcttcccagtccctccacgcgacattgttcgtgtccaggtaactcgaaacggctgagccgatggtcggaaagaagtgggcctcgccgacctgggcgtacaaaccaaatcgtttcagcttgtccttcaccgggtccttgagctcggcaaagcagagttcgatgcccctggctcggagcgcctcgttcagttctgcaacggtatcgcaagcggtgacgtcgacgctcgtgaccggttcggcggcgacgaccaaccagcgcacaggtgttggcgatgtcgcgacggcggccagaattcgctccttgaagaactcggcattggcgaagaacagcggcgcatcccagcggaacaggaccagtcccgggatcagccgggcatcgggatatctcgtgatgtcgtgatagcccttgacgccgtgtgcccgccccagaatcgcggagtgcggacgccagccatcccacagaaactccgcaatggccacggcgatggcaaggccgattcccgggatcgggccgagcacggtgacgccgacgaaacacagcacagtcaaccagaattcccagcgctggattcggtagattcgcttgagatcgctgatctcgatcaagctgattgcggctgagatcaccaccgctgccaatgcggcgtgcggcaggtgctgcagcagattcggcgcaaacagcagaaggaaggcgatgacgagcgcgccgacgatgctcgccagctgggtgcgcgcgccggcggcctcggcaattggcgtgcgcgatgaactgctgctgatggggaagccctgaaacagaccagtcgccagattggccgcgccgagacccaccatctcctggttcggatcgactttatcgccgaatcgcgcagcgtaggttcgcgacaacacgctggtatcggcgaacgaaacgagagcgatggcgcacccgccggtcagcaccgggatcagatcgctgtaaccaatcctgggaatagagaacgccggcagaccctgcggaagtgggcccaagacttccacaccatgaccgcttccgagatcaaatagtgcgacgacaagggtcgctgcgacgacggcaatcaggattcccggcagtcgtttgctatccttgagcagcaggatcaccatcaacgtgccgagtccgattgtgaatgcggcccagttcatcttgccgccgctgatcccgatggtgatcgcccacaggcctctcagcggcccttcgctctcgatcgagaaaccgagcagccttggcagttggctgatcaggacggtcagcgcgatcccgttcatgtagccataccgtatcggcttcgagagaagctcggttacgaagcccaatcgcgcgatgcccgccacgatgagcacagctcctgaaacgagcgccatcatggcggcaagcattgcggcgcggaccggatcaccaccggacaagggggcaatgacaccgaggatgacagctgccagcgccgagtcgggtccgagcacgatgatgcggctcggaccgaacaccgcgtaggccagaagagcgacgatggttgcgtagaggccgtggatgcccggcaggccagacgccacggcataggcaattccgaccgggacaagcatggtcgccagcacgagacctgcgaatacgtcgttccgaagccaatcagattcgtagtggcgaagcgtctcgatccccggcacccaacgcgtccaaccgctcaccgcgcactccaagggccgttcgccatgcggatagtgacgaggtgtagaatgctgaccgcctctgcaatgtcaccgcacggctccgaccggcatgcgccggcagcgctatcgccgacagaccagcactcaagccggatgctggcagtctcgagtcggcccgccgatggcgagcgaggatcctgcaagtgctccaccgttctcttgatgcagatcaacgctgtcgatgcctcaactcctcgtgcggcgcaatagtgtttggaaacgtgaatcaaggccggccggtcgcgcgctttcttccttgcctggctttcgcctgttgcgctgctgccctgtcccggccggggtgaattgcccggcggggacgagcaatggtaatcaagagtcccagtgagggaaacacgaaagaaaaaggcgcgagcgatggtctgggatccgcagcaatatctgaagttcgccggccaccggctccggcctgccgtcgatctgttgatgcggattccggattttgcgccgcgcgcgatcgccgatctcggcgccggcgccggcaacgtgacgaagctgatcaaggagcgctggcctgatgcacgcgtggtcggtgtcgagggctcggccgagatggtcgacgcgggccggaaggccgcgcctgacgtggaatggtcacatcaggatctcggccattggcgtcccgccgggcagtatgacttgatcttttccaatgccgcactgcactggctgcccaatcatgcggcgctcttcccgtcggtcatggagaaggtgcgtcccggcggcatgctcgcggtgcagatgccgcgcaacttcaccgcgccctcgcatgtgctgatcggcgagacggcgttgaatggtccgtggcggtccaaggtcgagcatctcgtcaccccgccgcccgtcgaggggccgtccttctatcacgatctgcttgcgccgatgtcggccaacatcgacatctgggagacggaatatcttcaagtgctcgaaggcgagaaccccgtgaaggaatggaccaaggggacctggctgacacgctatctcgacgtcctgcagggcgaggagaaggccgcgttcgaggccgcttatggagcgcgggtcgccgaggcctacccgaagaatgcggcgggacagacgcttttcccgttccgccgtctcttcatgattgcgcagcgcaaaggctgacggccctgccgcaatgcggcataagtgctcgttccattggacgcgggcgaacgccgggttgcgcatatagcggtcgccaagctagcttggctgcggcaagttcggcttgggtctcgctgtccgggtagcggattgctgccattgcggacctgaaaaacacaaaagaagccggtttcggaggctattgggaggtacttcatgcgcaagctgcttgttgcggtcgccgccgcggctgttctcttgacgcccggcatcgccgcggctcagagccccatcgtcataaagttcagccacgttgtcgccaacgacaccccgaagggcaagggtgcgctgagattcaaggagctcgcggagaagtataccgacggcaaggtcaaggtcgaagtctatccgaattccacgctctacaaggacaaggaggagatcgaggcgctgcagctcggctcggtgcaaatgctcgcgccgtcaaccgcgaaattcgccccgctcgggatcaaggagtttgaggcgctcgacctgccctggctgttcaaggacgaccagacctattccaacgcaatgaagggcacgatcggcaagtggttgttccagaagctcgaggccaagggcatcatcggcctcgcttattgggacaacggcttccacatgctctccgccaaccgtccgctggcgaagccgaccgatttccagggcctcaagttccgtatctccggatcgaaggtggccgaccaatatcttcgcatcatgggctcgatccctcagatcatggcgttctcggaagtttaccaggccttgcagaccggcgtggtcgatggctgcgagaacaccgcatccaactatctgacgcagaagttctacgaggtgcagaaggacatcaccgtgtcctaccacgcgcatctgcaatatgcggtcatcgtcaactcgaaattctggtccggcctgccgcccgatatccgcgcccagctcgagaaggcgatggcggaggcgaccgactacaccaactcgatcgcgcgccaggagaacgaggacgccctggccgagatcaagaagacgggcaagaccaatctgcattatctcaccgatgccgaccgcaaggcctggcaagaagcgatgcagccgacctataaatgggcaaaggggcgggtcgggcaggaggtgctcgatctcgtcgccaaggaactcgacgtcaagatgaactgacgggccgcgtcctaacaacaatgccaacggtcgggggtgatcgcactcccggccgttgcgctcttgaatggacgagccaaacgctggggggacgaagttgctgcgtgcgctgaaccgggtgctcaatcatctcgaggaatggctgatcgcgacgatgatcgcggcggcgacgtcgctcatcttcgttgcggtgctgcaccgctacggcgccgggctctccatcgacatcgccaaatgggcggaggcccgcaacctggccttccttgccgttccggcgcgagcggtgttcgtctggcttgccgcgctcgacctttcctgggcgcaggagctctgcatctacatgttcatctggatggcgaagttcggcgccgcttacggcgtgcggaccggtatccatgtcggcgtcgacgtgctcgtcaacctccttcccggcggctcgcgccggcgcgtcatcaccttcggccttctgtgcggcgcgctcttcaccgccatcgtgggctatttcggggccgccttcgtcagccacatgtggcagagcggccaacagtccaacgacctcgaagcgccgatgtggatggtctatctcaccatcccgctcggctccgccttgatgtgcttccgcttcctgcaggtcgcctggtcgttctatcgcaccggtgagcttccgcatcacgacatggccggcgtcgagggcgtcgaggcggatccggtgcatccggcgccggtcacgcacagccaggtcgtccgggacgagcgcagcccgctcggctggattctgatgctgctgcctgtcctgatcgttgcgttgtgctttgcgcatgcggcccacgtcatcacgctgccgcagggcctgcgtgtcttcatcgtgttcgcgcttctgctctcgttgatgctgacaggcatgccgatctcgatcgcgctgggcctgaccgtgctcagcttcatgttcacgctgaccgatgtccggacggaatcggtggcgctgaagctgttcaccggtatcgagaatttcgagatcatggcgatcccgttcttcatcctcgccggcaacttcctgacccatggcggcgtcgcgcggcgaatgatcaccttcgcaacgtcgctggtcggccattggtacggcggtctggcgctgtcgggcgtggtcgcctgcgcgctgttcgctgcgatttccggctcttctccggcgaccgtggtggcgatcggttcggtgatcctgcccgcgatggttgcacaaggctttccgaagcggttcggggccggcgtgatcacgacgtcaggctcgctcggaatcctcattccgccgtcgatcccgatggttctctatgccgtgtccaccaacagctcggtcggcaagctcttcatcgcgggcatcgtaccgggccttgcgctcgcatcgctgctcggcgccacgacgttctatcgcgcctggcgcaacgactatccgcggatgcggaaggccaccttcctcgagcgtctcgatgcgttccgcaaatcgatctggggcatcctcttgatcgtgatcgtgatcggcggcatctacagcggcctgttcacaccgacggaggcggcagcggtcagcgccgtctatgccttcatcgtcgcggtgttcatctacaaggacctcaagctgcgcgatgtgccgcgcgtgctgctgtcatcggcgaatctttcggcgatgctgctctacatcatcaccaatgcggtgctgttctcgttcctgatgacctacgagaacgtcccgcaggcgctggcgcaatggatgatcgaccagggcctgggatggatcggcttcctgctgctcgttaacgtcctgctgttgatggcaggcaacgtgatggagccgtcctcgatcatcctgatcatggcgccgatcctgttcccggtcgctgtcaagctcggcatcgaccccattcacttcggcatcctgatgacggtcaacatggaggtcgggctgtgccatccgcccgtcggcctcaacctctacgtcgcctcgggcatcgccaagatgggcatcaccgagctcacggtggcagtgtggccgtggctgctgaccatgctgggattcctcgtggtggtgacgtattggcccggcctgtctttgtggctgcctcgcttgctgggcatgtagccgccgcgtggcggggcggagacgatgagcatgcgtctccgcccgtcctgggcgagagatggctaacgcgcggcaaatccgcacgctcaaatgcgatcgttgagtagcgaacgcatctttacgggtcttcggtaggtaaatgccagtggatgggagctggcatgttcttcaacagaatggaatccggaccggcgtcgatttcggacgccgttcatttggaagtcatcacgggccttcacggcacgatgatgcccaccattctcgcggccgcctgccaggcgatggtcggcgccatcacgacctacgagaccggtgacatgatgacggccggcctgacggtcgctggcgtggtggtggcggttgttcgtcttgccgagatatttgcatttcgccgccgcctcgcggctccgccacggctcggccgggccgaggccgtgcactgggaacggcgctacattgccggcaccgtggtaacggccttcgtgctcggcgtgtttgccgcgcgcagcatcgtgctgggcgatgcgctctgctccgtgatggcgatcggaatcggtttcggcttcggcgccggggtggtggcgcggctggcgctgcgtcccgtcgcggcgttgctcgatctcgccgcgatcgccgcgcctgccgcgatcgtgagcttcatgcaacccgatctccgccatgtcgggctcggtctcctcatcctgatgtacgtggtcgcgagcttcgagatggttcggctcagcttcaacgcctcgatcagccagatcacgctcaagcgccagttcgagcagcttgcgcgctccgacccgatgaccggcgtgtccaatcgttcggtgctggcgagggatctgcccgtgatgctgtcggccggtataaattgccgtccatacgctggatctcgaccgtttcaaggaagccaacgatcggttcggccaccctgccggcgatgcgctgctgaagcaggttgccggacggctcaaggcgctggccgctcctgacgacctcgtgatccgcatgggtggcgacgagttcgtcctggtgcagcgcgccgcgtccgacgcggaggcgatggcacggcggatcgtgcaatcgatcggcaggccgtacgaggttgatggacaggtgatcgatctcggtgcgagcgtcggcgtcgccgtcgcgccggacgacggccgaaccgcagaggcgctgttgtcgcgctcggacaaggcgctgtaccaagccaagcagaatcgtggcggctacgtggtggccagcgagctgcggatggcggacaaccccacggcatcgcgcgagcccgttgaaggcgtagctgcgtagacggtggaccctctcctcgcggggaagcgagaaggcatctcgctccatttccttcgtctcctccaatggcaatcgaccgcaagatgcggttagatgccgtgcatcaggcggggaggagcaacatgacggaatccagcagcgagccgaaggacgcgtcgccgtctgtcatcgcgcagcatgatgcgatgctgaacgcactgccgttttccgacacacgggatttcgacgatgccgcgcgcggcttcctcggcacgatcgagcatgcaacgatcacgactccgcaagggcgaacggtctggagcctcaagccctatggcttcctgtccgccgaagaggcgccgcccacggtcaatccgagcctgtggcggcagtcgcggctcaacatgcatcacggcctgttcgaggtcgtgcccggcgtctaccaggtgcgcgggctcgatatcgccaacatgacgctgatcgagggcgacagcggtgtcatcgtcgtcgacaccctgacctcgatcgaaggcgcgcgcgccgcgctcgatctctatttcaagcaccgcggcggccggccggtcgcggcgatcatcttcacccatacccacgtggaccattggggcggcgcgcgcggcgtgctgcaggaggatgcgctcgccaccggcagcgtgccgatcatcgcgccgaatctgttcatggagcacgccgtctccgagaacatcatcgcagggcctgcgatgctgcgccgggcgcagtaccagttcggacctctccttgccaagggcgtgcgcgggcaggtcgattgcggcctcggcaagtcgatggcggctggatcggccgggctgctgcgccccacggatctgatcatggcgaccggcgacacgcgcgtgatcgacggcgtcgctttcgaattccagatggcaccgaacagcgaagcgccggcggagatgcacttctgcgtgccgcgttacaagttgctgaacctcgccgagaattgcacgcataatttccacaatctgctgccgttccgcggcgccgacgtgcgcgatgccctggcctggtcgaagtatctgggcgaggccctgcagctctgggacggcaaggcggaagcgatgtgcggccagcaccattggcccgtgtgggggcgcgagcgcatcggaacgatgatccggcagcagcgcgacctctacaagttcgctcatgaccagaccatccgcctgatgaaccacggcttgaacgccgcggaaattgccgagacgatccagctgccgaagagcctggagggtgcctggcacggccgcggctattacggccacatccggcacaatgtgaaggccatctaccagaaatacctcggctggtacgacgccaatccggtcaatctcgatccgctcccgccggtcgagtcgggcaggaagtatgtcgaatacatgggtggtgcggacgccatcctggcgcgggcccggacggatttcgacaagggcgagtttcgctttgtcgcgcaagccctcggccatctcgtcttcgccgagcccggcaatgcggcggcgcgcgcgctcttggctgataccctcgagcagctcggttatgccgcggagagcggtacttggcgaaatgcctacctcttcggcgcgcaggaattgcgcgagggcatgccgaaagtgccggcgcgtccgcccatgccgcgcgagacgctggcggcgctgcgcacttcccagctctgggatgtgctcgccatccggctcaacgggccgaaggcggaaggcaagcacatcgtcttgaactggagcttttccgacaccggcgagacgttcgtgctcaatctggagaattgtgcgctcacttacaccgaaggtgtgcaggcggagaatgcggatgccagcttcacgctcgcgcgcgcaacgcttgatgaggtggtcgcaaagctgacgagcttcccggaggcggtggctgcaggcaaggtcaagctcgccggcaacccaatgaagctcgctgagctgatgggcctgatggatgaatttccaaggatgttcgagatcgtcgagccaaagcgggccgtggtgatgtagaccaccgctttctcccgccgtcattgcgaggagcccttgcgaggaagcaatccaggatcgtgccgtggagagagtctggattgcttcgccgcgctcgcaacgacgtgttgattgactgggacgacacccgcgcagctgccgtcccggatctgcgcttcgcttgtccgggacgacaccgtccgatggtttactattccgcgctgctcaccagcttgatccgcggcgtctgtgcctcggtcaggctgcggtaggccgcgagatagtcgagcgccatgcggcgcgcggtgaagcgcgtctcgaactgcctgcggatcgcggtgcggtcgagctgcggaagccgattcaccacccccgcagcgctgatgacatcctcgacgatgaagccggtgagaccctcgtcgatgatctccggcaccgagccgcggttgaaggccaccaccggcgttccgcaggccatggattcgatcatgacgaggccgaacggctccggccaatcgatcggcagcagcaggccgagcgcgccgctgaggaagtccgacttctcgtggtcgctgatctcgccgatgaactccaccagcggattgttctcgatcatcggccggatcagctcgtcgtaatagtcctggtcggcacgatcgaccttggccgcgatcttcagcggaatgccgcaatgggtcgcgatcttgatggcgcggtcgacgcccttctcgggagcgatgcggccgagcacggcgagatattcctggcgagccggcttcggcgtcagcagattctccggcaggccgtgatggatcgtggtcacccagttcgcctgcgggacagggcggcgctgcgcattggagatcgagatgacgggcatcttggagaaggtgttgaagaccggctgatgctccggcagatccagccggccgtgcagcgtggtcacgaacggggtcggctgccggtggaacagcgaccatggataatagtcgaggtggaagtggaggaagtcgaactcctcgtcgtcacatttctgccgcacccgctccagcagcaccatgtgcagcgcattgggatcgcgcacggaaccgtcgagacggagcgccttcggccacagcgcgtccagctttgccgacgtttgcgaatcgccgctggcgaacaatgtcacgtcgtgtccgagggccaccagctcttccgtcaaccaatgcaccacccgctcggtgccgccatacagcttgggtggaacagcctccgtcaacggagctacctgcgcgatgcgcatctcaccatctcctctgcgatcatgaatgttgaagcccccgcctgtacggcaccggcaatgccagacggaggaacgttcccgcacctgcgaagttccttcctccgatcgttacatgttcgccacgtctgcaggccgtctcgatgctgccacttcatcttctcatatcgtccgcatccgcatgtcgtgatcgccaagcctgggaacccaggcgaagagatcgatgttcagtcgatcggtaacaaacaaaacgaaaagccagccaacggggcgacagttatatggatcagctttctggatacgcgcgcaggccatttgcctttgtcttgcgctatcttcggatgcgaatggcatcgcatctggtgatcctcaccgcggtcgtcggagccgttgcctgctccgtaggtacccagtacggggtcaaatcccttgtcgacgccttgtctgccggaccctcgcaagggggcggtgtatggctcgcattcattctgctcatgtcgctgattgccgccgacaacttcctgtggcggatcgcgagctggacggcgagcttcaccttcgtcagggtaacgggcgatttacggcgtgacatatttcgtcatctgaccggacacgcaccgagttatttttcggaccggatgccggggatgctgacgagccgcatcaccgcgacctcgaacgcggtgttcacggtcgaaaacatgttcgtctggaatgtgttgccgccgtgcattgccacaattgcggcaatcgccttgatcggaaccgtaagcccttatatggcgctcggcctgaccgtgatcgccggcggcatggtcatcgcgatgttccgcctggccgctgccggaaagccgctgcatgacgacttcgccgacaaagcggctgcggttgacggcgagatgatcgacgtcatcagcaacatgccgctggtccgtgccttctgcggcatcggccacgagcatgagcggttcgatgccacggtcaacagggagctgaccgcgcgaagccgcagcctgcgttacctggaaaagctgcggctgttgcatgcagccataacggtgctcttgaccatcgcgctgatggcctgggccatcacgctctggcagaaaggccaagcgacgacgggcgacgtcgtgctggtctgcacgctcggcatctcgatcctgagcgccacgcgcgacctcgcggttgcgctggtcgacgtcacccagcacgtggcgcggctgaccgaggcgatcgccacgctgctggttccgcacgaattgcgcgaccaccccgaggccgagccgctggtgaagagcggcgcggccatcgcattcaataacgtcacgttcggctatcccggcgccgacaagatcttcgagcggttcagcctgcggctgcagcctggtcagcgcgtcggactggtcggccagtccggcggcggcaagtcgacgctgttcacgctgctccagcgcttctatgacgtcgacgagggtaacatcaccatcgatggccaggacatctcgaaggtcacgcagctcagtctgcgcgaggcgatttccgtggtgccgcaggacatctcgctgttccaccgctcgatccgcgagaacatccgctacggccggccgaatgcgaccgacgacgaggtgttgcgcgcggcgatcgctgcgcgctgcgacttcgtcgagagcctgcctggaggcctcgacaccatggtcggcgaccgcggcgtgaagatgtccggcggccagcgccagcgcatcgccatcgcgcgcgccttcctgaaggacgctccgatcctgctgctggacgaggcgaccgccgcgctcgacagcgaatccgaggaggccatccgcgaggcgctgtcgcggttgatgcgcggccgcaacgtgatcgcgatcgcgcatcgcctcgcgacgctgcgcaatttcgaccgtgtggtggtgttgagacatggtaagatcatcgaggacggctcgcccgagcgcctgatgcagggacacgggccgtatcgtgagctggtcacgcaggaaatgagccggctcgcgcaagccgccgcctaaagcacagtcgcgttctcgagtcggttgcgttgcgatacaagcgcaggggagcagctcatgtcggccgaaaccgtagcccagttcgcctccgtgacgcggacctcggagcaggtcgcggaacaacccttctacattccgatgaccggaccgtcggcgcggccgcggcgttcactcaagcatgacgatactttcatcgtgctggacagtcatggcgacatcggcgcgtccgccggcgggccggacggcctgttccatcacgatacgcgctacctcgcgcggctcgaactcgtgctcgacgatctccagccgctcctgctcggctcgaacctgcgcgatgacaattcggcgctgaccgtcgatctgaccaatccggatatctatcgggaaggcagcctcgttctacaaaaggacctgctgcacatcgtgcgcacgatcttcctgtggcgcggcagggcctatcagcgcattggcgtgcagaaccatgccgagcggcgtaccagcttcaacctgacgctgctgttcggcaacgacttcgccgatctgttcgaggtccgcggcgagcggcggccgcgccgcggcatcggaacgagccggctggtcgggccgaccgacgtcctgttcgaatatcgcggtctcgacgatgccgagcgcaccaccgggctgcatttcgatccgcgtccgacgcggctctcggcggacgcagcgacgtgggagctcgacctggagccgcatcaggccaagtcgctgttcgtggccgtgtcctgcaaccgcccgggcacggaaaggccggttcgtttctttccgggtcttctggcgcatcgccgcgagatgaggcggtcgaccatgggcgcggccagcatcgagacctccaacaacatcttcaacgaggtgctgtgccaagccatggccgacctcaacatgctgatgaccgagacgccgcagggacgctacccctatgccggcattccctggtactcgacgaccttcgggcgcgacggcctgatcaccgcgctccagatgctctgggtcgatccgcgcatcgccaagggcgtcctgcgccggctcgcgcatttccaggcaaaggcgatcgatccgcgcgcggacgccgcgcccggaaagatcctccatgagatgcgcggcggcgagatggcatcgctcggggaggtgccgttcgcgcattattacggcagcgtcgattcgaccgcgctgttcgtgctgctcgcgggaagctatttcgagcgcaccggcgacgaggccacgttgatcgagctgtggccagcgatcgaggcgggattagcctgggtcgacggcgctggtgatcctgaccaggacggtttcgtcgaataccagcgcgccaccgagaagggtttggccaaccagggctggaaggattcctacgatgcgatctttcatgccgacggccggctggcggaaggcaacatcgcgctcgcggaagtccaaggctacgtctttgctgccaagcagctcgccgcgcggtgcgcgctgcggctcggcaagccggatcgcatgcgcaagctcgacaccgaagccagggaactcgccgagcggttcgagaaggcgttctggtgcgacgagctcggcacctatgcgctggcgctcgacggcgagaagcggccctgcaaggtcaggacatcgaacgccggccaggtcctgttcagcggcatggtccgcgaggaccgcgcccgcctcgtcgctgccgatctgatgggcccgcatttcttctcgggctggggcatccgcactgtcgctcaaggcgaggtgcgctacaatccgatgtcctatcacgacgggtcgatctggccgcacgacaatgcgctgatcgcgcttgggctcgcccgctacggcctcaagcattcggtggcgctggtcttcaagggcctgttcgacgcggctacctacatggatctgcgccggctgccggagctgttctgcggcttccggcgcgagaagcggcgtggcccgacgctctatccggtcgcctgcgcgccgcaggcttgggccagcgcgacgcctttcacgctgctggaagcggcgctgggcctggaatttgacgtggctcgccgcgagattcgtctgcgtaatccccatctgccggcattcctgaatgaggtgatcctgcgcgatctgcgcctgggcgagtccagcgtggacctgcgtgtcggtcgtcatggcgacgacgtggcgctggaggtgatgcgcacacgcggccatatccaggtctcgatcgtgctggcgcgctagcggcgcgtcgtgaggagagtgtcatgcgtgcgattggagcttcgatcctgggcgcggcgatggtgatggccctggccgcggcgccctcgcgcgccgcggaggatccgcccgccggccggaatgaggcggctgtgccgccagcggcacagccgcccgtctcgaccgttccggtgacgcccaaggatgcggcgccgccgccctcggtgaccatcatcggcgcgagcgaagcccacggcgtgctcggccgcgacgttcgtagcgccgccggcgaggacatggggcgcatcgtcgacgtcatcgtcgatcgcaccggccatgtccgtgccgccgcgatcgattttggcggctttctcggcgtcggcagccgcaagatcgtggtggactggaatgcgctgcgcttcggcaagatcgccaacaagaaggacagcatcacgctggaactgaccaaggcgcaggtcgcggccgcgccggaatacaaggaggacacgccgatcgtcgtgctcggcgcgtccggcagccttcagccgctgcaagcaatccagtgaggtgccggagggctgaccgcctgtgctgttgttgaggaagccgaaccatgcggatcgcgaccgcggcgtcgaacaggatcacgttgccgcgccgccggccgcaagccttccggcgccctcgcggcagagcctgcgcgggctcgattggttcatcttcttcctcgccgacgtgcagaccggattcggccccttcatcgcggtctatctgacgacgcagaaatggacccagatcgaaatcggcctcgtgttgtcgatcggcggcatcgtcgcgttgatcgggcagatgccgggcggcgcgatcatcgacgccgcgaaatcggagcgtctggtcgccgccctcgcgatcatgacaatcggcgcttgtgcgctggcctatgccgcgatgccgatcttccccgtcgtggtggccgcggctaccttgcacgcggcggccagctgcgtgctcggaccggcgatcgcggcgatcagcctcggcctcgtcggcccttttgcgatcggcgagcggctcggccgcaacgcgcgcttcgcctcgctgggcagcggcatcgcggcggccgtgatgggcacggtcggctatctgctgtcgagccgggcggtcttcctcgtgaccttcctgctcgtgatcccgaccctcatcgcgttgtcgcgcatccgcgagaacgaggtcgatatcaggcgctgtcacggcgagatgccgccggaggccgccgaccgcgccgataccaatatctggcacctgatccggcagcgcccgctcatcgtctttgcggtcagcgtaatgttgctgcagctcgcgaacgccgcgatgatgcccctgatggcgagcgcgctgacggcgcggtcgagccaatgggccaccgtgctcgtcgccgcctgcatcatcgtgccgcaggccatcgtggcgctgctctcaccgacggtcgggcgccaggcgcaggtgtggggccggcggcccttgctcttgatcggattcggcgcgctggtgatccgtggcctgctgttcgcgacggtgcgcgatccctatctcctggtgctggtgcaggtgttcgacggcctcaccgcggcggtattcgcggtgatgattccgctgatcgtcgccgacgtcgcttttggcagcggtcacttcaacctggcgcagggcatcgtcggcaccgcaacgggcatcggcgcatcgctgagcaccgtgcttggcggttatgtcagcgacaagttcggcaacgccaccgcgttcatcgggctgtccggcgtcgcagcgacggggctccttctcatcctgctggtgatgccggaaacccggcgcacggcatgatcgcggcaagagaaaagccggccgaaacgaattcggccggccaagtcacgggggagaaaccgatcaggcgtcgagattgtgcaggcgctggcggttgcgcagcacgatctggcgagcgccggagaaaccgagaatgccctgggcgtgaagctgcgacagcgcgcgcgacacggtttcgagcgtgaggccgagatagtcgccgatgtcgcgacggcacatcggcagcgccatcatgccggcgacggcgaggcggcggtccatttcgagcaggaaggtcgcaacgcgctccatcgcggtcttgcggcccagcagcagcatgtggtcctcggcatggcgaagctcggaggcggtcatcgcccagagcttgcgggcgacctgcacgtcggtgccggcggccttttcgaggctcgcacgcttcaccagacgcacggtggtgtcgatgatggcttcggcggccaggcgatgcgtggcgccggattcgaggccgaacacgtcgccggggaggtggaaggctccgatctgacggcgaccgtcggaaagaagcttgtagctgcgcaccgcgccggtgacgacctggtagacatactcggccgcttcgtcctcgccatagatctcctcgtccttgccgtaggagaactcggtggcgaccaggccgacatggcccgtgatcgcgccgaactggtcggtaacgggattggcaggagcaatcttgccaccgatttgggtgttgcttgcctgggtcttgattgtctgggtcagcatctgcgccatctccggtgtgatggcgctttcctacgtggtatcgggtgcttcgaaaatttcgcgagatatcttaagggggttgccttacgtagaaccccgtaggtcaggcgctggggcgatccttgatggcgtggcggatgcatttgaccaggttttcgtcgagaagcggcttcaagaccacgtctttgattcccgccgtggcggcccgggccgagatgttctcgtcgggatagcccgtgatcaggattacaggggcgtcccggtcggacttgcgcaagcggccggtcagctcgatgccattgatatcgggcatcttgtagtcgatgacatagcagtccggcccgggagcaccgctgacattgagcagggccgtgccgctcctgaaggtccgcacggcaaagccgtcggtctccagcagaaaccgcagggatcccaggacggcggcatcatcgtcgaccacaaagacagtgggttgtggggaggacgacggccgcgcacaaagcgagctgacctcaatcatgctgactggttagcacgccgccggcaaggcaccttgacttgcctcaatccttgagcatgccggcgcgcatcgccagccgaaccagctcggagaggctgttggcctgcatcttggtcatgacgttggcccggtagacctcgatggtgcgcgggctgatgtcgtattcgcgggcgatcagcttgttggagaggcccgcgatcagaccttccatgacctggcgctccctggggctcagggacgcgacgcgggcggcgatgtcctgcgcgacggcctcgttcttggcggcgggctcggcctggcggatagccgaatcgatcatggcggtgagccggtcgtcatcgaacggtttctccaggaaatcgaccgcgccgagcttcatcgcctcgaccgcgagcggcacgtcgccatgaccggtcatgatcacgatcgggaacgggctttgctgcgccttcatccgcttcagcagctcgatcccgtcgagaccgggcatgcgcacgtcggagacgacgcagccgaaatcgaggccgggcagggcttcgagaaaggcgagcgcatcatcgaacagggtgacggcgaagccggcggagtccagcaggaagttcagcgaatcccgcatcgctgcgtcgtcgtcgatgacgtagacatttcccttggttgtcatgaatcagctctcgtcggttgccggcaaggtgaagcggaatgtcgctccgccagccgcattgctctcggcccacatgcgaccgccgtgagcctcgatgatcgagcggctgatggacagccccacgcccatgccggtgtctttggtggtgaagaaggtctggaacaggtttggaatgacgtcttcccggaagccgatgccggtgtcggagacctccacctcgatcatgccgtcgccgacccgggtgttggcgacgatgagctcgcgccgcggagactgcgccattgcctcgagcgcgttgcggaacagattgacgagcacctgctgaatctgcacccggtcggcaagcacgagatcggcgtcgggatcgaggctgaagcggagctgcacgttctgctcgcgagcgccggcgagcccgagcgcgccagcttcctcgatcagcttggacaggctctcgacccgcttctccgattcgccgcgggagacaaagtcgcgcaggcggcggatgatctgaccggcgcgctgtgcctgctccgccgctcggtccagcgcgctttcgatcttcggcgtgttgggatcgctgctgccggcgaggaggcgccgcgatcccttcatgtagttgctgatcgcagccagcggctggttgagctcgtgggcgagcgcggaggccatttcgcccattgcggtcaaccgcgacacgtgcacgagctcggattgcagttcctggagccgcgcctgcgtctgctggtgctcggtgaggtcgcgcacgaagccggtgaaatagggctcgccggcgcgctgcgtctgccccaccgacaggtgcatcgggaaagtcgtgccgtcgcggcgtttgcccgtgacaatccggccgatgccgatgatgtgcggatcattcgtcctgagatatcggtcgagatagctgtcatgacgcgactgatcgggctccggcatcagaatgctcacgttccgaccaatggcttcctgcctgctgtagccgaacagccgctccgcggcgctgctgaagagctgcatgatgccgcgtgaatcgatgacgatcatggcatcgggcaccgtctcgagaatcgagcggagatggttctcctgggagcgcagggcctcctcgagctccttttcctcgttgatgtcgaggaagattccggtgagatgacgtggcgtgcccgaactgtcccggatcactccggccctggcccgaatccattggccgttcccggatccgccggcgaccttgaaggagaggtcaagctcaccgccgccttccgaggtgcgcccgatcgccttcaggagatggtcccgatcgcccggctccagcaacgacaggaagagatcatagttgacggcctgatcccgcccgaggccaaacagccgcttggcgacttccgaccattcaagttcgcgcgtctggagattgagatcccaggtgcccaccccgaatccctcgatgcggccccggaaatgctcgccccgaccatcctctgccgtatcggttaagcgggtcggcgccaagtcatgctcctatcctgggcgggcaggcaggatgcctttaccactaccgcaatttcgcgcaaggctcgctcggaggcaagcggacgttgaattcactggcggatttcccactggacggcgtttgacctagatgcgcgtgttttgatctatctcagcctgctgcgcagcagcaggtttaggattaaagaaaatttggtgatgctggagattctccgatgacatacgcgaccgtcatggtcagcttggcgctggatcagtccaacgaggcgcgtcttcaggtcgcgggggaactcgccgaacgattcgaggccgccattatcggcgtcgccgcggcgcagttcgcgccgccgctctatttcgccgatggcgccgaggcacaagggctgatcgacgaaggcgaggcttcggtcaagcggcggctggccagcctggaagcacagttccgtgcggccgtgaagaaccggggagggcatgtggagtggcgcagcgccctggattttccggcgcgattcgtcctggcccaggcgcgttgcgccgacatcatcgtcagcggggggcagagccccgccttttccgatgctttctcgctcgtgagccccaaggatctggtgatgcaggccggccgcccgcttctcgtcgttcccgaccggaccaattggctcgacctccgcaacgtgctggtggcgtggaaggacacgccggaggcgcggcgggcggtgaccagcgcgctgccgatgctgcgcaaagcgagggacgtcaccatccttgagattccagagcagggcgacgaccgctcggccgtgatggccggcgtcaccgacgttgccgcctggctcggccgtcacggcgttaccgcgaccgcgcgcgtctcggaggccgcaggacgcgaagcgcccgcggcgcagctggagagagtcgccggcgacgtcggcgccggcctgatcgtcgcgggcgcgtatggtcattcgagattccgtgagctgatcctgggaggcgtcacccagcatctggtcacgcaaaccgcccgcaacgtgctgttgtcgcactgagcaccggccggtcagtatcgaatcgaggaggacgcgccgtgtataaatttcttgaacagaccgtcgacggcttcatgacgcgcaacgtcaagacggtgcagcgcagcctcgacttattccatctcagcgagatgttcgagaccgacgatttcaactcctatccggtcgaagacgacgggcaagtggttggcatcgtcaccaaattcgacatcctgaaatgcttcgccttcacgccgagccagatgttgccgcgctacgatgacctgatgagccgcaagatcggtgacgtcatgacgcccgagttcatctatgtcagccccgatacgcggctgacgcgtgtgctccagatcatggtcgagcaccgtatccggagcatcatcgtgctcgacagtgcacagaagctggtcggcatcattgcccgcgaggatgtcatcgcggcgctgaaggcgagcgccggcgactgacagcgctcgacccggcaattcgggctccgtgatattacggaagcggccggtgttgcggcgtccgatgccggccgcaagcgattgatctcgcgtccaatccgcggctgctccacacgaacagaaatccatccatcttgatttcaatcaattccccgcgagggtgaatgtggtttctggccctgtgttctttcagagagaatccgcatgagccagccctccatttcaaaatcaatgaccatcggtgaaagcggcttggctgtcgtattcgcagtcaccgctttcttttgcgtcatcgcctcggccaaggcgctcgatgcgcccttcgccttccacgccgcgctcagcgcggcggcgagcgtggctgcggtgttcgtcatcgtcaaccgctacttcgagcggccggcggcgttgccgccccaggaaatcaacggccgcccgaactacaacatggggccgatcaagttctccgccttcatggccgtgttctggggcattgccggcttcctcgtcggcctcatcattgcttcgcagctggcttggcccgcgttgaacttcgacctgccctggaccagcttcggccgcctgcggccgctgcacacctccgccgtgatcttcgctttcggcggcaacgtgctgatcgcgacgtccttctacgtggtgcagaagtcctgccgcgcacgcttggccggcgacctcgcgccgtggttcgtggtggtgggctacaatttcttcattctgatcgccggcacgggctatctgctcggcgtcacccagtcgaaggaatatgccgagccggaatggtacgccgacctgtggctcaccatcgtctgggtcgtctatctgctcgtcttccttgccaccatcttcaagcgcaaggagccgcacatcttcgtcgcgaactggttctatctcgccttcatcgtgacgatcgcggtcctgcatctcggcaacaatccggcgctccccgtctcggtgttcggctcgaagtcctacgtcgcctggggcggcatccaggacgccatgttccagtggtggtacggccataacgcggtcggcttcttcctgacagcgggcttcctcgccatcatgtattacttcgtgccgaagcgcgcagagcggccgatctattcctatcggctctcgatcgtgcacttctgggcgctgatcttcctctacatctgggccggcccgcaccatctgcactacacggcgctgccggactggacgcagacgctggggatgaccttctccatcatgctgtggatgccctcatggggcggcatgatcaacggcctgatgaccctgtcgggtgcctgggacaagctgcgcaccgatcccgtgctgcggatgctcgtggtctccgtcgccttctacggcatgtcgaccttcgaaggcccgatgatgtcgatcaaggtggtcaactcgctcagtcactacaccgactggaccatcggccacgtgcattccggcgcgctcggctgggtcggcttcgtctccttcggcgcgctctactgcctggtgccgtgggcctggaaccgcaagggactctacagcctcaagctcgtcaactggcacttctgggtcgccacgctcggcatcgtcctctacatctcggcgatgtgggtgtccggcatcctgcagggcctgatgtggcgcgcctacacctcgctcggcttcctcgaatattccttcatcgaaaccgtcgaggcgatgcatcccttctacatcatccgcgccgccggcggcggcctgttcctgatcggctcgctgatcatggcctataatctctggatgaccgttcgcgtcggcgaggcggaagtccagatgcccgtcgctcttcagccggcggagtgaggagcaaacaatgtcattctggacacgccaccaagtcttcgaaaagaactcgatcatcctcgtcgtcggcatcctgctggtggtcgcgatcggcggtctcgtcgagatcaccccgctgttctacctcaagagcacgatcgagaaggtcgacggggtcaggccctacacgccgctcgagctcgcgggccgcaacatctacgtccgcgagggctgctatctctgccattcgcagatggtgcggccgctgcgtgacgaggtcgaacgctacggtcacttctcgctcgccgccgagagcatgtatgatcatccgttccagtggggctccaagcgtaccggacctgatcttgcccgcgtcggcgccaagtattccgacgactggcacgtcacccatctgaccaacccgcgtgcgatcgtgccgcagtcggtcatgccaggctatccgttcctcagcaagaccgaggtcgacccggatgcgatcgccggcgacatgcgcgcgctgaagaccgtcggggtcccctatagcgacgagcagatcgccaatgccgcggccgacctgaaagcccaggccgatccggacaatgccggctccgacgccttcacgaagcgctacgccaaggccgtcgtgcgcaacttcgacggcaagaccggcacgccgaccgagatggacgcgctcgttgcgtacttgcagatgctcggcacgctggtcgacttcaagatctacaatgagaaagccaatcttcgctgagaaggcatgaacgatgaaagccatcctgacagtccacaatctagcgtccgatctcgtggcgacgatctggacaccggtgttcgtcgcgatctttctcgcgatcatcgcctacgcattttggccccgtaacaaggctgcgttcgacaaagcagcgcacctgcccttgcgggaggagtgagaaaccatgaccgatcattctagcgacatcgattccctctccgggaagtccacgaccggacacgagtgggacggcatcaaggagctcaacacgccgctcccacggtggtgggtgatcaccttctacctcaccatcctctggtcgatcggctactggatcgtctatccggcctggccgctgatctccagcaacaccataggcgtgttcggctactcctcgcgcgccgacgttgcggtcgaactcgccaacctcgagaagatccgcggtgacaagatggcggcgctgggcacggcctcgctcgccgacatcgagaaggacccggctctgctggcgcttgcgcgcgccaagggcaagaccgtgttcggcgacaattgcgcgccttgccacggcacgggtgcgacgggatccaagggctatcccaacctgaacgatgacgaatggctgtggggcggctcgctcgaccagatcatgcagacgatccagttcggcgtgcggtcgggccatgccaagagccatgagggccagatgctcgccttcggcaaggacggcgtgctgaagccggacgagatcgtcaccgtcgccaactacgtccgatcgctgtcgggcctttccacccgcaacggctacgacgccgccaagggcgagaagatctttgccgagaattgcgccgcctgccacggcgatgccggcaagggcaacccggagctgggtgccccgaacctgaccgacaagatctggctctacggctccgacgaggcgagcctggtcgagaccatcagccaaggccgcgccggcgtgatgccggcctgggaaggccggctcgatcccgccaccatcaaggcgatggcggtctacgtccattcgctcggcggcggcaagtagccgatcgacgatcgacgacctgcggcgggggcgaagaaaagcgcccccgtttgcgttggatcaagggagattccggcgccaggtctaggttcaatcgcacctcttcgagaaactccaggcgatgaacaagaccgtaaatccgaacgaactgaagcctgcggatgacaccgggccgctctatgcagcccgcaagaaggtctatccccagagcgtctccggcacgttccgccggatcaaatggacgctgatggcgatctgcctcggcgtctattatttcctgccgttcgtgcgatggaaccgcggtctcggcgcgcccagccaggcggtgctgatagatcttcccaacagccgcttttacttcttcttcatcgagctgtggccgcaggaggtctactacttcaccggcctgctgatcgtggccgcggtggcgctgttccttatgaactcggtcggcggtcgcatctggtgcggctatctctgtccgcagacggtgtggaccgacctgttctatgccgtcgaacgtctggtcgaaggtgaccggcgcgagcggatgaagaaggacaaatcgtccgatccgctgaagctcgagcgcatctccgagatcgtgctcaagcattcgatctggctcatgatcgcgtggtggaccggcggcgcctgggtgctctatttcaccgacgcgccgaccctggtgaaggagctcgtcacgttccaggcgccgatgatcgcctatatctggatcggcatcctcaccgcgacgacctatgtcctcgccggcttcatgcgtgagcaggtctgcacctatatgtgcccatggccgcgcattcaggccgcgctcacggacgaatgggcgctcaacgtcacctatcgctacgaccgcggcgagaagcggacgtctgtcaagaaggcggccgagctgcgcgcgctcggccagcaggtcggtgactgcgtcgactgttatcaatgcgtcgcggtctgtccgaccggcatcgacatccgcaacggaccgcagctcgaatgcatccaatgcgggctgtgcatcgacgcctgcgacaacgtgatggcgaagatcggccggccgaagcggctgatcggctacgacaacgacatcaacatccaccgccgccaggaaggcaaggcgccgatctaccgcatcgtccgcccgcgcaccatcgtctacagcgcgatcatcgtggccatcggcggcttcatgacttatacgctcgcgacccgcagcctgctcgacgtcaacgtgctgcacgatcgcaacccgatcgcggtcaagctcagcgacggctcgatccgcaacgcctacacggtgcggctgctcaacaagagcggttatgaccgcgtcattgcgatcgacgccaacgggccggccaatgcgacgatccatgtcatcggcgtcgattcggtaacgcctgatcggccgatgatcgtgatcccacgcgactccaccagcgagctgcggctgctcgtcaccgcgccggcagagaacaatccggagaagtcgatccccgtccgtttcctggtcaccgatatcgggctcggcgaggtcgcttccgcaaccgacaatttcgtctcaccttgaggatcaggagactgccatggcatccaagccgctgaccggaaccaaggtcttcctgatgctggtcgctttcttcggcgtcgtgatcggggccaacttcaccatgatgaagctcgcgatcgcgacgctgcccggcaccgacgtcgacagtccctatgccgcaggccttgtctacgatcgcgagatctcggcggcgcaggaccaagctgcgcgcaagtggaaggtcaacgcgcatatcgagcgccgcagcgacggcggcgcctcggtccagatcgaagcccgcgatgccggcggccagccgatctcgggactgaagttcggcggccggctggagcggccgaccgacaagcgcgccgatctcgccgtcgagctcacggaatccggcattggtctctatcgcggcagtgccgcggacgtcgcgccgggccaatgggacctggtgatcgagggcgaggcgcggggaacgcgcgtgttcctgtcgcgcaatcgcgtgatcctgaactgaaggacgccgtcatgcacatcacgcgggatttttcgcactacgttcggagcgcgggcgagggcgtccagcacatcgatctcgcggtcgagggcgttcactgcgccgggtgcatggccaagatcgagcgcggcctgtcagccattcccgatgtcacgctggcacgcgtgaatctcaccgaccgccgcgtcgccctggaatggaaggcgggcacgctcgatcccggccgattcatcgatcggctcgaggaactcggttacaaggcctatcccttcgagaccgaaagcgcggaggcggccgaggtcgccgaatcgcgtttcctgctgcgctgtctcggggtcgcagccttcgccaccatgaacgtgatgatgctgtcgatcccggtgtggtcgggcaacgtctcggacatgctgcccgagcaacgcgacttcttccactggctctcggcgctgatcgcattgccggcggcggcctatgccggccagccgttcttccgttcggcctggcgcgcactgtcggcgaagaccaccaacatggacgtgccgatctcgatcggcgtgatcctggctctcggcatgtccgtggtcgagaccatcaaccacgccgagcacgcctatttcgacgcggcgatcatgctgctgaccttcctgctggtcggccgcttcctcgaccagaacatgcggcgccggacgcgcgcggtcgccggcaatctcgccgcgctcaaggcggagacggccgcgaagttcgtcggtcccgacgagatctcgcaggtgccggttgccgcgatcaatgccggcgacatcgtgctgctgcgaccgggtgagcgctgcgcggtcgacggcaccgtgatcgaggggcgttccgagatcgatcagagcctgatcaccggcgagacgctctatgtcacggcagagcagggcacgccggtctacgcggggtcgatgaacatttcgggcacgttgcgggtccgggtctcggccgcctcggaggcgacgctgctcgcggagatcacgcggctgctcgacaacgcgctccaggcgcgctcgcgctacatgcgcctcgccgaccgcgcctcgcggctctacgcgccggtcgtgcacgcgaccgcgcttctgaccatcctcggctgggtcatcgccggcgcgagctggcatgatgcgatcgtcaccggcgtggcggtgctgatcatcacctgcccgtgtgcgctcggtcttgccattccgaccgtgcagacggtcgcctccggggcgatgttcaaagcgggtgtgctgctcaatgccggtgacgccatcgagcggctggccgaagccgaccatgtcatcttcgacaagaccggcacgctgacgctgcccgatctcgaagtcatcaatgccgccgacatccccgccgacgtcttcgatctcgccggccggctcgcgctgtcgagccatcatccggtggcggcggcggttgcgcaggccgccggtgcgaagtctccgatcgtcggagctgtcgaggaatccggtcagggcgtccgcgcgagcgtcgacggcgtcgagcttcgcctggggcgcccgtccttctgcggcgccggggcgttggtcggcggcgccacggtggatcccgaagcgtcgatcgtggctttcagcaagggcagcgagaagttcatcctttccgtccgccagggcttgcgccccgatgcgcgagccgcgattgcggcgctgaaggcgcgcaacatgggcatcgagatcctgtccggcgaccgcgagccggcggtgaaggcggcggccaatgcgcttggaatcccggaatggcgcgccggcgtgacgcctgccgacaagattgcaaggatcgaggagctgaagcagcgcggcgccaaggtgctgatggtgggcgacggcatgaacgatgcgccttcgctcgcggcagcccatatctcgatgtcgccgatctcggccgcgcatctcagccaggcgaccgccgatctcgtcttcctcggccggccgctggccccggtcgtcgccgccatcgacgcatcgcgcaaggccttgcacctgatgcggcagaacctctggctcgccatcggctacaacgttctggccgtgccggtcgcgatcagcggtgtcgtgacgcccctgatcgcggcagccgccatgagcggttcgtcgatcctggtcatgctgaactcgctgcgcgcccgcagcgcctcgcgggagatcgtgtgatggagatcctggtcattctggtcccgctggcgctgatgctgggaggtgcgggtctcgtcgccttcctctggtcgctcaggagcggacagtacgacgatctcgacggtgccgcctggcgcgccatcgccgatgacgagccgccgcaggaagcaccggcgaaacgctagcgtttcagggcgaaggtgagcacggccgccagcgcgagcgccacgcccacgccggcgacgcaggcctgccagccgaaagcatcgaacagccggccgagcacggccgtgccgacgagcccgccgcagaaatagcacgcaagataggtgccgctggcaaggccgcggttgtcggctgccgcctgtccgataaagccggtcgcggcggcctgggcgaagaacgtgccgacgccgaccaggaccattccggcgagcaccgtgccaagatgctgcgccagcatcaagggcagcccgagcccggcgactgcgagcgcgctccagatcgtgggccgcgttcccagccgcgcggccaccttgcccgcgagaagcgtcgtgacgatcgatggcaggaagacgaaatagacgaggcctagatccatcatgccaagcgacagtggcggccgcaccagaacgaaattgacgaaagtgaaggtgccgatgaaagcaaacagaatgcagaagccgatgccgtaggcggcgcgcagccgcggattgcgccaatgcgcgatcatggcggccagcggagatcccgcaggcctcatcgcatgcatcggcggcacgcgcttgatggtgaaatagaccagcagtgcgccggcaagattgagcccggcgaagacgtagaagttccaggcgaggccgaggccatcggcaagcgccgccgagatcagccgcccgacgaggttgctggcgacattgccggtgatgtacgccgcaaacgcgctgccggcgtccatggcgctgcactgctcgccgaggtgagcgagggtgagtgcgaaggcggaggccatgcacaggccctgcgcgacgcgcagggcggtgaagacggccagattgggcgcggaggccagcaggctggtggggatcgcaagaaatgccaggctgagcaggatgcccgttcgccggtcgatatgcgggctgaagataccgacgacgagaccggcaagggccatgccgaaggtgctggcattcaccgcaaagcccatcgctgcgggggtgacgccgtaatgccgtgtcaacgagggaaggatcgcctgcgtcgcgaagagatcgacgacggtcaggaaggcggtgaggccgatcacgatcgagcgaagcgcgaaaccggggggatgcgcctccatcgtcatcgcgcccggcttgatgggagccgaaagatcgatcatgcctgattgtcctgtgcggatgtggcgcccggcatgcggggccggcatggggaatccgggcgccacacccggtaacgagtgcgctggggctggggcgctcgttacatgtgatggtcgttgggatccttgcggacgtcgccgacgtagagaatgacggtctccttgccgaggttcttccaccaatgcgaggtgccgtagacttcggggcggatgtcgccggccttgtgcacgatcggatcgacgcagttggaggcgtattcgacgatctcgccttgttgcacgaagatcaaagccgggcggtcatcatggctgtgccagggcacgatgccgccgggcgcgatggtcagcttgcggaagcgcagctcgcggccctcgatacgggcaggctgcttgccgagatcgatcgcgccgagcgtaacgtcggtgacgccgacggccttgtggtcgaccatttgctgcgcgttcggcttgatcttgccggccgggcactcgccggcgaaaaccggcgtcgcaaacgtcagcgccccgagaacggcaacgcctgtccacaccacgcgggaggctgtgagatgcctagacatggaaagtctcctgtgttggccgcaaccgcgatggtcgcgggcgatggcaggagcttcgtcgagaccgtctccatattgaaatgccggcttgctttcgatgcgatagcccggcgctatcccgataggcgacggctatcgaaccgattgggcatcggcatttccgctttcgcgatatccggcgtccgatggcagcgcgcccgatcggcgggcgttctcgtcagttcggaggagcaccatgacgcaattttccaagaccctgatcgcgaccgccgcctttgcggtcatcgcaacggcggccttttcgcaagccgcatgggacttcaagcccggcatggcctatgtctatggcggacccggcaagatgtccgcgatggccatggccccggccgagaagaaccacgaggccatgatgaagcacgcgaagaaggtgcccgacaacaccgtgttcttcatggacaatggtacgttgtactctgcctccgggcggctcgatcccaccggcaatttctacgtgaactgaaccggtcctggcatcgcggccgccccttgcgggcggccgaaccgggaaactagtattcaccacggggaatgccggagcagaagatgacctctctctcgccagccgacgccgaacagctcaggctcgccttccagcgctgccgcgacatggacggcacgctgaacgaacagctccgcgcctatgccgacgccagccgcaaggtctttcccgcctatggcgaggcggtcgatcgcctggtgatgcgattgagcggaaatggcggcggcgagacggcgccgcgccggggcgaccccatgccgtcgttcatgctgcctgacgagggcgggcatctcgtttccttgccttcgctgctgaggagcggccctgtcgcggtgatgttcttccgcggtcattggtgcccctattgccggctcaatgttcgtgccgtggtccaggcgctcgatcgcatcaaggcatttggggcacaggttgtcgcgatcatgccggagacgcaggaatacacgcggcagctcaaggccgaatcccgcgcgccatttccgatgctgaccgatctcgataatggctatgcgctgtcgctcaacctcgcaatctggctcggcgtggagatccagcagttgctgtcctatcaggacatggcgaaattccacggcaacgacggttggctgctgccgatcccggccgtattcgtggtcgggcgcgacggcatcgtgaaagctcgcttcgtcgatcccgattttcgcaagcggatggagatcgacgatctgatcgaagcgctggagagcgccagccgggagaactgagcgtccgcgctaccctgcgatttgccgccagtctgcgccgcgcagcatgcgcatcacggcattgcccacggcggtgcgttgacggccggcgacgccatacaggttgacggtgcggcgggcgtccagccccgcgaccacggcccgtgtcaaccgatccggcaccggcgaagtgtgcggcatcatggcgacgcccatgtcggcctcgaccagctcgatcagatcgcgctcattcgagacctcggggccatgctcgatgtcgatgccgtgttcgcgcaggctcacggagatgcggcgcgcgtgttcgcagaaggtccggttcagcagctgctccgatcgcaagtcgtccaggtcgatcgaactgcggccggccagccggtgtccgttgccgacgaccagctcgaagctctcggtgaacagcggccaaacgtcgaggcggtcccaggcctcgtcgatctccgcggcgatgccgagttcggcttcgcccttcttcaggaagtcgccgacctcccggctggtgccgcgcaggaagcggaattcaaggcggttgaactgccgtttgatctcgttgagatgcgggatgagcaagccgaggtcgatcgcatgggtcagcgcaatgcggagcgcaccgatctctccgctcttgaacgaggaggcgagcgagcgtgcgccggcggcggcgtcatagcactgcttcaggagcggatgcatgcgctggccgagctcggtcaattgtgccgccggccgctcgcggcggaatagatcgccgccgagctcggcctcgagctgcttgatcgcgcgcgtcagcgacggctgcgtgacgttgcactcctcggccgcgcgcgtgaagttcaagagctgcgccaccgcgaggaaatagcggacctggtgcatttccatggatcggttccccagcaggatggatcggaatctaaccgatcgcagcggggaatgtcatcccggccgcgatagcgcgcgcgtatggttttggaagccaggcggcatttccatgcggagcggccacgcgtcatggtcctgcaaatgtcggagctcggcccgagcccggcgatcgccgatggaggtcagtcatgaacatgccgctggagccgcagacccagcagcccggacgcgcgctggccggaaaggtcgcgctggtcacggggtcgaccagcggtattggcctcggtatagcacgagcgctggcggccgccggcgctgacgtcgtgctgaacggccttggtatcgcgagcgagattggccgggcgcgcgagcagatcgccgccgagttcggcatcaaggcgagctactcgcccgccgacatgacgaagccgaaatcgatcgcggagatggtcgcggccatcatcgcccaatcaggccggctcgacattctcgtcaacaatgcgggcatccagcatgtcgccccgctcgatcagtttcccgtcgagaaatgggatcagatcctcgcgatcaacctgacctcggccttccacacgacacggctcgccctgccggcgatgcgccggagcggcttcggccggatcatcaacgtcgcctccgcgcacggcctggtcggctcgccgttcaagtcggcctatgtcgcggccaagcacggaatcgtcggtctgacgaaggtcacggcgctggagaccgcggaggagggcatcacctgcaacgcggtctgccccggctacgtttccacgccgctggtcgaatcgcagatcgaggcgcaagccaaggcgcacggcatctcccgcgatcaggtaatccgcgacgttttgctggcgcaacagccgaacaagcgttttgccacggtcgaggagctcggcgcgctgacagtgttcctgtcaacggatgcggcggcttcgatcaccggcattgcgcttccggtcgacggcggctggaccgcgcattgacatgggccggcgtaacaagctgtcttcgacgacgaatggtcgatcggggcaggctcatcaggagcaagacatggacgatatgcagaacgacatgcagagcaaggttacggacctgccgggacaggtcgtgctcgtgcttcagggcggcggcgcgctcggctcctatcaggccggggtctaccaggcactgcacgaggccggcatcgagccggactgggtcatcggcacgtcgatcggtgcgatcaatgcaagcctcattgccggcaacaggcccgagcaccggctcgcgcgattgagggagttctggaaacgaatggagcagcagccggtctgggactggcgagccgcgtttcccggcttcaacgagaagctcgcctattggtcgaccgtgacccacggcattcacggtttcttccggcccaatccactggcgcatgccggcgattcctatcctctcggcgccgatcacgccggctattattcgaccgctccgctggagaagacgctgagcgaactggtcgacttcgatcttgccaatcgctgcgcgccgcgcctgacggttggcgcggctcacgtcggcaccagcgaaatgcgctatttcgacagccgagacggcgagctcacggtgaagcatgtgatggcttcgggcgcgctgccaccggctttcccggccgtacgtatcgatggcgagctctattgggacggaggcatcttgtcgaatacgccgacggaggcggtgttcgacgacaatccgcggaggaattcgctgatcttctccgtgcatctgtggaatcctgtcgggcccgaaccgacgacgatggcggaggtgctgaatcggcacaaggacgtgcaatattccagccgcatcgcgagccagatcgtgcggcagcaacaggcgcatcggctgcgtcacgtcatcaaccagctcgcggcgcgactgcccgaaagcgagcgtagcgaccccgccgtgcgcgaactggcgagctacggctgcccgacccgcatgcatgtggtgcgcctgctggcaccacagctcgagcgcgagacccataccaaggatatcgatttcagtccgtccgggatcacgcggcggtggcatgccggctatgctcacacgaaatcggtgctggcgcgcaagccctggatcggcgaatttgatccgctcgccggcgtggtgctgcacgagcatatggacgagatgccgatggcggccgagtagggatcgcccgccttcatcgaattgccacaggccttgtgcatcgtgatcggtccgcagtcgaaaggccctgcaagtggtgtccgccagcgatctggaatccgctctcgatcgggtccgcgccaatgcggcgggaccggttgccggcgtgttcggacctgacacggtcacctggcggatcgaccgcgaggccgtgatctttctcggcgccggccgagcgctgctcatgcagctggcccatccctgggtggcagccgcaatcgccgagcattccaagacctttgccgatccgatcggccgttttcatcgcaccttcgacatcgtcttcgccatggtgttcggctcgcttgaccgggcactgttggcgtcgcggcaactgcaccggcgccacgacatgatcctcggcgagatgcccgagacggtcggcccgttcgcggcaggctcgcgctaccgtgccaatgacattccatcgctacgctgggttcacgccacgctggtcgagaccgcgttgatggcccacgatctcgttctccagccgctcccaggggaggagcgtgagcgctattgggccgagagccgcatgttcggcgcgctgttcggcctgacgggagacgacttgcccgcggactggtccgggttcgccgcttacaccggggcgatggtggaatccgacacgctgacagtcagcccggcggcacgcgagatcgcgacgcagatcttcatgggcgcgcgtccatggctgcggccatcgcgatggtatcgtgcgatcacggcaaggatgctgcccgagcggttgcgggccgggtttgggtttgagctcgatgcgcgcgagatccggtcagccgacaatgcgctgagatggatacggcgcgtctatccgaaattgcccgaccggctgcgctatgtcggtccctaccaggaagcgcaggcgcggctgcggggtgagatgcagccggactggatgacacggtgtctcaaccgggcctggatcggacggccacggatggatgtgcgcgggaaggggtgaggtcccagtcacgctgccccacgtccggggcatgagtaaggagtgggcgcacccgcctctccgcggagaaaagccccggcgtcacaccgatgccagcttgcggtagagcgcgctgtagctgccggccgagatgctccaggagaacgatcgtcccatggcgctgcggcgcatggcgtcgagctggtcgtgcgccatgaaggcggagaaggcccggcgcacgcccccgaggaaggattcgcgcgagggttttgagaacaggaatccggtctcgccgtcgctgatggtctcggcaaggccgccggtctggtggccgatcggcagcgagccgaagcgctgggcatacatctggctgaggccgcacggctcgaagcgcgacggcatcagcgtgaagtcgctgccggcgaagatgcggcgcgcctgggcgtcgttgaacccgatcgccaccccgattgcgtcgggacggcggcgatgcgcgtcgatcagagcctgctcgagcgccggctcgccggagccggtgaccacgatctgcccgccggcatcgacgatctcgtcggccgccgacagcacgaggtcgatgcccttctggtgcacgaggcgcgcgacgatgccgaacatcggcccgcgcgagaccgctaagccaaactgcttacgcacgtaatccgcgttggctctcttcccggcccaatcgccggcgccgaactgctgcgcgagctgggcgcaggaacgcgggtcccaactctcgtcgatgccgttgaggatgccggtgagctcggcggcgtcggagcgcagacggagcagaccctcgaggccgcagccgaattccgcggtggtgatctcccgcgcgtaggtgccgctgactgtggtgaggtgcgaggcgtagacaaggcccgccttgaggaaggagacctggtcgtagaactcgacgccgtcgatgtggaaggagctctccggcgcgccgatccgacgcagcgagtccttcgggaagaggccctgataggcgaggttgtggatggtcaggatcgacggcagcttggcgccgcgccaggcaagatacgccggcacgagcgaggccggccagtcattggcatgaatcaagtctgctgcccaattcttgtccagcgtgcccatggccagctcagcggcggccgaggcaaagcgcgcgaagcggatgtcgttgtcgggccagtcgcgcccggactcatcgccataggggttgccgggccggtcgtagagctgcgagcacaacagcacgtagaccggcattccgtccttggtcgcggcccggccgagcgagcaggccggcatctccgcgaatgcagggcagcggccaacgatctggatatgcgtgagttgctcgatgatgtcgcgatagccgggcaacatgatccggatatcggcgaaggagcgaagtgcacggggaagcgcggcggaaacggcgcccaatccgccgacgcggacgaagtcgtccatctctgtggtgacgaataagaccctcaagaacagccgccctcttccgatcccggtttgctactatgcaagaacgggtccagttgtcctggaattcccaagccccccattcggcgcgtccgctcggtaaatactttcctactcagccgccgccctctagggtcagcgcatcaacaagagagaacattgaaggttccaagagggctccggggatgcagctagcagataagcatgagggaacgacgacaaaggccttcgcgggcctgcgcgtcctggatttttcgacgacgatcgccggcccccattgcacacgcatgctcgccgacatgggcgccgaggtcatcaagatcgagaccgagggcggggagacgatgcggacccggcctcccttgcgccagggatgcagcaccgtgttcggtcagctcaatgtcggcaagaagagcgtcgtgctcgacctcaagtccgaggacggcagggagacggtccgccggctggccgcgacggccgacattctggtggagaatttccgcccgggcgtgatgcaccggctgcggctcgactacgaccggctgcgcacggtcaacccgaggctgatctactgctcgatctccggctacggccagaccggcccctcggccgagctgccggcctacgcccccgtgatccatgcggcgtccggctacgacatggcgcatctggcctatcagccgggccgcaaccgtcccgattattgcggcatctatcacgccgacgtcgtcaccgggacctacggcttcggcgcgattgcttcggcgctctatcagcgcagcgtgaccggcctgggccagcatatcgacgtctccatgctggaatccatgctgagcttgacggtgatcgagctgcagagctcgcaattcgcggtgaagccgccgccgcgcccgatgttcggcccgaccgagacggcgagcggctatgtcatgatcacggtcgcaagcgagaagacgtttcagggattgatggccgtgatcggacgccccgaatggatctccgatccacgctttgccacctacgcggcgcgccgcgagaactgggctgacctgatggacggcgtcgagatctggtcgcgtcagctcaagaccgatgcgtgcctcgccgcgcttggcgctgccggcgtgccggcctcggcctaccgcaccgtggccgaggcgctggccgacccgcagcttgcgcaccggcaggcgctctccgaggtgcgggacgagggtggctccttccgcgtgctcaatctgccgttccggatgtccggcgcggacaccgcgcccggcaagatgatcgccgtgctcggcgagcacaccgacgcgctgcgcaacgagatcggcatcgccagcgacacgtcaattccgccaggcaaaacagccgcgacgaactgagcgacatcgccgccgcgtgcggcgctcggacttctgttcgttcctcttgcggtggcgggcatttgtcgtcaatctcgccctcaagtcgttcaacgatccgaaacatcggacgagcgatccgggaggaaccatgacgaacatcgctgccgcggcacgcaagcgcgcgccgcttctcctcgttgcggcctttgcgctggccgcgccggcgcaggcgcagaaaccgggcggcagcatcacggtcggccaggagctggagatcgcaggcttcgatccgctcaaggtcggcgtctacgacacctcgaccttcaccgcagccgccgcgatcttcgacacgctgacgacgctcaatgaaaagggagaagccgcgcccaagctcgcggtgtcctggacccactccgccgactacaagacctggaccttcaagctgcgccagggcgtgacattccacgacggcacgccgttcaacgcgcgggctttcaaggagaatttcgaccggcaaaaggatcccgccaacaagtgccgctgcgccttctacatcagcaacgtcaaggaggtgctggcgccggacgatgacaccatcgtctataatctcaccgacccttcagtgaacctgccggcggtgatcaccatccagagccagaacaacgtcgttcactcgcctacggcctggaagaccaagggcgacgactacaaccgcaatccggtgggcaccggtccctacatcctgaaatcctggaccgccggcgaccgcatggtgctggagaagaaccccaactattgggacaagggtcgcccctatctcgaccgcatcatcctgaaaccattgcccgacgcgcagtcgcgcttcgcttcgctgcaatcgggcgaagccgacatcatctgggacgacgagaacgacgccgacaacatcatgagggcgcagaaggacccgaagctcaccgtgcacacctacaagggctcgggcgctgcggtctatgccttcaataccaaggtcgcgcccttcgacgatgtccgcgtgcgccaggcgctggtgatggcgatcgaccgtcccaagatgtcgcaggcgatcagcaacggtctgagccggccggcgagcaatccctacggcgacggctcctgggtcaagtgcaaggacgacggcgcgctgccgttcgacgtcgagaaggccaaggcgctgatcaaggattacggcaagccggtcgagttcaagatgctggtgacggcgacgccgcgcggccgcatgatcggccaggtgctgcagcagttctggaagcgcgtcggcgccaatatggagatcgagcaggtcgatcaggccaccattccctcgcgcgccttcacccgccagttccagctgacgccgtggcgtatcgtcgatctcgccgatccagatccgcagatgtacgcgaacttccgcagcggcagcccgctggcgctcgccggatactcgaatcccgagctcgacaagcttctcgaccatgcacgcgtgaccgccgagctcggccagcgcaccgaggactattgcgcgatcagccgcctgatcaacaaggaggcgatctggttctggaccttccagaatacctattacgcattgtcgagcaccaggctgaagggctttccgaagatctacaacggcgtgatcgacgtctcgaccacctggctggaatgaccgcgcgatgctgaacttcgtcgttcggcggctccttgccatgctgccggttctgcttgccgtgtcgctcctgacgttcctgatcgcctcgctgctgccgggcgatctggcactcgtcatcctcggcgaccaggcgaccccggagaacgtcgcggcactgcgtcgcgacatggggctcgaccagccgctgtggtggcgctacctgagctggctcggtcaggtgatgcagggggatctcggccgttccttccgcaccgggcagacggtgctgcaggcggtcgccgagcgcatcccggtctcgctgcagctgatgttgatggccgagttcatcgggctcctgatcggcgtgccgctcgcgatcgtctgcgccgcgcgggccggcggcgcgttcgaccgcttcatgaccggcggcgccttcgccatgctgtcgatgccgtctttcctcactgcaatcctcctgatctatctgtttgcggtcgagctgcggtggctgccggcgaccggatatgtgccgttcaccgaggcgccgctcgccaacttgcgcttcttcgtgctgccggccctgacgctcgcgctcgcggaatggccgggcatcatgcgcgtgctgcgctccgacatgatcgcgaccttgcaggaggactatatcgcgctcgccaaggccaagggcctcaagcccgcgcgcatcctgttcgtgcatgcgctgaaaccctcgtcactgacgctggtgacggtgaccggcatcaacatcggccgcctgctcggcggcacactgatcgtggaatcgatcttcgcgctcccgggcatcggccggctgctggtcggtgcgatctacacccgcgatctcgtcatcctccagggcgtggtgctgctggtcgcctgcggcttcgtcatcgtgaatttcatcgtcgacatgctatacgccgtgctcgaccccaggatccgccatggccacgcttgagctgtcagttcaggacgaggtggcatccgcgcccgttcgcggcaacaagttcggcttcctgttctgggtcgcgggcggctggcttgccatcatcctttcgctcgcaatacttgcaccggtgctgccgctgcagaacccggtcgacatggacatgctggagcgccgtgccaccttctcgagtgagcattggctcggcaccgacggactcggtcgcgacgagctcgcccggctgatcttcggtgcgcgcgtgtcgctgacggtcgggctgatcgcgccgatgatcggcctcgttatcggcggcgcgctcggcctcgttgccggctattttcgcggccggttcgagacggtggtggtcggcagcatggacgtgctgctggcctttccgccgctgatcttcgcgctcgccgtgacggcctatctcgggcaatccgttcccaatctcaccgtcatcctgggcgtgctcggcattcccgccttcatgcgggtggcgcgtgcggcgacgctgacgttggcgcggcgcgagttcgtgatcgcggccgaggcgttgggcgccagccatgcccgcatcctcctgcgcgagctgctgccgaacgtgatcctgccgctgctcgccttcttcctgctcggcgtcgccgtcaccatcgtggtcgagggcgcgctttcctttctcggcctcggcgtgccgccgccaatgccgagctggggcagcatgatcggggaaggacgcgagagcctcgacgttgcgccgcggcttgccttcctgccggcggcggcgctgttcctgaccgtgctggcgttcaacctcgtcggcgacaccttgcgggcgctgaccgacccgcgtcagggggcgctgtgagcgcgcctcttctgaccatcgagaacgtcgcggtcgacctgccgaccccgcgcggcaatctgcgcgccgtcgatcatgtcaatctctcgctggaaggcggccgcacgctcggcatcgtcggcgaatccggctgcggcaagaccatgctgtcgcgcgcagtgcttcagttgttgccgaagaaggcgaagctcgcgggacgcgtcattttcgacggccaggatctggtgcggctcgacgcagaacgcttgcgccggctccggggacgcgatctcgcggtcgtgttccaggatcccatgacctcgctcaatcccgtgctcacgatcgggacgcagctgatggagacgatccaggagcatctcgaactcgacgcgccggtcgcgaagaagcgcagcatcgagctgctggcagcggtcggcatccccgcgccggagcaacggctcgcgcaatatccgcaccaatgttccggcggcatgcgccagcgcatcgcgatcgcgatcgcattgtcctgcgagccgaagcttctgatcgcggacgagccgacgaccgccctcgacgtcacgatccaggctcaaatcctcgatctgctcgcgcgcgagcagcgccgccggcacatggcgatgatcatcatcacccacgatctcggcgtggtcgccggccgtgccgacgaggtcgccgtgatgtatgcgggcagggtggtggagcgcgcgccgacgtctgcgctcttcaagcgcatgcacatgccctacaccgaggcgctgctggcggcgatcccgaagctcgacactgcgccgcatacgccgctgccggccatctccggccgtccgcccgatccgacgcggccgctgaagggctgctcctttgcgccgcgctgccgctatgccgctggccgctgtcacgaggccaagccggaactgatggatgcggagacgcccgggcatcggtacgcctgtttccatccaatccggatggcggaggggatcggcgcatgatgcagcttgccgtccgccccgagccgcttctggaggtcaacaatctcgtcgtcgaatatggtctcggcaacaagacggtgcacgccgtctccggagtcagtctccaggtcgcgcgcggcgagacgctgggactggtcggcgaatccggctgcggcaagtcgacgctgggacgcgcggtcttgcagctgcgccgcgccaaatccggccgcgtgctgttcgacggcgaggacctcacggccatggagggcgaggcgctgcggaaaatgcgccggcgcgtgcagctgatctttcaggatccgatcgcctcgctgaatccgcgccggcgcatcggcgacatcgtggcggagccgctgatcatcgccgggatcaaggatgccgccgaacgcaagcgtagggtccacgaggtgctctctgcggttgggctcgatcccgatctcgtggcgggacgtctgccgcatgaattttccggcgggcaatgccagcgcatctgcatcgcgcgctcgctggtgctcaatccggagttcatcgtctgcgacgagccggtgtcggcgctcgacgtctcaattcgcgcacagatcctcaatctgctggaggagatgaaggtgcgcttcggtctgacgctgctgttcattgcgcatgacctcgcagtcgtcaaagccgtcagcgaccgcgtcgcggtgatgtatctcggtcggctctgcgaggtcgggccctcggagcaattgttcgcaaggcccgcgcatccctacaccgggctgctgctgcaggcgattccggtgcccgatccggacgtgcgtcccgcagagagtgttgcgaccggggagccgccatcgccgattgcgccgccgtccggttgccgcttccgtacccgctgcccgcgggccgatcagcgatgcagcgcggagataccggagttgcgcgaggtcgttcccggccagttcgcggcttgccaccatccgctggcctgaactaagacggctccgggtttgtctcgtctcgcccgccgtggcatggtggcgcgacaagcaagaagcatgcgggaggacgccgatgaagagtttcaaggtcgccgatttcaaagcgccgttgaaggagttcgacgaggccacgccgcagccgtcgggcacgcaggtgctgatcaaggtgaaagccgcgggcgtctgccatagcgatctccacatctgggagggcggctacgatctcggccacggccgcaagccgctgtcgctgaaggaccgcggcatcaacctgccgctgaccatgggccacgagacggtcggtgaaatccttgccttcagtcccgacgtgaagccgaccgaccagggcgatctcaagctcggcgatgtcggcctcgtctatccctggatcggttgcggcaaatgcgccacgtgccttgccggcgacgagaacatgtgcctgacgccgcgctcgctcggcgtctattgcgacggcggctatgccgaccacatgctggtgccgcatccgcgttatctgctcaatctgaaaggtctcgaccccgcgacgaccgcgccctatgcctgctcgggcgtcaccacgtatagcgcgctgaagaaggtcgagcagcacttcgacacgcccatcgtgatgttcggcgccggcggcctcggcctgatggcgctgtcgctgctcaaggcgatgggcggcaagggcgccatcatggtcgacatcgacgtgaagaagcgcgaagccgccgagaaggccggcgcgctggcgaccgtcgatcccaaggcgccggatgcgctcgagcagcttgccaagaaggcgggaggccccatccgcgccgtgatcgacctcgtcggcaacgccgcgacgacgcagctcggcttcgattgcctgaccaagggcggcaagctcgtcatcgtcggcctgttcggcggcggcgcgacctgggcgctgccgctgattccgatcaaggcgatcacgatccagggcagctatgtcggaaacttgcgtgagacgcaggaattgctcgacctcgtccggacgaagaaggtgccgccgatcccggtgacgacggccccgctcgccaaggcgaacgatgcgctcttgcaactgcagcagggtgcggtggtcgggcgcacggtgttgacgccgtaaagattgacactctccccgtcattgcgaggagcgaagccacgaacaaaccagaacgtcgccgcagatgcagttctggattctttcgcttcgctcgcaatgacgacttggctgactccttccccgaggctctcgaatgtccgcaaacaacgccttccatatcgccgtgctcgccggcgacggcatcggccccgaagtcatggcgccggcgctcgaagtgttgcgcaaggtcgagcagaagtccggcctgagcttccgcttcaccgaggcgccggccggcgccaacaactatctggccactggcaagtcgatgcccgactcgaccatcaagctgtgcgaggaggcggatgcgatcctgctcggcgcctgtggcctgccctcggtgcgctaccccgacaacaccgagatcgcaccgcagatcgagctgcgcttcatcttcgatctctatgccggcgtgcgtccggcgcggctcattccgggcgtgccgagcccgatcgtcggcgccgaccagcgcggcatcgatctcgtcgtcattcgggaatcgaccgaaggcctgttcgcctcgatgggcaagggcgtcgtcacccacgaggacgcgcgcgagaccatggtgatcacgcgtcgcacctccgagcgcctgttcgaattctcgtttcgcctcgcggagcggcgcaaggcgcgcggcaggccgggcgcgctcacctgcgtcgacaaggcgaacgtgttcaaggcgtttgcgttcttccgcggcattttcgacgagatcgcgaagaagcatcccgaggtgaagaccgaccggctctatgtcgatgcctgctcggcgatgctggtgaagcggccctgggatttcgacgtgatggtgatggagaacatgttcggcgacatcgtctccgacatcacagcgagcctgatcggcggcctcggcatggcaccgtcggccgatatcggcgatgaatatgcggtgttccagccgtgccacggcaccgcgcctgacatcatggggcagggcaaggccaatcccaccggcatgatcctgtcggccgcgatgatgctggactggctcgccgacaagcacggcctcgagagcgctgcggaagccggcgagaccatcgagcgtgcggtggaccagatctatgccggcggcatcaagccgatggagttcggcggcagcaacggcacggcggatattacaaaggccgtgctcgcggcgctgtaatcaaggaaaaggggcccgcaggccccttggtcgttcaccagcggcgccagtgatggtgatgacgccagcgccatggacgggggccatagaagcgcgggccgccatagtagccgtaggcgcggtaatagttcgggcgccaccagcagcggccccaggggttacagacccagcgcacttgctcgacctcggcgggcggaccgcttgcaatcttgtccgcttgcggaatgccgttcggcattgccgcaagtgcctgtccggaggcgagcgccacaccgccgacggcagccagaccaagaacagcaaatttcagtgtcatcgcaatctccctcgttgctggcgggagaactttcgcgggatcaagtggttgcaacggcgctgaaatgcacgcggaatttaatcttcctgaatgtcggttcagcttcagcggccccggaattgcggcttgcgcttttccatgaaggcctgccggccctcgcggaaatcctccgagtccatgcaggcattgccgatcgccttgaccgcctccatgtcgcgccggctttcatcctcaagcacctgcgtgatggtgatctttgcggccttgatcgcgagcggagcgttctgcgagaccgtctctgcgatcatcatggtctcgccccagagctcgtcgacagggaacacgcgctcgaccaagccaatgcggagcgcctctgcggcatcgatgcgcattcccgtgtacatcagaagccgcgcccaggacggaccgaccagcgacaccagatgccgcaggccgtcatagccgtaggcgatgccgagtttggctgcgggtatgccgaactggctcccatgcgaggcgaggcggatgtcggcgagcatcgcaacctgcatgccgccgccgaggcagtaaccgtcgatgcaggcgatcgtcggcttgggatagtcggcgagcagcgcgcgctgggcggcgctgcgcctggcgtattcctcggatgccgctgcattgtgcctggccttctcgaactggctgatgtcggcgccagagacgaatgccttgccgccggcgccgcgcaggatcacgacccgcacgtcgtcgtcgtcgcgcaaggcggtcagcgccatgccaaatccctcccacatctccagcgacatcgcgttgcgcttgtccggattgttgaaggtgatcacgccgacgccgccggccgcgtgctggaggatcctgccgtcggcgtaaggcattccggtcgtgctgaacatgtcgggcatcgtgcgctcgctggtcgtaggacgagccgcaatgtgcggcgcaggcgccgccatggtcaacccgggcaagggcgggcagcttgcatccgcccgtgcttcggttgcatgcgcgaagctcgacgaaggtggcggctgaccgccaacaaaaaggagcggccaggccgccccgagacagaccccgcgcaggggcacgggcgcagacatatttcgtccggtctcgttcaatccagccgcgcccccttgacgcggtggattgaacgtcggccgtgaaggccaaaccgtcgttcgacttcagctctcgttggccgcgatcgattccatcagcgagacgagctgacgctgcaccgtctggtccttgatcttgctgtaggcgcgcagcaggcggaggctgaaggccgaatccaggaagagcaggctctcgacttcgcgcgccttgttgtcgccgtcgtagaagaaggtcacgggcacgtcgagggcggaggcgatctgctgaaggcgggccgcgccgacgcgattgacgcccttttcgtatttctggacctgttggaagctgactccgagcttctcgccgagctcggcctgcgagatcttcatctcgacgcgccgcagccgaatccgcttgccgagctcgatgtccggcttcccggcgctgcgctgcttcattctttttgccgctgctttcatctctgctttcacctttgttcttcggttgaaaatcccccgaagagctgggtcaggggttcgcccatgtacgagtccttgaattcatgcgggtgcacgaattcttccttaaaccacgggaagcgagccggattgaaagcgtcgatcagccagtcaatcatgtgccgcacgcgcggaatacggccgctaccggggtggtaggacagccagatatccagcggtcggttcagctcgacctccagtggaattaacttcccgccaagcgcgatggcgtagctcgggaatacgccgatgccggcgccattcgcgaccgcccaataattggcgcttgagacgttggtcttcatgaccagaaggtcacgttccggaacgcccgggaagaagctctcgaaggtttccttggcggcgagttcgtcggcgaattgcagcaccaggcgatgcttgatcaattccgccgccgaccgcggcgcgccatgctttgcgatgtatttctcagaggcccagaacatcagatgcatgcggccgagccgcaccagcttgatgtcgagcgccgaagggcgcgacaggtggatcgcgacgtcggcctcgtggcgcgagacgtcggccgaacgcatcgcgcaatgcagatccaccaggatcttcggataggcctgctggaattcgacgaggcgcggcgccagccagaacgtgccgagcccctcggtgacggcaacccggacctcgcccgacaaggcgttggccatcgaatcgctggcgcgcagcacgtcgaaggtggccgcctccatgcgctcgacggcggagaccaccagggcgccctcgtcggtaagatgggtgccgtgaacgtcgcgggtaaagagggtcgtgccggtctggcgttcgaaaccgtcgattcgccggcgcacggcattgatcgacagcgacaagcgttcggccgccgaccggaaacttccgcatcggacgacttcaagaaatatgcgggccgcatcccaatccgagaggccgctgagatttgtctttgggcgttccgctggaggaacgcccctttccgctaaggagtgcatacaattcccttcgggtggctaaactggcagaatctggcgcaaaccacaaccacgacgggttggggaacgacgagttttgaacgtcatcctttactactcgtgggcggtattagagtgttgcccaggatggggattggacggattgtcctccgactgaggggtttggcgtgagttccgttgcaggccgtgaagtggctgcgggattgccggcgctgtccgcggcgagaattctcgcgcgagcgccgctgtcatctccctcaatggatcgatctcgccgcatcaggcgtttgctcccgaaccaccctggtgatcgccgactgcgctgcgcggatacggcgggcagaacagcggttccacggcagaaacacaccggaatcaggttcgggggcgcaggggcttcgtgctatcttggctctgccaggggagccgaagggaacgtcacgaacacgtctcgcaggccgaattaacggaaagaacgccggtgtcgcattcagacgaacagttgcagtcggtgctggaaacccttgaggagtgccgcagggttctcaatgagtgcagcagccgcgaatcggcggagatgttgtccatcgtcatcctcgacgtgcggatgaaactgaaaggaatcgacggtgccgatctcaaggcgctgtgcgacgagatgctgcggagcgctgcgagcgagccgccgaccccttccaagcagacgcaggaccagccccggcgtccgctgctccgcgtggtgaaatagccgcgccgccgaatctcgctttttggcgaggtttctgcgcgtcccgatgccgcatctgtgatcacggagggcatcgggaggagccctggttttgtgcgcttctgttgcgcattctccggcatcggttacaccagagccggttcggctccgggccgcgcgcgttccttgcgcgccgtaccgggcctgagatggctccgactgcatcatgcaaaatgtttcgatcccggcggcgctgattgccggcctcgtcagcttcctctcaccctgcgtcctgcctctggtgccgccctatctggtgtatctcacgggcgccacgatcgagcacgtcgagagcgacgagccagcagaggcctccaagcgcgcaatcctgctgtcggcgctgctgttcgtgctcggcttctccacggtgttcgtggcgctcggcgccagcgcctcgttggtcggcgggctgatccgtgcatggtcggcggagctgtcgatcctcgccggcatcgtcatcatcatcatgggactgcattttctcggcctgacgcgcatcggccttttgatgcgcgagggacggctgccgatccccaggccggtcggcctctggggcgcctatatcatgggcctcgccttcgccttcggctggacgccttgcatcggcccgatcctcgccgcgatcctctcgatcgcggcggcggaagccacggtggcgaagggcgctggcctgctggcggtctattccgcgggcctgggcattcccttcctgatcgccgccctgatgatcgagcagttctccgcgctgttcgcgcgcatgaaaggccacctcgtcaatatcgagcgcgccatgggcgtcttgatggtgatcaccggcatcggctttctcaccggcgcggtctcgaatgtgagcatctggctgctggagacgtttccggcgctgcagacgatcgggtagggcgcggtcccgagaggagccggcgcgctggtcgcgccggcacctccgcgtgcggccgactcagggcttgaacacgtagcccggcgtgatcgccgccgcctccgggatcggcggcagatcggcgaacagctccgggcggtccttcatgaccttgagaatgtgcttcggctcgatatgcgcgttgacgtcgaaggtcgatttgaggatgcccagccgagagaggcggtcctcagcgctccacagtgcgcggtagttgttcgccgacagccgacggtccgcctgctggatgttgaactgcatcgcagtctcggcgacctcctgcttgagtccgggaatccagcgtgtggcgacctgcgccgccagtttcgggttcttgcgcatccattggtcggcctcggagacggcggcgaggaatttctcgatggtctcgccattggcctgcacccaggggcggagcgcgacgttgaagccgatgtaggaaatcacgtcgccgccccggatgatctcgaccgcgcccggcacgtccttgcccgcgacgatcggccacggatcccagcccgagaacgcatcgatgcccttggcgagcagggccacggtcatgtccggcggcggggtgttgaccaatgtcacgtcatctggcttcagaccggccttctcgagcgtcgccaggatgtagagatggttgatcgtgccgaaggaggccgcgatcttctttcccttcaaggtcgacaggtcgcccttgacgatgcccgaaccttcgcgcgcgacgatcgccatggtcgcgtcggagccggccttggtggcattgccgctgtaattgccgagcgcgacgaggtccatgccgcgcagcacggcgccgatcatgggcacgccgacctgcacgatctcgctctcacccgcctgcaacgcgttcagcgcgtcgacgccggtggcgtaggggcgcgcgatcgtgacatcgagcccgtacttctcgaagaagccgcgctcgagtgcgatcggcaggccgatctgatcgatgccggtcaccatgccggccttgagcttcgtcagcgtctgggcgcttgccggcacgaggccggcgagaagcgctagtccaagcaacacgagtcttttcatattgtcagcctccctcttttatcggccccactgccgtcacccaatagggccgggccacggcgttgaggtccgttcttttgacaccacgcagttcgatcgaatgctcgtccgtacccgagacgcgtccgtattgctggaacgcgagcacgtggaagcgctccggcgtgaacggcagctcgatctgcacgttcaccttctccgatgtgcccttgagctcgggcgagatctttgccggcgccgcgatggtcagccagagctgaaacagcgcccaagccgcgatcgcgccgagcgcgatgcgcagcttgggtgatcgcaaggcttcggaggcgatgctcatgccgcgcgcaccatctgcagcacgcgcgccgagagctgcttgaactggtcgtccttgacgagctcgtcccacacccgcgggcgcggcaggtcgaccgcgatctggtcgagcacgcgtcccttcgacagcacgaccacgcggttagcgagaaacaccgcttccggcacgtcatgggtgatgaagatcaccgtcggcttgcgctcctgccagatgcgggtcagttcctcctggagggtcatgcgcgtctgcgcatcgacgctggcgaacggctcgtccatcagcaggacgtcgggattgtttgcgagtgcgcgcaccacgccgacgcgttgctgcatgccgccggagagctcattgggatagcggtgcgccgcgtgcgagagtccggcaagcgcgagatattcgcgcgcaatgcggtcgcgctcggccttcggcacgccgcgcatcttcgggccgaagccgacattgtcgagcaccgtcttccagggaaacagcgcgaacgactggaataccacgccgcgctcagggccgggcccgtgcaccggcttgccgtcgagcaggatgtcgcccttcgagtaggggatgaagccggcgatcatgttcaggatcgtcgtcttgccgcagccggagggaccgaccaccgaaatgaattcgcccggctcgacgtcgagcgagacatcgtggacggcagtgacatgcgcgcccgcataggggtcgaaataggtcttgccgagattgcgcagcgaaagcgtcttcatgatgtcaccaatccccaacgctggccggtcgcacgctcgagcggggcgaggatccaggcatccacgatgtaccagagcaatccgagaatgatcatgccgaggatgatctcgacggtcgagccggcgcggcgggcgtcgaacatcatgaatccgatgccggaggtgccgacgatcatctcgactgcgatcagcgcgcgccagccgtaaccgagcccgttgcgcaggcccgtgatgatattgggcagcgcggccggcagcgtcacctcccatagcacgcgtgcccgcgaggccccgaggctcaaggcggcgcgcgagaggtcacgcggcacggagccgacgccgagcacggtgttgagcacgaccgggaacagcaccgtgtagacgatgacgaaggtcatcgtcgtcagcccgaagccgaaccagatcaacaggatcggcagccaggcgatgtcgccgatcgcctggaagaacagcagcaccggccagcagatccgatgtgcccagcggctggtgccgatcagaatccccaggggaataccgagcgccatgcagactgcggcgccggtcgcgagacggatcaggctgtcctggaggtagtcgggcaggatccccttgtaggtgagcgtgacgaacgcgcgcaagacatcggccggtcccgggaagaacgcgcgcggaaacaagccggcctcgctcaccgcggtccacagcgcaagcaccgggatgaatggaatgatcgcggcgaatcccggccagcgccgggtcaggcgggcatagccggcccagatttgcagcatcagattcatgcgcgcctcaccatgccccagcgctcgatggtcgcgcgttccagcgggaccagcagcagacggtcgatcagaagccagagcacgccgatcacgatcatgccgaacacgatcacctcggtgcggtagaagtcgcgggcgacgaacagcatgtagccgagcccgacattggtcgcgatcatctcggcggcgatcaggccgcgccaggcgaagcccaggcccgtccgaatgccggtgacgatgttggggagcgcgcccggcaccagcacttcggtcaggagcgtccagcgaccggcgccgagcgaggcggcagcattgcgcagcgagtgcgggatggtcctgacgccgagcagagtgttgtaggcgacgacgaagaagacggcattgaagatcacgaagacgatcgcgccaaaaccgtagccgaaccacagcgtcgcgatggggatccaggcgatgccggcgagcaccgaaaagaagcggaacagcggcgtcagaaaggccgccaccgtcgggctgacgcccatggcgatgccgagcggcacggcggtggcgatgccgatcaatgtgccgaggccgacgcgcaagaggctggcggcgacatgggcgaacaacgtgccgtcgcggatggaatccagcgcggcggtgccgaccgctcccaccgagggaaatacgcgcggattgacgttgaacagcgggacgacgatggcccagatcgccacgagcgcgatcagcggcgcgacgaacatcgcggctcctgccagcgaactgacgctgcggatcagccgcgacgatcgacctttcacactgcccgtcacctgcatctgacctcccgacgctcagctatgcctgtgccggcatttcgcgctgatcattcccgacatcgtaaccgcgtttcccgcaatcgcatatctgcatcggttgcgcccctcgcgatcgcgggcggcgcgtccgagccttctgtcacgctccatgggcttttctcttacgtttgacgcccgacgtcctggtgacgcgctggttcggtccgcccgctctgcggctcgccgcggcgatgaccgtcttccggttcgacagcttcaatcgggtgtagccgagcaggcgctccatcgcggcgcgcgccttctcggggttgccgctttcgatggcccgcgccgccgcgacgtggttcggcagattgtccctgaaccagccgccggggctcacgacggcgacggtgaagacggtgctcaggatggtgtcgatcgcgccgcggaagccctggaggacgggattgtgggtcgcgtccaggatggcaagatggaaagccttgtccgctgcgagggcgctggcctggtcctttgcagtctgcatcgcggccagggccgtgtcgatccgccaacggtcgttcttggtcgcgcgttcggcggcaagagctgcggcggcgggctcgatgatcgagcgcacctcctggatcgccagcagaagatcgcgatccggctcgtcctggccgacgagccagctcagaacgtcgcggtcgagcaggctccattcgtgacgcggcagcacctgcgtgccgtggcgcggccgaacgctgacgaggccttttgcggcaagcgtcttgattgcctcgcgcaccacgccgcgtccgacgccgaaacgggtctcgagttcaggttctggcggcagggtcgtcccgacgggaatgagatcctgggcgatctcgcggccgagcgtcgtcagcacggcgcgaatgcggccgggcttgatcagcttgtcgacggggctcgggcgcgctcttgccactcgtacgtttctcccgtccggcctgtcgcggccggttcattatctttggctgccacgcccggcagctgcacaatcatccgatgtttaacatcggatgaatggggcagggcaagcgcaattgtcgcagggatgatcgtgctgcgttgcgatatgcgccaggaggccgcggatcagggcgcctcgtccagcgtgcagatcaccgtgcagaccacgccccgcggcaggaagtcgacggttgcctcgccgccgagctgatcgcgcgcgctgcgctcgatcaggcgcgagccgaagccgcgctgcaccggcgccgtcactggcggcccgccgctctcggtccagatcagccgcagccgcggcttcggcgcatcagcgatgatctcccagttcagcgtcacccggcccgtctcgttggacagcgcgccgtatttcgcggcattggtggcgatctcgtgcacgatcatcgacagcaccacggcgagccgcggcgacagcgggacaggcggtccagccatgcggatgcggtcgggattgcttagcaggaacggctggagcgcacgggcgatcacgtcccgaagctcggagcccgcccatttctcctgactcagcaggttatgcgcttcggccagcgcgccgagccggccctcgaacttgatccgctcgtcacggctggcgctgcgaaaggtctgcaccgcgattgcctgcatcagggccagcgtgttcttgacgcgatgattgagctcctcgatcaggagattgtgcagcatctcgccgcgcgcgatcgttgctgccatccggactgcaaaggtgaggccgaccagcagcaggatgccgccgatcaggctcgtgatcgcgacgttgcgccagagcggggcgatcaacgagctctcggcgatgccggccaccaccgtccagccggtcagctgtgatttggtgaaagcggacgacagagggacgccgtcgagcgatattgtcgaaagcgcagcctccggcgtgcgggacatcgcatcgtagagcgcgccggaggcctgcttgccgaacgtgtcgactggattgggcgtccgcgcaaacacgcgagccttggtgtccagcagcgataccgtccattgatcgtttggacgctgctgctcgaccagtctttggaacagcgcgatcggcggactgaaggacaatgcataggcgacctcgccattgcgcagcacgggaacctctactgtcacgatcggctgtttcttggtagagccgacgaacagatcggaatattgcggcgccttgcgtgcaaacacccgctcgacgatctctcggttgttgcgcgctggcaagttcgcagctcccggagtcacggacgagaagagctggtcgccggatctgtcggccaccagcagcacgctgtcgtcgccatattgccccgtgaactcggcagccaggcgccgaaaggcggcaaaatcgccgctctgcaaagaattgctgagcgcgagcacctgcaagccgcccgtcatgcgctgcacctcggagtcgagcacaaggcgcatgcttcgtacggtctccagcacccgccgggtcgcctcgctgcgatcctggcgatagttggagtaggcaaggccgacggcaaacacgatcagcggcaacatcgttcccgcgaccaagagagctagccgggcgggcagtgtgagttttggcaacgcggcggtcccggttccagcgcagcggcgccggatgattttggcagaccatacggtcgcgcgccgcgctacgccacgattttcgcgattgcctcgcagtgcgcggggcggaggccgcccttcggaatgccgcgccgacgcgcaggtgcagtgcagcaggtcgtgacggagtagtcccgagacgaagagcacggccagcgctgcgaaatgacttccgtccccctgcggattttcatacgcttgcctctcgcaagccgcagagcggctgcactcacggcccggtgacagggccggagcatcaagggaggggaacgatgaagcgaaggtcatttctcgctggtatcggtgcgaccagtgcggcggcgacgatcggcatgccgtcgatcctcagggcacaaggcgcgatcacgctgaacggcgcagtccagttcaacgacgaccacgccttcaaccgggcgctgatccggttcgaggagctggtgaagaaatactacggcaagcccgtcaacttcacgctgcacaagaactcctcgctcggcctcgaaaagcagtatttcgagtacatgtcgcagggcaaggcggtcgattacggcatcgtctcgccggcacacatgtcgaccttcgcgaaggcggccccgttcatcgatgcgccgttcgtgttcaagggcatcgagcacatgaacaaggtcgttgaagccaacattctggcgccgatcgccgacgaggttgccgccaaggccgaggtcgttctgatcggttatgctgggggcggcatccgcaacatcttcgccaacaagccgctcaagaacctcgcagatctcaaggggctcaaggtccgcgtgcagggcgcgccgatctggtcgaagacgttcgcggccgtcggcatgagcccgactgtgatcgcctataacgagatctacaacgcgatccagaacggtgtgatatcggccggcgagaacgaggcggccggcgtcgaggccatgaagttctacgaagtggcgccgcacctcaacctgacccagcacgcggtatcgatccggccgatctgcttctcggtgaagacactgaaggccttgccgaaggatctgcaggacgcgatcatgaaggccggcaaggaggccggcgactacggtcgtcagcttgagtcgagcgaagaggtcgtcaagctcgacgcgctcgagaaggccggcaagctcaagcgcgttcccttcgaggagcgggacgccatgaagaagctcgccgatcccgtgatggcaacctacgcgaaggagatcggcgcggaaggcattttcgagaagatcaacgtcgtctgaggtcgttgcatcccgcgatcctggtccgggcaggccccgcttcctgcccggacgtggtggatgagtgccgcacggagccagaatgtccgaaatgcacgtcccgtccacaccgtcgctgtggcgtcgcctcacggcggcctatgcgaaattgttggaattcctgctggccgtctgcgtcggtgtccttgttgtcccggtcacgttgcaaatcatctcgcgctacacgccgttcattccgtcctacatctggacggaggaaatggcgcgcttcctgttcatctggacgatcatgatcggcgccatggtgggtatccgggaggcgcagcacttcgaggtcgacgtgtggcccgacctgtcgcggcgatcggaggccgcggtgcggatcattgcgcgcgtcggcgtgctggcgctggccctggtgtttgtgtgggccgggatcgaattcacgcgctttgcctggaacaggacgtcggagctcgccgatctgccgctctggctgatccaccttgcctggccggtggccggcgtgacgtggatcgtgtttgcgggcgaacagatggtcgatgaactgcgcgttctgtttggggctgggcgatgaacgggaccgtgctctctgccggccaggctgcgatggtgctgttcggcgtcttcgtcggcttgctcatcgtgcgcgtgccggtcgcttttgcgcttggccttgcctgcgtgccgatcctgctgatcgagccgcgcctgtcgctgatgatgctcgcgcaggagaccttcaatgcgtacaattccttcatcctgctcgcggtgccgttcttcctgctgacggcgaacctgatgagcatcggcggcatcaccgaccggctggtggcgctgtcgcgctcgatggtcgggcattggcccggatcgctggcacagatcaacgtcgttttgtcggtgttctttgcaggtatttcgggttcctccacggccgatgccgcgagccagtccaagatcttcatcgatgcgcagaccaaggagggctacgatctctccttctccatcgccatcacggcggcgtccgcggttctggcggtcgtcattccgccttccatcctgatgatcgtgtggggcgggctgatctcgacctcgattgcagcgatgtacctggcgggtatcgtgccgggcctgctgatcgcgggcgcgcagatggcgactgtgcacgtctatgctgtgcgtcgcggctacccgacctatccgaagtcaggctgggtcgagatgcgatgcgccatctggcggtcgataccggcgttgatgacgccgttcatcatcgttggcggcattctgctcggctggttcaccgcgaccgagtccgcctgtgtcgcagtgctctattccgtcgtgctctcggcgttcttctaccgcgagacaggcatacgcgaactgtacagggccttgctcgacaccgggcgccttgccggcgtggcgctattctgtgtcggcaccgcgagcgcgttcggctggctgctcgcctactacaggattccgcaggagctgctggccaacgtctcgacatggggaatgggcgccgttgcggccggcttcttcatcgccttttgctttctggtggttggctgtttcctggacgcaatcccggccatcatcatcgtcgggaccgtgctggagcctctggccaagtccgtcgatctccatccggtccagttcgcgatcatttccatcatatcgctggcgttcgggctggtgacgccgccctacggcttgtgcctgatgatcgcctgttcgatcgccggcgtgcggctgcgctacgccctgaaggacacggtgatcatgctgatcccgatgctgctcgtgctggcggccgtcatcgtctggccgagcgtgtcgctgttcctgccgcgtctgatcgtgccggagatgctcaaatgagcgtgtgagcgtgctcccgcagcagacggccgccggatcggatccaccgcctacagattgctttcggtgatggccgcgtagaccatgctgcgcagctcgcgacggatcggataggcgctcgacggcagcacctgcgtcatgaagatcgtgatcagctcctcggccgggtcgatccagaacgaggtcgtagccgcgccgccccaattgtactcgccggggctgccggcaatcagcgtctcggccgggcgcatggtcacggcaaagccgaggccgaagccgataccgttatacgccgcttccgagaacagcgagcgcgagacctcgggtagggagcgtccgcctgggatgtggttgctcgtcatcagcgccagcgtcttcggcccgatcagcctgacgccgccgagttcgccgccgttgagcagcgagcggcagaaagtaaggtagtcggcgactgtcgagcacaggccgccgccgcccgagatgaaggagggcggggacaggaacgagctcgtggtcggatcgtcctgcagcgtcaggccctctcgccgctggccggcatggaaggtcatgccgccgccggggtccgccgagtagcaggcggcgaagcgatgcgccttggaggccggaacgtggaaatcggtgtcggtcatgccgagcggatcgaggatgcgttgtttgaggaactgctcgaacggcatccccgagatcttgccgacgaggtagccgagcacgtcggtcgagaccgagtagttccaggcctcgcccggcgagaactccagcgggatcttggccaggctctcgatcatggtctgcagcgtgcctgatttctcgacctcgccgatcttttcggtgcgataggcggcatcgacattggagcgctgctggaagccgtaggtgaggccggaggtgtggcgcagcaggtcgacgatcagcatcggccgggagggcggccgggtcaggaaggccgggtaggtgccggcgacgaacacgccgagatccttccattccggaatgtatttggcgacgggctcgtcgatcgcgacgagaccttcttccaccagcatcatgaaggcgacgctggtgagcggcttggtcatggaatagatgcggtagatcgtgtcgtccttcaccggcaccttgcgctcgacgtcggcaaagccctgcaccgagctgtgagcgacctttccgcggcggtagaccaggagctgcgtgcccgggaagcggccggcatcgatgtaccggctcttcagatgcgcatcgacgcggtcgagggcggccttggacatgccgacggattcgggcgaggcaggggtgggagcgagcatcagttcctccggggcggtttctcgacgacggtgatagccaaatggcgcgcccattccaagccggtcgcgcttaacgcgagtaggccagctggtataggctgtacctgggaacgcaaggagcccgcccgggccgacgagaaaagcgcgagggaaatgcagcatgactcagttcaacgagaccgagctcacggaagccgtcgtcaggagcttcgaccagacgcctgataggcgggcaaaattcctgctgcaggaattggtgaagtcgctgcacgattacgtgagcaagaccggcctcaccttcgaagaatgggaatacgcgatcgatttcctgacccgcaccgggcaaaaatgcacggacacccgccaggagttcatcctgctgtccgacgtgctcggcgtctccatgctggtcgacgccgtcaatcaccgcgatcgcgacggcgccaccgagacgaccgtgctcggcccgttctatgtcggcgagcacaaggtgaccgcccatggcaccgatatctcgccgaacaatcagaccggcgagaagatgttcgtgcagagccgcgtcaccgacctcgagggcaagccgctcgcgggcgttcccgtcgacgtctggcacgccgacgatgatggcttctatgattcccagaagcccaactatgacgaggtcggcgcgtccgcacgggcgcgcttcattacggacgatgacggccgcttcttcttccgcacgatactgccgtgcagctatccgatcccgaccgatggtcccgtcggcgagatgatcgtgcagaccaagcgccacccgatgcgtccggcgcatgtgcacttcctcgtcaacgccaagggccatgaaccgctgatcacgcacgtcttcatcggtggcgacaaatatctggattccgacgtcgtgttcggagtcaagaacgatctcatcgccaacgtcgagccgcgcaacgatcccgaaatgcccgatggcaccaaggcgaacgggcaatggcacctgatgacctacgaatttcacctcaagccgggcggcggcatggcgccgaagccgctgggaaccaaggcgatcgagccggcgtgagagctcgcgttcctagcctgagtgcagcagcgccagcagcacgatgaccgcgcaggcgagcgccgccgacgtcaccttccagaacatcaacgggttgcgctccaacaggggcgtgatccgcgtgtcgagataggctggattgggcgtgcgaagctcgtggacgaattcggacaggtcctcgtgccgcttgtagggatcgggatggagcgcgcgtttgagcgcgccatcgacccaagccggcacattgcggtcgtcgtccgccgggcgatactggagcctgcgcacgtccgccttgcgccggatcctggcaacctgtgtgccataaggcagctttcccgtcagcatctggtagcagatcacggccagcgaaaacatgtcggagcgcggtgagccgccctgtcccagaaaatactccggcgcggtatactgaaccgttcccaggatttcgtcggcttcctcgcaaggcgcggcctccgcgacgccggcaaccctgaccgaaccgaagtcgatgatcttggcggtgccggtcttgtcgatcaggatgttgtcgggcctgaggtcctggtgcagcatctccatgcggtggaaggcgcgcaggcccgccgcgatctgctcgatgaggcggcggacggtttcgagatcggggcgcggattgtcggtcatccattgcttcagggtctgcccctcgacgaattcggtcgcgacgtacaggtagctgcgacgcttcgatcgcgacagcggcttcaatacgttgggactgtcgatccggcgcgcgatccattcctccatcaagaagcgtttgagatagagggcgttgtcgcgcaggtcgatcgacggcagcttgagcgcgaccggctcgtcggtctccacatcgacggcgagatagatgtggctgcggctgctgccgtggatttccctgacgatcctgtagccatcgaagatcgcccgcggctccggcagcggaggcagcggaagctgcgagttctggctgagaatatccgccggctcacgctggggtaccgcatcgacgcgcaggacctgcaccgtgatgttgtcgtcgctgccgcgccggtaggcttcctcgacgatggtcctggccgcggcgccgagatcgcctgcatgttcgttgatcgcgctcgtgacgaagcgggcatcgacgaactcatacgcgccgtccgttgccagcaggaaggtgtcgccggcctggacctcgacggtctgatagtcgatctcgagctgcggattgatgccgagcgcgcggccgagataggtctgctccgacgacacgatgatgcggtgatcgtcggtcagctgctccagcgccttgccggcgacgcggtagatgcggcagtcgccgacatggaagatgtgtgcggtggtcgccttgatgacgatggcgctgagggtgcagacatagcccttgtcgcggtcataggcgtattggctcttgcgcgtctgcgcgtgcagccaggaattggtcgcgtcgagcacgcggcgggcggaggtcttcaccgtccatgactctgacgtgcagtaatagtccatcaggaagctcttgaccgccgactcgctggcgatctggctcaccgtgctggaggagatgccgtcagcgaggacggccgcgatgcccttcaggctgagcagcggctcctccggaatgaggacgccgtgaaagtcctggttgacgggcttgcgacccttgtcggagtgctggccgactgaaatcaggagtccgcgggtcatcgtcatcaccggcaaggaggagcctcaccctgctcgggcgaggctccgctgtcgagacggttttgatcaggccgcgacgcgcggccgagtggccttgccggcctggcgcttcggcagggtcatgacatgcgtcgcgtagagcgtcatgccggtgaaggcgaggccgccgacgaggttgccgagcacggtcgggatctcgttccagatcagatagtccatgatcgagaacttcgcgccgagcaacaggcccgacgggaacaagaacatgttcacgacggaatgctcgaacaccatgtagaagaacaccaggatcggcatccacatcgcgatgaccttgccgggcacggaggtcgagatcatggcgccgaccacgcccgtcgagaccatccagttgcagagcatgccgcgcatgaacagcgttgccatgcctgccacgccgtgcgcggcatagccgagggtccggccctcgccgatattgccgatggccgcaccgaccttgtcgggtgcctgcgtgaagccgaacgtcgtgacgaaggccatcatgaaggccacggtgaaggcgccggcgaagttgccgacgaagacgaggccccaattgcgcagcacgccgccgaaggtgacgcccgggcgcttgtcgatcagcgcgagcggcgagagcacgaacacgcccgtgagcagatcgaaacccagcaggtagagcatgacgaagccgaccggaaaaagcagcgcgccgatcagcggctggccggtattgacggtgatcgtgacggcgaaccacgccgccagcgcgaggatggcgccggccatgtaggcgcggatgatggtatcccgggtggacatgaagatcttggactcgcccgcatccaccatcttggtgacgaattccgaaggcgcgagatacgacatcaatggttccttttgcttcgcaagtaagatcggcactctcttggagagcgcagctgaacgtcgtcggtcgtgcgggctcgcctgccgcgcacgaggaccatggagagtgaggaagccttcggaatcgcgtcacgaggaccaaagccggggagctgcgatgcagctcagcttccggatgcagccgccagaggctgcaacaatgcggcaagccgctgtcttcgttgacgttcacgaggttgcaaatcgcgtgccggagttgcacgtcccgattacttagcaacttcaattggatatcaccttgtcgagactgtagctgctgtcgcgacggcctctcgattaagcgtttgcataaggattgtgcgccgcacaagtaatatgcagatcgcaaatttcgcgagcggacgcttgggtcggcggcttcactgcgtttggccagagtgctgattttccgagatttttcgccgcgtcgcgcttggcatgaagcttgaatagttccaacccgacgccattgaagccgtcccgcgagatttctcatccgattgctgacgccaccagacgggggtcctccctgtccgtgcgttcgcatgcgccgaacacggcgccaacggaaggacgggctgctcgcgcgcacagccgcaaatcattccgcaaagacgcaaaggacgacatcgcctatgaccaagcgcacccgccggccctcggaaaccactggcctcagccgccgtcaattgttgaaggccaccggctcgaccgccgcacttctcgctgctgcaaagctgagcttccctgccggcgctttcgcgcaggacgcaggccctgaggtcaagggcgccaagctcggcttcatcgcgctcacggacgccacgccgctgttcgtcgccaaggaaaagggcttcttcgccaagtatggaatgcccgatgtcgaggtgcagaagcaggcctcctggggcaccacgcgcgacaacctcgtgctgggctcggaaggcaatggcatcgacggcgcgcacatcctcaccccgatgccgtatctgatctcggccggcaaggtgacgcagaaaaaccagccgacgccgatgtacattctggcgcgcctcaacctgaacggtcagtgcatttcggtcgccaaggaatacgccgatctcaagatcggtgtggataccgcgcccttcaggccggcactcgagaagaagaagtcgtcaggcaaggcggtgaaggcggcgatgacctttcctggcggcacacatgacctttggattcgctattggctcgccgctggcggcattgatccggacaaggatatcgaaaccatcgtggttccgccggcacagatggtggccaatatgaaggttggcaccatggactgcttctgcgtttgcgagccctggaatctgcagctgatccatcagaacatcggctacaccgcgatcaccaccggtgagctctgggacaagcatcccgaaaagtcgttcggcatgcgcgcggcctgggtcgacaaatacccgaaggcagcgaaggcgctgctgatggcggtgatggaggcccagcaatgggccgagaagatggaaaaccgcgaggaagccgcggtgatctgcgccaagcgccagtggatcaattgcccggtcgatgacatcaccgaccgcatgaagggcaagttcgactacggcacaggccgcgtcgtcgacaattcgccgcagcagatgcgcttctggaaggaccatgcctcctatccgttccagagccatgatctctggttcatgacggaggacatccgctggggcaagtacgacgccggcttcgatagcaaggcgctgattgccaaggtcaaccgcgaggacctctggaaggacgcggccaagaccctcggcgtcgcggctgccgacattccgacctccacctcgcgcggaaaggagaccttcttcgatggcaaggtgttcgatccggagaatcccgccgcctatctgaagtccctcgcgatcaagcgcgtcgaagtctgatggagccagcggccgccctcgcgcggccgcatcgtccctgcgcagccggagagagatagcgatgaacatgactgccacgaagatcgaggtcgagaccgcgacgcccgccgcaaccgcagcgccggtcgtcgcgttgatgcccaagcgtcccccgcgcactgaagcctacgcgcgcatggtacgggagacggccgtgcgggtgatccccccgcttgtcgtcatcgcgcttctgacgctgatatgggagctggtctgccgccgcgcgggctcggcgctgccgccgccgtcgaaggtgttcaaggataccaaggaactgatcctcgacccgttcttcgacaatggaggcatcgacaagggtctgttctggcatctctccgccagcctccagcgcgtcgccttcggctattcgctctcggcgatcgccggcatcgcgctcggcgtgctggtgggacagtcggtctgggcgatgcgcgggctcgatccgctgttccaggtgctgcgcacgattccgccgttggcctggctgccgctctcgctcgcggcgttccgcgacggccaaccctccgcgatcttcgtcatcttcatcacctcgatctggccgatcatcatcaacaccgcggtcggcatccgcaacatcccgcaggactatcgcaacgtcgccgcggtcgtgcagctcaatccgctcgagttcttcgcaaagatcatgattccggcggcggcgccctacatcttcaccggccttcgcatcggtatcggcctgtcctggctcgcgatcgtcgcagcggaaatgctgatcggcggcgtcggcatcggcttcttcatatgggacgcctggaattcctcgcatatcagcgagatcatcctggcgctgttctatgtcggcatcatcggcttcgtgctggaccgcctgatcgcgggcctcggcaaggtcgtcacccgcggcaccgcgcagaactgagaggagagggcacatgaccgcctatctgaagctcgaccatatcgacaaggtcttcacccgcggtgccgccaccacggaggtgctgaaggacatcaacctcaccatcgaggaaggcgaatacgtctcgatcatcggtcattccggctgcggcaagtcgaccctgctcaacatcatagcagggctgacccgcgccaccaccggaggcgtgctgctggagaatcgcgaggtgaactcaccggggcccgatcgcgccgtggtgttccagaaccacagcctgctgccctggctgaccgtctacgagaatgtgaagctcggcgtcgacaaggtcttcgccaagaccaagtcccgcgccgagcgcgacgcctgggtgatgcacaatctcagcctcgtgcagatggcccacgccagggacaagcgtccttccgagatctccggcggcatgaagcagcgcgtcggtatcgcgcgggctctggcgatggagccgaaggtgctgctgctggacgagccgttcggcgcgctcgacgcgctgacccgtgcccacctgcaggactccgtgatggccctgcatcagaagctcggcaacaccatcctgatgatcacccacgacgtggacgaggcggtgctgctgtccgaccggatcgtgatgatgacgaacgggcccagcgcgcgcatcggcgaggtgctggacgtgccgctggcgcggccgcgcaagcggctcgagcttgcgaccaacgccgcctatctgaaatgccgccagcgcgtactcgaattcctctacgagcggcatcgcttcgtcgaggccgcgtaaagccggcgctatcgcgagaggcgtgcgcatcccaacacgcctcccggctcgcgggtgacctggtgcttccacctgcgtcgcagccggcagggtgcaggcgcgccaagcctcgcccaggacacttggcacgaaggtcgcttctccccgtacgcggggaggaatctctctgatgacgtttgacccatgaactttttccgcaatggcgcggacgaaggcagaccgaaacagacaggagaacatcatgacgcccgagcaagtcaccctcatccagcagagtttctcgaaggtcgcgccgatctcggagcaggcggcggtgctgttctacgaccggctgttcgaggtggctccgtcggtgcgcgcgatgtttcctgaggacatgaccgagcagcgcaagaagctgatgggcatgctcgcagccgtggtcggcggcctgtcgaacctggagtcgattctgccagcggcttctgcgctcgccaagcgccacgtcgattacggcgccaaggccgagcactaccccgttgtcggtgcgaccctgctgtggaccctggagaagggccttggcgaagcctggacgcccgagctcgccaaagcctggaccgacgcctacggcgtgctgtccggctacatgatttccgaggcctacggcgcgcaagcgcaggccgccgaataggagatgctatgtgagtgagccgctggtcatcgtcggtaacggtatggcggccgcgcgtcttgtcgacgaactcgccaagaccgccctcggccgctacgcggttgccgtgatcggcgaggagccgcggctcgcttacaaccgcgtgctgctctcctccgtgctggccggcgagaccggctcgcacgagatcgaactgcgtccggcggagtggtggcgaaatcgcggtgtcaccgtgcgctacggctatcgcgttaccgaggtcgatctcggtcggcgcgagcttaagatcgcgggcgaggagagcatggaatattccaagcttgtgcttgccaccggctcgacgccgctgcggctcaacgtgccgggcgccgatctcgccggcgtgcacacttttcgcgatacgcgcgacgtcgacctgctgctgacgctggctgcggccaggaagcgcgtggtcgtggttggcggcggcctgctcgggctcgaagccgcctatggccttgccaaggccggcgcgcccgtgacactgctgcatctgatggaccggctgatggagcgccagctcgatggacccgcagccgacctgctcaagaccctggtcgagcgcaagggcatccgcatcctgctcaatgcctccaccgctggcatccacggcgatggtcgcgtcgaggcgatcgagctcgccgacggcagccgcatcgaggccgacgcggtgatcttcgctgctgggatcaagccaaatgtcgcgctggcgaaagaggcggggatcgcggtcaatcgcggcgtcgtcgtcaacgacgtgatgcggacctcctcgtccgatgtcttcgcgctcggcgaatgcgccgagcatcgcggcatctgctatggcctggtcgaaccggcctatgaacaggcgcgcgtgctggcgcgccatctggccggccgccccgccgcctatgagggcagcgtgatctcgaccaacctcaaggtctccggcgtgagcctgttctccgccggcgacttcatgggcggggagggcagcgaaagcctcgtgctgtcggaccgcagccgcggcacctacaagaagctggtcatcgcggacggtcggctcaccggcgcggtgctgatcggcgataccgccgacgcgctctggtatctcgaactgatacgtaatcgcgacaaggtcgcggcgatccgcaccggcatgatgttcggccgcgcgctggcgttgccgtcgaaggcggcttgagatgacggcgatcaatccgaacctccgcaccatcaggacgacctgtccttattgcggagtcggctgcggcgtgctggcgacacccgacggcaagggtggtgcggcaatcgctggtgaccctgagcatcccgccaatttcggccggctgtgctccaagggctccgcgctcggcgagactatcgatctgcaaggccgcttgctctacccgatgatccgctgcaagggcgtgctggagcgcgtcgcctggagcgacgcgctcgatcacgttgctcatcgcatgcagcacatcgtggcgcgcgacggcgcggacgcggtcggattctatctctccggtcagctcctcactgaggactattacgtcgccaacaagctgatgaaggggtttgtcggcacggcgaatgtcgataccaattcccggctctgcatgtcctcttcagttgcgggccatcgccgcgccttcggcgccgacaccgtgcccggctgctacgaggatctcgaccaggccgatctgctcgtcttcgtcggctcgaatgcggcctggtgccatcccgtcctgttccagcgcatgctgaagaaccggcaggagcgtggcgcgcgcatgatcgtgatcgacccgcgccgcaccgacaccgccggcgatgtcgacctgttcctcggcctcaagcccggcaccgacacggcgctgttctcgggcctgttcgtccatctcgccgattgcggcgcgctcgatcgggcttacatcgcgcagaacaccagcggatacgacgacgcgctggcgcgtgcgcgcaacatcgccggcagcgtcacggcgacggcgctcgccacgggcctgtcggagcaggacgtcgccgccttcttcaagatgttccgtgacaccgagaaggtcgtcacgctctactcgcaaggggtcaaccagtcagcgcagggcaccgacaaggtcaattcgatcctgaactgccatcttgcgacgggacgcatcggcaagcccggtgcctcgccattctcgcttaccggacagcccaacgcgatgggcggccgcgaggtcggcggcctcgccaacatgctcgccgcccatatgggcttcacgccgcccgacatcgatcgtgtcaggcggttctggaaagcgccgcgtatcgccacgcatgagggcttgaaggcggtgcagctgttcgaggccatcaaccgcggcgaggtcaaggcactgtgggtgatgggcaccaaccccgcggtgtcgttgcctgacgccgacatggctcgcgatgcgctgaagaagctcgagctcttcgtggtctccgagaacgtgctctgcaacgacacggtcgcggccggcccgcatgtgctgttgccggcgctggcctggggcgagaagtcgggcacggtgaccaactccgagcgccgcatctcgcgccagcgcgcgttcctgccggcgccgggcgaggcgcgccccgactggtggatcctgagcgagaccgcaaggcgcctcggcttcggcgacagtttcaactacaagtccgccgccgacattttccgcgagcatgcagcgctctcggcgttcgagaacaacggaaatcgcgacttcgacatcggcgcgctgacctcgctctcggacgaggccttcgatgccctgcagcccgtgcagtggccggtgcggggcggcggcgaccccgtcgagcgcttcttcgcgcaaggcggcttcttcaccaacgacggcaggggccggttcgtcgcgcccgaggtgccggcgctgcgcggagagaccggtccgtcgcggccgctcaggctcaacaccgggcggattcgcgaccaatggcacaccatgacgcgtacgggtctcagcccgcggctcggcgcgcacctgcccgagccgttcgtcgagatcaatccggacgacgctggaaaatacggcatcgcccatgacggctatgcccgcatcaccaccgattacggccagtgcatcctgaaggccgtggtcagcgaacggcagcagcgcggcacgctgttcgtgccgatccactggagcgcgatgaacgcctcgcacggccgcgtcggtgcgctggtgcactccttcaccgatccgttctcgggccagccggaatcgaaggcgacgccggctgcaatcgcgccttatgaatttgtcttccgcggcttcgcgttgtcgcgcaagcagctcgaacttccctcgaacctgttgtggacgcgcgtcacggtctccggcggtttcggctatctcttcgcggacaacggcgatctgtcgcggtggcccgcctgggtcgggaccgttgcgggcgaggatgtcgccgaataccgcgacatcggcggcggcgtctatcgtgccgcctcattcgctggtgaccgcatcgagacctgcctgttcgtcggacctgcgcacgatgccggcgactgggaagtggtgaagggcgcgtttgcggccgatcacgtcaccgacgagcaacgccgcatgctgctgtcaggcaagtccagcgaaggcgccgcctcgaccggcccgatcgtctgcgcctgcttcggcgtcggccgcggcaccatctgcgacgccatcgttgccggcgcatgcacggccgccgagattggcgcgaaactcaaggccggcaccaattgcggctcctgcatccccgagctgaagcggctgatcgcggccacggacgcggctccggcgaaagagaccaagctcgcaaacgtggcaggttagaggctggctctttccatcgtcattgcgagcgcagcgaagcaatccggaatcgttccgcagctatggtctggattgcttcgctgcgctcgcaatgacggcgtggatgcgctgtgcgaaggccacgatgtcgtgctccggacgcagcagcatccctttcggcgatgctctgcagagcggttgcccatatcgcaccgagttgcgcggcgtccgggactcgaggagatcggctgcaagccgggctccgggcccaatcgacgcgtccgtgattgtgccctatgctgccggccgctctcttcaagtgggcgagggggcactctgacccgccgtggagcagacatgaacaccaatcccttcggcaagaccggcgtcaacgtgtccgtcatcgggcagggcacctggtacctcgaccacggtgaccgcaagcgcgcgatcgcggcgcttcagcgcgggctcgatctcggcatgacccatatcgacaccgccgagatgtatggcgatgccgaactggtcattgccgatgccatcgccggccggcgcgacgaggtgttcctcgtttcaaaggtgctgccgagcaatgcctcgcgccgcgggaccatcgccgcctgcgagcgctcgctgaagcggctcaggaccgaccggctcgactgctatctcttgcactggcgcggctcctatccactggaggacaccgttgctgcattcgaggaactggtgaaatcaggtaagatcaaatcctggggcgtctccaatttcgacgcggacgatctcgacgaaattcttgacgttgcgggcgaaggccggatcgcgtgcaaccaggtgctctatcatctcaaggagcgcgcgattgagcatgccgtgatcccgtggtgcgagcggcacggcgttgccgtcgtttcctactcgccgttcggtcatgatgatttccccgcaagcagcagcaagggcggcgccgttttggcccgtatcgcggaggcgcgtcgtgcgacaccgcgtcagatcgcgctgggcttcctcacccgtgcgactacggtattcgcgatcccgaaggcctcgtctgcggagcacgccgccgagaatgcggcagccggcgatctcgtgctgacgaaagacgagattgatgcgctggatgctgcctttccgcgcgggccgaagccgcgcggcctgcccatgctgtagtgcacaaacccgcattattaacggagcattgacgcgcgcggcggcgcgcgcatatcggcatcctgttttcggaagttgtgaacgcggcgcatttgtcgttttttacgaccgttctcgattcgcatttcgcccgggttcctgccgtgacaccgccgcccgccgcagccgcaaggctcgacactattcccatgcccgttccggagaagaagcaggagactcgccgcgcgcctgcgcgcgtcgatcatccgttcagagggattgcactggtcctgctgtcgacgatattcctcggctgttccgacgtcaccgcgaagtatctgtcgacaagcctgccgtcgatcgagatcacctggatccgcttcctcaccttcacgctgctgttcacgccggtgatgctgccggccacgccgctctacgcgatgcgcaccaggcgtcccggcctacacgtcatgcgcggggcggcgctgctcggctcctcgctgttcttcatcacgggcctcggcttcctgccgatcgcggaagcatccgccaccggcttcgtcgcgccgctgttcgtcaccgcgctctcgatcgtcttcctcggcgagaaggtcggcatgcgccgctggctcgcgaccgcgctcggcctcatcggcgtgctcatcatcctgcgaccgggcaccagcgcgtttcacccagccgcatcctttccattgatctcggcggcatgctgggccggcaccctgatcctcacgcgcatgatgagcgggcgggaagccgtcgtcaccaccatggcctattcgtcgctgacgggcctcgtgatcctgacggcgctggtgcccttcgtctgggtgacgccgtcgtggaccgcgatcgcgctcggcatcttcatcggcgtggcctccacggcgggccagtggatcgtcgtgctggcctatcgttacggcgatgcgtcggtgctggcaccgttttcctacacgcagctgctctgggtcagcattctcggctacttcatcttcggcgaagtgcccgacgtcttcaccatcaccggcgcggccttcatcgtcgccagcggcctctacatcgcccatcgcgagcgtgttcgccgcgcccagctcctggtgctggaagagcgttctccgaacgcctgacgcaagttggcgggttgcgtctcgtgctatcaaccgctccaatgacaagggaggagccggatgcgggccgcgattttcaggaacggagagatcgtcgtcgaccggatggccgagccgaagcccggcaacggccaggtgctggtcaagacgctcgcctgcggcatctgcggctccgacctgcacgcccgccagcacgcccatcgcatggtcgacatggcgcggaaggtcggccgcaagccgatggacctcagccgcgacgtcgtgttcggccacgagttctgctgcgagatcgtcggctacggtcccggctccgaacgcaggctcaagcccgggacccgcgtatgctcgctgccggcgctggtgacgccggaaggcatccagggcatcggctattccaacgacaacgccggcggctatgccgaagcgatgctgctgagcgaagcgctgctgcttgaagtgccgaacggccttgcgcccgaacatgccgcgctcaccgagccgctggcggtcggcgtccacgcggtcgcgaaagccgatatcagcggaggcgaggtgccgctcgtgatcggctgcggtccggtcggcctcgcggtgatcgccgcgctgaagctgaggggtctgcatccgatcgttgccgccgactattcgccggcccggcgcgcgctcgcggcgaagctgggcgcggacgtcgtggtcgatccccgggtctcgcagccctatgcgacctgggccgagcatgcgcagatgtcggaggcggagaaggcagcacgatcgccgttccgggccatgctgccggcgctgaagccggcgatcatcttcgagtgcgtcggcgtgcccgggctgctgcagcaggtgttcgaaggcgcgccgcgggacgcgcgcatcgtcgtggtcggcgtctgcatggaaaccgacaagagcgagcccatgctcggcatcatgaaggagctcaatgtccagtacgtgctgggttatacgccggaggagttcgccgcctcgctccgcctgatcgcggaagggcaggtggacgccgcggcgatggtgacggccgaggttggcctcgacggcgtcgccaaggcgttcgcggacctcgccaatcccgagatgcacaccaagatcatcgtgcagccgtggcggtgacggccgcgcagggtgggcaaagcggtacgcgcctttgcccaccctgcgggacaccgtcagtatttcgccggcacgtacatctccggcgggaccgggcctcgctggtagtcggggttgcgcacgcgcgccggcagcgtcaccggagcccgcgcgacctc

SEQ ID NO: 190 - DNA, 146373 bp, Bradyrhizobium colbertium
  misc_feature (35695)..(35704): n is a, c, g, or t
  misc_feature (37833)..(37842): n is a, c, g, or t
  misc_feature (85385)..(85394): n is a, c, g, or t
  misc_feature (112726)..(112735): n is a, c, g, or t
gtcggcagcgtctgataccagaatgcgacggaggcaatgtcgtcctgcagcggaagatactttgcttccttgacgcccggcagccagcccagcgcctggaccgtcacgcgcagaccggaccggaagcgcacgggatccgggatgtgccagcggtagaggccgaagcgctgctgggacttgtagacaccgtcaggccggatcacctgcggcagtccggcatagggcgtggtgaattcctggtagcgcgattgctgggcaggcccgtggcccgaatgtgcgacataggggtcgaaattgtaggcaccgcagaaatagtcctccgtgccggtgccgcagatcgtcgggaatgcaccgtccccgtcgatgtagaacttgacctcgccttcgccccaccagccgttgttgttgacaccccaggccatgtaggtgccgacatattggccggcgccgccgatgccatcgaggatggtgtagacctccttgtaaggcagcggattggtccgccggaattgcgcatggaaataggcgcagtcctcggagacgtcggtcaacacatagttgatctggtagtagaccgtgatctgctcgtcgctgcggttctccagcgtgaagcgggcacgcttgcggaacggcatctcccagtagcagttgaaggcgcggccgggattgacgcagaccgcgagcgaagacacttgcgcgtattcttcccaaccgcaggcgaagaagtctccggccgggcattccacgctcggctgttcctggtcgtcccagtagatgcgcaggatcgaatggcgcagccgcccgcgcgccagcgtcatccagatctgctggattgcgccctggccctggatgtcggcgagcgtgaaggtcgcgccgggctcgatcaagacgtaaggcgaaatcttccatccctggccgagatcgcgcgcctgacgcgcggcggggccgtccacggacatcccgcctttgcccctctcgccggtgaagttctccgggctgatcgatcgcgtctgcgcattcgacagccgcgacagattgccgagatgcatgcccaatccggaaaacgtcatggtgtcctcgatccaaggtgagcgaggcttggctatatcgctcccgaatctaccaaaagatgaagacagcgcgcggaattgtctgcacgcggtcaggtgccatcatgtgacgcgatattccttgaatctctcgcgcagagcggatttcagcaccttgccggtgccggtcatcggaaattcgtcgaggaattcgaccgcatccggcatccaccagctcgcgatcttcgggcgcatgtggtcgagcagcgtcttgccgtcgacggtcgcgcccttcttgcgaacgacgaggagcagagggcgttcctgccatttctcgtggctgatcgcgacgacggccgcctgcaggacgtcgggatgggacagcgcgatgtcctcgagctggatcgaggagatccactcgccgccggacttgatcacgtccttggagcggtcagtcagcgtgacgtgaccctgcgggtcgatcaccgccatgtcgccggtgatcagccagccgtcgcggtcgaggccttcgttgagcttcatgtagccggatgccacccagggcccgcgggcgcgcaaatggccgacggtcttgccgtcgcgcggcagctcgttgccggcatcgtcgacgatgcgcaaagcggtgccaaaacaggcgcgtcccgagacctgacggcggtcgaacttctccttctcgctaagatgctccgagccgggccgcaggcccggcatcgagcagccgagcgcctcggtcatgccccacgcctggatgtagtcgatattgtactcgcgcttgagtttctcgaccatcgcccgcggcggggccgagccggacgacagcgtcgcgcgcagcgtcgtgaacttgttgccggtgcggcccagccagtcgagcaggatcagccagaagctcggcacgcccgccgacagcgtcaccttctcgccttcgagcagttcatagagcttgtcgggctcgtagttgcggccgggcagtaccagcttggacccggtgtagggagccgtgaacggcatgttccagccgttgccgtggaagagcggcgccatcggcatcatcacctcgcgcacgccttcgatatggcccggcaggaagtcgaagttgcagcaggtcatggtctgcaggatcgcggcgcgatgcgagtagatcacgcccttgggattgcccgtcgtgcccgaggtgtagcagatggtcgaggcggacttctcgtcgaataagggccaggcgaaaccggaatcgtcctctcgctccagcaattcctcgtagcaatgcacgttcgcgagcttcgtctccggcatccgctctcgcgaggacatcacgacatagctctcgatcgtcttgagctgcggcgcgatcgcctcgacgagcggcagcgtggcgcggtcgatgaacaggaggcgatcttcggcgtggttgatgatgtagacgagctgctccggaaacaggcgcggattgacggtgtgcagcacgtagcccatgccgggcgcggcatagaacatctcgaaatggcggtgggtgttccaggccagcgtcccgacccggtcgccgggcttcatgccgagccgcttcaaggtcagcgccatgcgcttgatccgtggatgcgcatccgcataggtatagcggtgaatgtcgccttcgatctcgcgcgcgacgatctcggcttcgccgtgataatcggccgcatactggatcaggccgctgatcaaaagcggcatgtccatcatcaatccttgcatggtctcctccagatgccgcgtcgttgcgtcggctaaggctcatgatttgcctgcgaggttagcggaacgtcacgcagcgttcacgcaaaaaacagcgggcgtgattgcacgcggcactttttcggggctaacgtgcggcgagctgccgacgaagcagcacgcgtggtggaggaaatggatgtcagcggaaagacgcaagaccggtacaagcggcgcatctacggtcgatgtttccgcgctccgcgcccgctatcgcgatgagcgcgatcgtcgtctgcgcgccgagggcaaggcgcaatatatcgaggtcacaggcgagttcggccgctacctcgacgacccctgggcagatcccggatttgcgcgcgacgccgtcagcgaagcgactgaagttctcatcgtcggtggcggcttcgggggtctgttgtgcggcgcgcgattgcgcgaggccggcatcgacgattttcgtatcgtggaaaaggcggccgacttcggcggcacctggtactggaatcgttatcccggtgccgcctgcgataccgagagctacatctatctgccgcttctggaagagactggctacatgccggtgcgcaagtacgcgcgggcgccggagatctacgagcactcgcgccgcatcggccgtcatttcgggctttaccagcgcgcgctgtttcaaactgtcatctcgaggatgacatggcaggagcgggaggcgcgctggctggtcgagaccgatcggggcgatcgcatccgcgcgcgcttcgtcattttggccggcggtccgctgagccgtccgaagctgccgggcattcccgggatcgaaacgttcaaaggccacagctttcataccagtcgctgggattacggctacaccggcggcagtgcggatggtgatctgacaggtcttgcggacaagcgcgtcggcatcatcggcaccggcgccaccgccgtgcaatgcgtgccgtacctcggccgttcggcgaaggagctctatgtctttcagcgcacaccgtccgccatcggcgtacgtgatgaccgtccgacggatcaggcctgggcgcagagcctcaagccaggctggcagcgcgagcgcatggacaattttacggccgtgatttcaggcgagccgttcgaacgggacctggtgcaggacggctggaccggcctgctcggagagatcctgctggcgccgcgccggcagcagcagccggtgacctcgatggaggaggcgctgaaggtgatcgagcaggccgattaccgcaagatggaggagatccgcgctcgcgtcgatgcggtggtcaaggacgaggcgactgcggctgcgctcaagccctggtacaaggcattctgcaagcggccgtgcttccacgacgaatatctcgacacattcaaccgctccaacgtgcatctcgtcgataccggagggcacggcgtcgaacgcatcaccgagaacgccgtcgtcgccggtggcaaggcccatgagctcgactgcctgatctatgccagcggtttcgaggtcggcaccgattatgcccgccgcatggggttcgaggtctatggccgcgacggcatgagcctgtccgagcgctggcaggacggcgtcaagacgctgcatggcttctacagccgcggcttcccgaattgcttcctgatcgtcacggtgcaggccggacagagcgccaatttcccgcacatcatcgacgagcaatcgcagcacatcgcctatgtcatcaagcaggcccgcgagcgcaaggtccgcaccctggagccgacgctcgccgccgagaacgcctgggtcgaggaggtggtcaaggccgcactcggccggcagacttatctcgccgaatgcacgcccggctactacaacaacgaaggcgtgttcgatccgatcgcggcaagaaacagccaatattggcgcgggccggtggcattcctgcgactgctcgacaaatggcgcaaggagggcaatctggaaggactggaattgtcccatgatcaggtcatggagtcgccgccttccaccggctaagattgcgccgccgagcggtgcaggacaggagtcgggtatgatcaggggcagggttgttgcgggagcggttcttggcgcgatgacgctgctcgggttcctggcatcggtcgccgaggccgcgcaatgcggcagctcgccggcgggttttgagacctggaagcgcgaattcggcgcggaggcgcaagccaagggcatcggccccacggcgctttcggcgctgatgcagacgaactatgccagcgccacgatcgcggccgaccgcggccagcgaagtttttcgctgacgctcgaccagttccttgccaagcgcggcgccgccaccatcgttgccaagggacggcagctcaagcagtcgcaggctgccttgttcgcctcgatccagcagcgctatggcgtcccgcccggacccttgctcgcgatatggggcatggagaccggtttcggcagccagcgcggcaaccagaacatgctgtcgtcgattgcgacccttgcctatgattgccggcggcccgaattcttcaccgaccagctttatgccgccctgaagctgatcgaccgcggcacgctatcggcatcgacccgcggctcgatgcatggtgaggtcggccagacccaattcatgcccaagagcatcctggcctacggcaccggcaatctcgaggttgctgccaatgcgctgaactcgacggcgaatttcctcaaggcccatggctggaaagcaggagctggctaccagccgggcgagccgaatttcgccgcgatcgaggcctggaatgcggccggcgtgtatcagaaggcgatcgcgctgatgggccggcagatcgacgagggcggcggggcggccgcgttgcgctaggccgctcagcaaggcgtgatgcgtcagcaagagaaagttgttgccatcaggaaccgacggcatgaggtttgcttgatcaagttcagggctgggcatgaggagactcaacatggctacccagatcgtgatggaccagacaggcgacacgcgccacgagtttgatcccggcaatgccgaagcgctggcgcgcgccgaacgccgctttcgtgagctgaccggagccggcttcaccgccgctcttcgaaccgggcccggcgaagtcacgcggatccgatcgttcgatccgaccgcccaggaaacgctgttctatccccgcctggtcggcggttgatctgagccgcacatgatcctggcagtctggctccgcgcgccggcgcgtgcacgcctgcacgcgctgcgtgagctctatcgccgcttcttcggcgagaacacgcctgacgcccgcggccggcggctgcttgctgaatggctgtcgccgaagcagcgcgctcaattcgaggagcaccggtatttcgacgtcgttgggtgcgacaccggcagaacctatcgcatccactacggcacagccgccaatgtccacgagatcgactgcgacgggcgtccgacgacggggtggtgcttcgtcccatcaggcttcctggtgcccggcgacgtcatgcttgcgcagaagattgcgctcgagactgacgagaggaatgccttggcgctcgcgaaccggtttccgccggcgacgcactcggagcacttttaccggcggcctttttaggcccggtcagtgggtcgagtgggtcgtgcggtaggcatccagcgcatgggccgcgaagacaccagcgctgcaaagggcgagcagggctgaaatcagctcgatcatagctcgtcctcccgtagcggctgggcaacgaggctctggcagcacgaatattcgtagatcaggtcgaggatgaattgcatggtggccgtccctgtacttgttttgacaaccacttaaccggccatctgtttcaggcgtgtttcgtcgcatcggaaaaggggtttcgcgcggaactctgcgctggctcgggcgctgcggcctcgctatatccgcaacaattgaggccatgtgagctgccacatcgggagcggtgcatcatattgcgaggcaagatcatgacgcaggtcgaatggttcgatgatctcaccgtcggaatgcgcttcaagtcccccgaatgtctcgtcacagaggctgacatcaagcgcttcgcgatagagttcgatccccaacccatgcatctcgatcacgaggccgccaaggcgacgctgttcaaggggcttgccgcctcgggatggcacaccgctgcgatcgcgatgaacctcgcaattcaggcccggccgttcggcccgcacccgctgatcggtgccggtgtggacggactgcgctggacgatgccggtacggccgaatgaccgcctgcatctggtcggcgaggtcatgagcctgacgccgtccaagtcgaagccgcagggcatcgcgctggtgaaatggaccatgttcaaccagaacggcgaggaggtttacaccttcacgccgatcgcgatcgtgccgcggcgagactctcgctgaatcattcggcaaggccctggaccggcgccgcgctggtctggctcccatgatgcgtcagcggcttcatgccggtgacggtccgcagcagcacatagaacaccggcgtcaggaacaggccgaacacggtcacgccgatcatgccggagaacacggcgacgcccattgcgcgccgcatttccgagccggcgccggtcgagagcaccagcggcaacacgcccataatgaaggccatcgacgtcatcaggatcggccgcaaccgcaagcgactcgcctcgatggcggcccggatcggcgtgcgcccggcgaattcgagctcgcgcgcgaattcgacgatcaggattgcattcttggccgagaggccgaccaacacgatcaggccgatctgggtgaagacgttgttgtcgcccttggagatccagacgccgaacattgcagcgagcaagcccatcggcacgatcatgatgatcgacagcggcagggtcaggctctcatagagcgcggccagcaccaggaataccagcaggattgccagcgggaacacccagatgccggaattgccggcaatgaactcctgataggtgaggtcggtccattcgaaggcaaagcccggcggcagcacctccgccgcgatccgcgttgccgcctcctgcgcctggccggatgagaagccgggcgcggccgccgcattgatgtcggaggacaggaagccgttgtagcggatcgcgcgctccgggcccgcgctctggcggatcgtgagcagcgccgacaacggcaccatgtcgccggaggacgagcgcaccttcaactgcctgatgtcgtcggcccgagcgcggaacggggcgtcggcctggacgcggacggaataggtgcggccaaatttgttgaagtcgttgacgtaataggagccgaggtaaatctgcagcgtgttgaacacctcggtgaccgggacacccagctgcagcgccttggtgcggtcgatgtcggcgaacagctgcggcacgttgacctggaagctcgagaacacgccggcgatctccggcgccttctgcatcgccgccatgaaggcgttcgtcgcctcgttcagggcgtcgtagccgagcccggcacggtcctcgatctgcagcttgaagccgccgatcgtgccgaggccattgaccggcggcggcgggaacatggcgatgaaggcttcctggatgccggcatatttcttgttcaactcggctgcgatggcggggccgctgagcgaggggtccttgcgttcgtcgaagggcttcagcgtcgagaacacgatgccggcattggacgagttggtgaagccggagatcgacaggccggggaaggcgaccgagctttcgacgccgggctgggtcagcgcgatgtcgctcatcttgcggatcacctcttcgctgcggtcgagcgaggcgccatcgggcaggcgggcgaagccgaccaggtattgcttgtcctggcccggcacgaagccgcccggcacctgctggaacagaaacgcagtgagtccgaccagcaccacatagaggcccatcacggcggacttgcgcgagattaccttgccgacgctgccgctgtaattctccgaagaccgtgtgaaggctttgttgaagccccggaagaaccagccgaggctcttttccatgatgagcgtcagccggtccttcggatcgttgtggcccttcagcagcagtgccgacagggccggcgacagggtcagtgaattgatcgccgaaatcacggtcgaaatcgcgatcgtcagtgcgaactgcttgtaaaactgcccggtgagaccggaaatgaaggcgagcggcacgaacaccgcgatcagcaccatggcgattgcgatgatcgggcccgagacctcacgcatggcctggtaggtcgcatcgcgcggcgacaggccggactcgatgttgcgctcgacgttctcgaccacgacgatggcgtcatcgaccacgatgccgatcgcgagcaccaggccgaacaagctgagtgcgttgatggagaagccgaacacgtgcatcaccgcgaacgtgccgacgatcgaaacgggcacggcgagcagcggaatgatcgaagcgcgccaggtctgcaggaacaggatcacgacgagcaccaccagggcgatcgcctccagcagcgtgtggatgaccgcctcgatcgacgagcgcacgaattgggtgggatcgtagacgatctggaacgacacgccctccggcatgttcttcttgatctcggccatggtggcgcgaacgttgtccgaaatctgcagcgcgttggagccgggcgcctggaagatcggaagcgccaccgcctgcttgttgtcgagcagcgaacgcaggccgtattcggacgcccccagctcgatgcgcgcgacgtcgcgcaggcgcacgacttcgccgcgcgtgcccgtcttgaccacgatgtcgccgaactgctcctcgttcgagagccggccttcggcgttgacggagagctgcaggtcgatccccttgacgttcggggaggagccgaccacgccggcggcggcctcgacgttctgtgcctggatcgccctcacgatatcgctggcggtcaggccgtgctcggcggccttctgcggatcgacccatacccgcatcgaataatcgcccgcgccatagatctgcacgtcgccgacgccgtcgatccgcgccagccggtccttgacgttgagcacggcgtaattccgcagatacgtcatgtcgtagcggccgttcggcgacaggagatgcacgaccatggtgaggtcgggcgacgacttcttggtgatgatgccgagctgtcgcaccacggctggcaggcgcggctcggcctgctgcacgcggttctgcaccaattgggtcgccttgtcgggatcggtgccgaggcggaacgtcaccgtcagcgtcatcgcgccgtcggtggtcgcctggctcgacatgtacagcatgttctcgacgccgttgatctgctcctcgatcggcgttgccaccgtctcggcgatgaccttggggttggccccgggataggtcgcgcgcacgacgaccgagggcggcaccacgtcgggatattccgagatcggcatcgcgaacagcgagatgagccccgccaggaaaatcaggacggagagaacgcccgcaaaaatcgggcgatcgatgaagaattttgagagattcatggcttcgcccctgggcaatattctgcgtgtcgacgccaactcctcgtcattccgggccgcgcgcagcgcgaacccggaatccagaggtgaacggtcggtgtctcgtaagttcgagatcccgggtgcgcgctacgcgcgaccggggatgacggaaagcactagcgctgcaccacgtcctgcttgctgtggttggatgcctgttgcccccgtgcgcccatggctgccacctccgtcttgaggagggctcccgggcgcacacgctgcaggccgttgacgacgatacgctcgccggacttcaggcccgacgtgacgatgcgaagcccgtcgacggagccgccgagggtgactagccggtagacggcgcgattgtcgtcgccgaccgccatcacgaacttcttgtcctggtcggtgccgatcgcgcgctcgtcgatcatcaccagcgcctgttgcttcggctggcccatgcgcacgcgggcgaactggccgggaatgagccgtccgtcgtcgttgcggaatacggcgcggacacggatggtgccgctctggccattgacctgattgtcgatcagctggatgtggcccttcgcggacagaccgcccgaggtcgtcatctcgaccgggatctggtcgagcttgccgcgtcggcccgacgcatccgcaatcgaattcagcgcgcgcagcacgacctcttcatctgcgtcgaacgaagcgtagatcggattgaccgagaccagcgacgtcagcaccggcgacgccgtgccggcggcgacgagattgccgacggtgacctcgatcttgccgacccggccgtccacgggcgcgcgcacttcagtgtagtcgagattgagctttgctgtctgcagcgtcgcctcggccgccttcacattggcgatcgcttcgcggttggcgttttcgcgctggtcgtagtcgcgccgcgtcaccacggcgttgccgacgagctgcgcgccgcgctcgagctcgctctgtgtgaacacgacgcgcgctttcgcggcttcgagctgggccgcagccttgtcgacctcggccgcgtagggggcgggatcaatcttgaacagcacgtcgccggccttcaccagcgcgccctcggtgaagttcgccgacatgatcgcgcccgcaacgcgggggcggagctcgacgcgctggatcgcctcaagccggccggagaagtcgtcccacagcacggtccggcggggctcgatcgtcgcgacggtaacggagacggcttgttcggcggcggcggccggcgcggtcgcttgcgccgcatgaaaatagcggccggtcgcaattgagccggccgcggcgagggcacccacgatggcaacgcctgccaaaaggcggcggaaacggccggtgcgggaggtatgttgggaggggggcatttgcgcgctccagatatgtagtgttcactacagatgtggagctggataccgcagtgcaagatacttatgtaccgctcactaagaaaattgtagccccgtaccgcaataaatggaagatcttaggaaagtagaattagaacaaacggttaggattcggcgttggcccgggcagaacgcgattccgaggagacagcacatgggcatgggacgcccccgcgaattcgacgccgaaaaggcgttggatcaggcgatggaagtgttttggcgccatggctatgagggcgcgacgattgcccagctgacagaggccatgggtatcaacccgcccagtctctacgcctgcttcggcaacaaggaaggcctgctgaaggccgcgctcgaccgctacacgaagttgcgcaacatctggatggatgaggtggtggcagcaccaaccgcccgcgcggtggccgagcggatgctgatgggcatcgccgagaagcagactgatcccgccaatccgcccggctgtctgctcgtgcagggcggcgtggcctgcggcaccggttcggagaacgtgccgttcgagcttgccgcccgccgcgcccagaacgaagagcaactgcgcgagcgcttcattcgcgccaaggccgaaggcgatctcaaaccgagttgcgatcccgctgcgctcgcgcgctacgtctccgcggtctccgtcggcatgggcgtgatggcgtcctcgggcgcggatcgcgaagcgctgcggcaggtcgcgagcgtggcagtgcaggccgtggaggcgcagtcggagcgcgcccgataacgttcgagctgttctgcccgacgtgtcaatccagcatgcgggccccgccatatcgaacgaaattcctcaatcatttgtactgtgcatggggttgttttcgcgttttcatcggagcaaccccggggattccgacggtgacgtttgacctgacgtttcttgggacatcggcaagcgttccttcggcggagcgcaaccatccggcgcttctcgtggaggccgcaggcaagcgcgtcctgatcgattgcggcgagggcacgcagcgtcagctgctgcgcagcggtgccggctttcgacgtctcgaccgcatcctgctgacgcatgctcatctcgatcacgtgctcggcatccccggcctgttctcgacgctgggattgcggcaggcttccgacgcgatgaccatccatggcgggcaggggacgctcgacatcgtcatccgcatgctcgcgggactatggggcgtcggcagggcgccgatcgcggtccagttcgaagggctcgccgagggacaggtcctggcttgcggtgagtttaccatcgactgttttccggtccgccaccgcgacaccgacagtttcggctttgtcttccaaatcccgcctcgccgtcatcttcggcctgaccgcctcgtcgcgcttggcgtgcccgacggtcccttgcgcggcgagttggccgcgggccgaccggtcgtgctcggcggccgaacgatcgatccgggagacgtccagggcccgccgagcggcggcaggaagctcgtcgtgatcggcgacaccgagacaaccgaggggctgtcgcaatatgcggccaacgccgacatgctggttatcgaggcaacgttcctcgaacgcgacgcgtccaccgcgcgaaattacggccatctcaccgcggccgaagcagcttcctttgcggccgcgaacaacatcggacagctcgtgctgacgcatatgtccggacgctaccaggacgaggagattctcgccgaggcggcaaagatcttcccgaacacccggatcgccgcagatttcgatcgcgtcgtcgtctagtccgtccgaagcgaggcaaacgtcggactggcgttcaggcgaccgggtcctggaaagtgcatctgacgccgatcggggcctcggcgtgttcctgccgtagcgccgggcgggacacaatcaccgtacgatctggatttgcgaacgtctcgcgcatctcgatcaggagtgcgttgtcggcgagcgtcatcatgcgccccgacccgaccgctccatccgcggctcgcgccacgcagtagctgaagtcgacggcaccatagtcgggaagcggaaacagggcgccgctttccgggtccgtcggccgctccatcacccattccgctgatgaaccgagcggttcgatctctccgcttggcggcggggcgagaaacgagcgaaactctccggtgcgctggttcttgatgaagtacagaatgtctccgctgacctggaccgccagacccgcgagaatcttgtgacccgtctcgatgagcaggttgtcgatcaccgtgatcgcttgtggcttcgcaggcgctgccgactcggtggtcgcctcgtcgggccgcgcgttgtgccaccaatcccaccaggcaaagtggttgggcttgcggtcgggccagtgaccggtgccgatttgaggcagggagacgttcggcagcgtgccattgcggccgtcgagccccacccagaccagcgactttggatcgtccgcgggcgtacccagggccgataccgatggccggcgcacgtgcgggacattccatgcccctgcagcgaacacgatctgctgcggccagggcgtggaaataagcgcacccgaccagttcagcatcgactgcagcgctcctcccagcgacgggggatggatgctggcgaacgtcggctgctttgcggcaaaaggcgccgaaacgagctcagtccagaactcgaacagctcgggctccgtgatgacatccggcttctgcggaatgccatagcgatcgagctcggcgggagacgctttgagcaggtcgaatccggcaggcacgacttcatagaggccgcaccgatcaatcgcggacattcttctctcccacggagatgccggcttccttcccttcatcgaagacgcccgtgtgctgccactcgtccctggcgttgtcgacgagcttcgtgaacttcggcagatatgtcctgtccaacagaatcctgtcgatgatggcgcctgccagtttcacgccggccacggtatccgaacgatagtggaggccggcgatctcgcgattgcgtgcgactctgtcggcgagggcgccgagcgactttccgatcgtggttctgcccgcggctcctggcgcgggggccggaaagccgagagacggcggaatgactttcgtcagcaacgccgcgaagacgtgagcctgagtggcgtgaccgcttgggaatgacgcatgtccgccgtgctggatcggcgacatgaggccggggacgacctgggttggacgcggacgattgaaatgagccttgtagtgcatcgtgatcaacgccgtaagcgcgtcggcgacgatcagcatgcgtgatgtcgccggatgcgtcgtcggcgtcgcggacaccagatgcaggaacttgctgatgaactcgtcggcctccgatacgatgtcgccgagggccgcagcgcgctcatgaacggccatgtttctcagggcgctgatatcgtcctcgattgcgcccgcccaaggagttgggccggcgccgagcagtgcaaacccgccgagccggtcgagccaatctgcccggctggcgagatcggacatcaccacccaggcataccagcgggtcgaccaaagcttcatgccgaagccgcccgcatcaaatctggcgccggcgacgtcgcgctcggttatgaacggacgatcgacgcgatcgctgaacatggcaccgcctgatccgcccgcgttgccgccgtagccgccatatcctccatagcctccgtagccaccatatccgccatagccgccgtaaccgccatatcctccgtatccgcctgccatgtgcgcctcctctgtttaggatttgtcggtatcgctctggctgtttccgtgccgaagtgccgctgccaggcgcgagagagctgcttcgacgcgcgccagggtcggcttcggccatggcgatgttgagatccacttcagatcgagctcaccttcgggcatgagcggccgtgcgaaggtttgtgcctcgtggaggcgtccgctctccaccagcgcagcaacgaggacgcgcaggttcacctgattgttaggtaattgcgtcgcgacacgccgcgcatgttcgacggcagatgcgaggtcctgcatggcaaagtaggcctgagccaagatcatttcggcgaaccatgcgtgccggtctctcggcgacagacgcagattgacggtggcatcgcggagcgcgtcgtcgtagttctcgcagcggacatgcaccgcggcccggtaagcgaatgcgagcgcaaggttcggcgtgatctcgatcgcgcggtcgagctgcccgagggccccgacgtggtcatgcttgcactgcgatagcgtgtaaccgccgacggcgttggcgagcgggtcttcggagttgcgctcaagcgctctttcggcgagagcacgcgccgtgtcgcgctcgttcaatgcattcgcagaccacccgcgcgcgacgcgctgcatgtgccagatggcgctgtaggaaagcggaggcgcccagttcgggctgaggacatgtgcccgttcgaaattggttcgcgccgtcacgaacgtcgtgtagtccgggctgaacatctgatcgtaaccgacaagtgccagctgatacgcgtcgagatcgtctggtctcttctgcatcgcgcgatgtagctcccggtcgcgaacttggggcgccagcgagcgtatgacctcgacggcgatgcgatcctgcaaatcgaagacgtcggctgcagtcccgctgaggcgatcgacgcggacaacctcgacggtttcggttgcgacgagctcggtcgagatccggatctggtcgccagcgcgctgaatgctgccatgaagcagatattgcgcattcagatcgcggccgattgcgcgcagatccggcgtctgcgagaccgggatcatcgtggaaccgcgcgaaatgacgaacagctcctttaagcccgacagagcctggacgacgctgtcgacgacgccgatcgtgaattgaggctcgagagcgggggtaagcgcgcgaaagggcagtacggcgatcgacggtcggctgacgtcggatccgttcgaggcgacagcgggggctgccatggagaacgggaccgggcgtgccacggcctcaggctgctgctgtcgcacgccggcaatcaggtcctgcgtgagcttgtgcggttcgatgtcgtaggcgtcttcgagctggcgccagaggcgcgcatagatcgcgagggcagcgccgatacttccagaggcgaggtgactcctgatgagaacacgaatagcccgctcgttctcggaatccagccggtgaatcgccttcgcggcagcttcagccgttggcgtcacgactgcgtcgctctcatcgggcagcagcctcgtcagcgcgtggatcagccgttcgtggatcagtgttcgcgtctccgcgagccattccgagaatgccggatcgacgctttccaggtcgtcaaggatgtcgtcggtcaggcgttcgcgtgcgagcagcagtggatggaccatgccgcgctcggcatccgagatgatctcgacgagatcacatgtcacgtgctcgacatcgagtgccacgtgaatctggtctgcgtggaaatgtgagcagcccagcgctcttagctcgcgctgaatctggctcaatgattggcgcagcgacccctttgcgagcacgtcgtccttctcgctccagagcagtccgaccaacttgctccttggcagctggcgtgaggaggagaggatcatatagccgagaagcgcttgtgccttccggccgagcccgacctcttgcccgtccacggacgctgaaaatgctccgatgatcttgagggtcagtcggttggccccgcccttgccaaccgccttgtcgccgttgactcccgacatctcgtcccatccctggtcgatcgtgtcgaggacagtgtaggagggccgggtgcgggtggccagacttggcagaacgcaaaaggcaggttcgcttggtctgcgaagccaatgaccggtgagttcgggaatgcagcccgccggggctgctgcaatgccagaatcgtacatcttcggtcgagagatggccaagggttgcggaatgatcgaaatgcgacttgcgagcacgaaatgaaatggctcctgccttcgagccgatgggcgtgaatccagcgtgaatcgcggcttggccgtcgcggcgcgggcaactcacgcgcgagttcgatgggcttgctcgcttcaccgaccgccttcaccgattgccgctggcggcggaagccgggcggcatcgccggtattcgtgcggcaagtcccgggcgggccaccccggcgttccgtgcgcgcaccgtattcacgggccattcacggccaattcgcatcgtccgcctatgtttcgttcgtgaccgaagggtcgcgcaacttggcaagggagaggcgtatcatgactgtcctgctgagaaacaccttcagggcctggatcgattgcgtccccggcgcaccgcccaagctgatcatgatcggcgacgtgcgggtgccggccaacggctggcaagcccggctgaccaggcgctcaccgcaggggatcaatccaaagatcctgatcctcgacgtaaatgcccaggagccgagcggtgaagcccggcaggagatcaccacgatcccgcttcgttacgaggaaagtccgccgcaggacgaatacggccaggtgatgatcgcgaacggcaaaggcgagatcgtcgtccacgtcggccgcacgcattgactgcgctctggcgcgatggtcccacaggctggtcgcgctaaagcgacggtccacaacgcgggaagatgcgttcgctcggtcgtgaacgcagcgagaacacgcgacgatgttcacagaagggctggaccgcgaaggtcggcgcggctatatgagcggcctgcgagccgctgatttgccaaagctttcagccagcctcgcaatcttccgaagaagctgagagatttcaagcgcttcggtggggaatggtgtaacggtagcacaacagactctgactctgtttgtcttggttcgaatccaggttccccagccagttcccggcacgcatccgatataccgttccagacccggtgcggatcgacaggtccacagccgcgcggcggtttgtctcatccaacatcgcatttccgagtcggatcgcggcgccctgtatcgtccttgggccgtaattcaaggagatcccaatgccctatgtcgatggcttcattctcgccgttccgaaggacaagatcgaggcctacaaggcgctggcgaccaccgcctgcgcgctctggatggagcacggcgcgctcgattatgtcgaatgcatcggtgacgacgttccctatggtgagctcacctcgtttccgcgcgcggtgatggcgaaagacgacgaggtcgtggtgttcgcctggatcgtctatcgcgatagggagagccgcgacgccatcaacaagaaggtgatggaggaccctcggatgaagttcgagggcatgcctttcgacggcaagcgcatgatctatggcggcttcacgacgctgctccgggcgaacgacgttgttggctgacagccattgtcgctgccacggcgcggcgcggagaccggatggaacgcgtgcgaaaatacgactgcgccgcgccgccgcctttacttgatcttgtcgtaagccgccgcgaagtcgacgagcggcatcgggatcgcgatcgtctccttggccatgttctggaaggagaccttgagctgcttgccggaccgcaaggcggcgagcaggtcgggcgcgaccggcgtcgaggcgtagcagccgcggttttcgcaggtctggatctggaggtcgaatgtcttgccttcgtcgacctgcagcttggcgccgaccggaaggttgaggccgagcggcaattgcaggagcgcgatcggcgtgcgcgtgtccggcgcaatgcggatgttgatcaggacgacggtctggccggtcttggtcaggaccgcgttctgctccatcgcgcattcgagcggcgcctcgcggctcgcactggtgcagcggacgatccaaccaggctgtccgggagtgccctccgcctgtgcttgcgtcggggcaggtgcgggctgcgcgaccggaggagcggcgttcttctttgcaccctgctgggcatgtgcggcgcccgccgacaacagggcggcggcgagggcgacaaatttgaactgaatgggcatggcggaccacgttggcgagaaaccgggcgcctcgctgtagcgtcgcggcatgcgcggcgcaagtttactcggcggcttccttgacgctgccgtgctcgagggtctcgtcgccgtcgcccgagcggccccaggtcgagaaccagttattgagcttgtcgagatagagatagacgacgggcgtcgtgaacagcgtcagcgcctggctgacgatcaggccgccgaccatggcatagcccagcggctgacggatctcggcgccggtgccgtggccgagcatcaagggcacgccgcccagaagcgcggccatcgtcgtcatcatgatcgggcggaaacgcagcagcgcggcctggcggatcgattcctccggcgtcttgtgctcgtcgcgttctgcggcaatcgcaaagtcgaccatcatgatgccgttcttcttcacgatgccgatcagcaggatgatgccgatcagcgcgatcaggctgaagtcaaagcccgccgccatcaggatcgcgagcgcaccgacgccggctgagggcagtgtcgagagaatcgtgatcggatggatgtagctctcgtagagaatgccgaggatcagatagaccacgacgagcgcggcgaggatcaacaggggcacggtgccgagcgactgctggaacgcctgagcggtaccctggaagctcgagttcagcgtcggcggcgcgccgagctcggccatcgcgcgctgcacggcctcggttgcctggccgagcgcaacgccctgggcgagattgaagctgatcgtaatcgacgggaactggccctggtggctgatcgagagcgggcggaccgggtctgtggtccaggtcgcgaaggtggacagtggcacctgatcgcccgtcagcggcgatttcagatacaacttgttcagcgtctcgagatcaccctgcagttccgggaggacctccaggatcaccttgtaggtgttgagctgggtgaaatactgcgtgacctgccgctgtccgaaggcgtcatagagcgtgtcgtcaatcaactggggctgaatgccgtagcgggcggcggtgtcgcggttgatcttgagctggaccgtcgtgccctgcgtctgctggtcgctggcgacatcgcgcaactcgggcagcgtttgcatcttggcgaggatcttcggcgcccactcgttgagctcagcgagatccgcatcctgcaaggtgaactcgaactgcgtgcgcgttggtcggccgccgaggcggacgtcctgggacgcctgcatgtagaggcgggcgccctcgaccttgtcgaactgcggacgaagccgcgcgatgatctgttgtgccgaggcctcgcgctcgttgcgtggcttcagggtgatatacagggcgccgttgttgccggcgcggccactgccgccgatcacgctggcaaccgccgcaacatcgggatcggacaggacgatctggccgagcgcctcctgcttcctctgcatctccttgaacgaaatgtcctgcgaggcctcggaggccgcggtgatcaatccattatcctgctgcgggaagaagcccttggggatcaggacgaagagatagatcgacagcgcgagtgtcgcaaagaagacggcaagcgtggtgcgcctccagctcagcgcgatgtcaagcacgtaagcgtaaccgcgcaacagcgcctcgaacccgcgttcgctccactggaagatccggccgtgcttgacttcgccatgcgcgcgcaggaagcgagaagccatcatgggggttagcgtgagggagacgaacatcgacacgaatatcgtcatcgccagcacgaccgcaaattctcggaacagtcgcccgatgatgccgcccatcaagagcagcgggatcagcaccgcaaccagcgagatgctgatggagacgatcgtgaagccgatttccttcgcgccccggtaggctgcggccatgggcgattcgccctgctcgacgtagcgcgatatgttttcgagcatgacgatggcgtcgtcgacgacaaacccgaccgcgattgtgagggccataagcgaaagattgtcgagcgtgtagcccgcaacccacatcatggcgcaagcgccgagcagggcgagcggcacggtcactgccgggatcaccgtcgcccagaaactgcgcaagaagatgaagatcaccatcaccacgaggaagacggtgagcagcagagtgaactgcacgtcatctaccgaagcgcggatcgtttgcgtacgatcgctcatcaattcgaccttgatggcgctcggaattgcggcgaccaggcgcggcagcgttgccttgatgcggtcgacagtctcgatgacgttggcgcctggctgcttgaacacgacgaggaatacgccgcgcttcccgttggcccaggcggcctgctttgcgtcctcaggacctctgatcgcctgcccgatgtcccggatcctcaatggtccgccgttgcggtaggcgacaatgacgtcgttccactccttggcgtccgtcaactggtcattggcgtagatcgtgtaagcgcgccgctccccgtcgatgttgcccttcggactgtcgactgtggtgatcgcgatctgactgcgcacgtcctccagcgacaggcccttggcgacgagcttggccggatcgatttggatgcggatcgccggcttctgctgaccgccgatgaagacctgtgcgacgccagaaatctgactgatctgctgagcaagctgggtatcggcggtgtcgctgacagtggtgagcgggagcgtgtccgacgtcgcggacaggatcagaatcggcgcgtccgccgggttgaccttgcggtaggtcgggggcgagggcaggttcttcggcaactggccgccagcggcgttgattgcactctgcacgtcgttggcagcagcgtcgatgctacggttgaggtcgaactggatggtgatcgacgcggttcccagatagctcgtcgaggtcatttgcgcgatgccgggaatctgcgcgaattgccgttcgagcggctgcgccacggacgaagccatcgtctcggggctgccgccgggcaggttggcggtgacctggatggtcggaaagtccacttgcggcagcggtgcgaccggtagcagcggataggcgacaaggccaacgaacagaatgccggccatcagcagcgaggtgccgatgggatagcggatgaaaggtgccgaaatcccgccgcccatcattcctgtcgtaccttgctctcggcccgatccgagcttgccaccgtcgtcgagacgagacttccgggttggaccttgaactgaccgccgacgatgacctgctggcccggactcaagccttcctcgatgacagactggccagccatggcatagctgaccttgatcttgtgcagttcggccttgttgtcctgattgacgctgtacgcgtagaggccgttggtggagcgctggaccgcttcatccggaaccacggtcgcatccttcagcgttcgcaccagcaggcgcgtcgagaccgactggccgggccacaatacgtggtccttattgtcgaacaccgccttgagccggatcgtcccgctggttgtgtcgacctgattgttgatgaccgcaagcttaccctcggcgagcatattcttaccgtccgtggtgaaggcgatcaccttgagcgcgccggctttctggccttcgctgatataggggagctggtcttgcggcgccgtgaagatgaccgagatcggctcgacctgcgagatcgtgacgatgcccgtctgcgtcgaggcgttcacgatattgccgatgtcgacctgacgcaggccggcgataccggtgatcggtgccttgatctgagtgtaatcgagctgggtctgggcgttggcgattgcggcttcgtcggcggcgatttgagccgtgagctgggcgactgtcgagcgctgggtatccacgcgctgtgcggtcgcaaactcgccgagcctcatggctcgctgcagctcgagattggcgttggcgaggctagcctcgtcctgtgccttcttggccttcgcctggtcaagcgcggcttgatagggacgaggatcgatcgagaccagaagctcaccctgcttgacgatctggccctccttgaactcgagcttgatgatctggccgtcgacccggctgcggacctggacggtgttgaagccctgaaccgtgcccagaccggtcaggtagactgggaagtcggtcttctgcaccgctgcgacgctgacggggacagcggacgggcgaggggcgcccttctccgcagcctgggtttttccagcctgggacgagccaaacttctgccaagcataataacccgcggaggccacggccgcgatgatcagaagccagaggatcggccgggactttttcatcgcgtctcgtgtcggctcgtgccctcagctatgaattaatggggcaatcgtggagttccatggtgatgtataatacacgccaagtttcagtgtaaacagcactatcgcttgagaaatcctaaacaattggaaagctttgcacccgttgggcagcgtctggcgcgtcggtgtgcagtggggcatttctccaggccacgagccggtcggcgcgccaagtttgcacagcgccgcagcggcgtactcggcggactactccacgctgagctatggttcggattacccagcaagaacggttctaagtcggataggggccgctgcggttgtcagggatttcagcatcgtccatatcggcgccgcgatgaatggagcgcaggatggacgagctgaacggcaagctgatcgcgtgccagattctgatcacggggttgatcgcgcgtgtcgcaaacgagcagcgcgatcccttgcgcttcctcaccgattttcgtgatgagatcaaagccgtcgtgaacggcgtccacatcgccggcatggacaacaccgatcgcgtgcgcgccgtcgcgcagaaaaccgtcgacgaattgttctcgctgatgaagccgccgagcagcgactgagagtgcaacgattggtttgcgttgcctctctagagcgaatccaatgttcgtttagaacgatttcaaactgcagattagaatcgttttgatctggattgattcaagggttctcgcgaacggctcgcattgacccgctattttgtggccgataccaacagcccatcgttcgttcgaagtgaatgagcgaacaggaatatggggcgtttggtaatggggcaggtggtcgcaccgaaatcgttgcgttcggtcgcagcattcgattcgttggatgagaggttcgtaggcgtttccggcaaaaaggtatcggcagtcgcgagcttgatcgcggtggcgtcggtttcaagcggcgcgcaggcgcagcaatcggacctgccgccggtgacggtcgatgctccggtcgagcgcccgcgtccgacggcctcgaggccctcgcctgagcagatccgtgcccgcaacgcgcttcgccgcgccgcgcagcgccagcaggcgcagcagacggctcccgccacgccctcgggcgcgcccgacggcaatccctatgccgatccggcggcgccctacaaggtcgaccacgtccaggcctcgggcaagtttcccgagaagatgctgaacacgcccaagagcatcaccgtgctcagcaaggaagtgctcgaggacaagaacgcgacgacgctgaaggagatcggacgctcgaccgccggcgtgacgctcggctcgggcgagggcggcaacgcgttcggcgatcgcttcttcatccgcggcttcgatgcacgcaatgacgtcttcatcgacggcatccgcgatcccgccgtgtccatccgcgagaacttcttcaccgagcagatcgagattctgcgcggaccggcatcttcctatgcgggccgcggcaccgccggcggcgccatcaacatcgtcaccaagcaggccggcgacgtcaatttcaagcgaatggacaccgagttcggcaccgatcagaccaagcgcgtcaccctggacgtgaaccaggtgatcgatcccaccttctcggtgcgcaccggcggcctgttccaggacgccaacgtcgccggacgcaactacgtcaccgacaatcgctggggcagcttcatctcgaccaagtacaccccgaccagcgacatcaagatcacgacgaactacgtccataccgatctcagcggttatcccgatttcggcgtgccttattacaagcagggcaacgttccggtgacctcggcgggcattccgcgcgagaactggtacggctttcttaatcgcgatttccagacggcgcggcaggatttcggcaccggaacgattgagtacaaggtcaacgaagccatcacgctgaccagcaaggtgcgcggcgagcactcgctgctcaactacatcggcacgctgccgcagaacccgaataccaccaatcccaatccgctgctctggacgaccacggcgagcgcgcagagccgctatcagaccgtggacgtatgggccaaccagaacgaggccacgttcaagctcgacaccggcggggtcaagcacaccgccgtgttcggcgtcgagtattcgaacgagaacgtctcaatcgaccgctacgcgggcttggcgtcggaactgtccggctccgctttcaccagcaacggcgctgtccagaacgtcaatctctattcaccccagtataccaacattcctttcggcacgccgtcgctgaccggaaatccgacgcgctatggcgtcaacaccaccagcgtctatgtcatggacactgcgaactggcaggacacaatcatcgtcaatggcggcgtgcgttacgacggctacagccagagttcgtccaccaacgcggcttatctgaagcagaatgccgatctggtgaattacaacgtcggtgccgtctacaagccgatgccgatcggcagcctttatgcggcctatgcgacctcggcgaatccgttcggatcggagcttgatgcgaccggtaccgactacggcggcgttccgcccaacacggccgtcctgctcgggcccgagcgcaacaaggcgatcgaactcggcaccaaatgggagctcgctgaccgccacctgctcgtgaccggtgcattgttccagaccaccaaggacaatgcgcgcgagaccgtcaacggcttgttgacgtcgggcgctgcctacaggatccagggcatcgacatcgaagccgagggcaagatcaccgatcgctggagcatctttggcggcctggtgctgatgcagtccaaggtcacgcagagcggcgtcgcttcgaatataggcttgcaacttgccaacatcgctcaccagtcgttcagcatgctgaccaagtacaagttcgacggggggtgggagctcggcgggcaggcggtctaccgctcaaaagtctatggcggcacgttcgcggccaacaccaacgagctgccgagctactggcgcttcgacgcgttcgtcgagaagaagatcgaccagaactggacgatgaagttctacgcgcagaacctcaccaacaagctctattacgactcgttctatcgcagcaacgtgccgttcgtggcggttgcgccgggacgggcattctacgtcgtaacgacagcgaagttctgatcatgttgacctgcctacctggcgttctcagcaaggatgatgtggcggatttccgccgcatcatggacgccagcgaatgggaggacggccgctccaccgccggcgcgcagtcggcgatggtcaagcgcaacgagcaattgcctgcggacggcgaggtcgcgcgcaagctgggcaaccgcatcatctcggcactgacctcgaacccgcgcttcattgcggcggcgatcccgctccagatctttccgccgctgttcaaccgctatgcggcgagtagcggccatcatttcggcctgcacgtcgacaatgctattcgcggcgaccgtctgaccggccttcgcatccgcacagacctgtcggttacgctgttcctcgccgagccggaagagtacgacggtggcgaacttgtgatcgaggacacttacggctcgcacgaggtcaagttgccagccggtgactgcgtgctctatccctcgaccagccttcatctcgtcactcccgtgacgaggggaacgcgggttgcgtctttcttctggctgcagagcatgatacgggacgatcaagcccggagcatgatcttcgacctcgacaccgcgatacaggcgctggtggaacggctcgggcgtgacgatcccgaaacggtcaaattgacgggtatctatcacaacctcattcgctactgggccgaagtatgaagaccatgacctcaagagcaagcctggccgccgctgcgatgctggcggtcgcctggctcgcatcccctgtttctgcccagacacagaccccgccgtcgccggcgacgcagcaaacggctgcgccgcctgcggccagcccggctccggcagctgccccctcggcagttgcccgctcggaaactgcgcccgcggcctcggccgcaccgcccgtggtcacaacgccggcgccggcaaagtccgagtccgcggccggcgttgcgcctgccatgaaggaattgtcgccctggatgatgttcatgtcggcggacatcatcgtgaaggcggtgatgatcgggctcgccttcgcgtcgctcatgacctggaccgtcttcatcgcaaagtcgatcgagctgtcggtcgcttccaccaaacttcgttcggccctgaagaagattggggacgcgcgctccctctccgaagcgcagatggcgctcggtgccaaggagggcatcctgccgtccttcctggcggcggccctgcgcgaggcgcggatgtcggccggcctgtccagcgatgccggcatcaaggagcgcgctgcatccagcttttccgagatcgtgcgtgcggaacagcgccgcatccggatcggcatgggcgtgctcgccacgatcggctccacgtcgcccttcgtcggcctcttcggcacggtctggggcatcatgaacagcttcatcggcatctcgaagtcgcagaccacgaaccttgccgtcgtcgcgcccggcatcgccgaggcgctgctcgccaccgcgatcggcctcgtcgctgcgattcccgcagtcatcatctacaatcacttttcgcgcgtgacgaagggctatctcgagctcgtcagccgcgcctcgggcgcggcggggcggctgctctcgcgcgatctcgaccgcagccacggcagtgtgcattcgcgcgcggcggagtgagccatgggtgtttcgctcgcagacaacgacggcgaagacgacgatttctcggaaacgcatgacatcaatgtcacgccgttcatcgacgtcatgctggtgctgctgatcattttcatggtcgcagcgccgctctcgaccgtcgacctgccgatcgatctgccgacatcgagcgcgacgccgcagaagaagccggacaagccgacttatctcagcatcaagcccgatctgacgctcgcgatcggagagaacccggttcaccgggccgagttgatagggacgctcgacggcctgtcagacatgagcaaggacaagtatgtcttcctgcgcgccgatcgttcggtgccgtatggcgagttgatgggagtcatggagctcttgcgctcgggcggctatacgcgggtgaagctggtcgcgctggaaggtgctccaggggcgcccgcggcaggccccgctcagccttaagggccagtcatgtcggacgaactcagaccatcccggaagctatggatcttggcggccatggcggcgctcgcgctgcatctgggtggggcagcgctcgcgctggctcacttgcgcgtcgatgacgacggcgacggccttggtgcggtcggcgccgagttcgccgtggagatggcgtcgccaaaggcgcccgaaaccgaccttccacccgggccagacagcgaggccatgcaggagcagcaggcgcttcccgagcagaaggccgagaccaaggaaacggagcttccgaaggatcaggcacaggaggtcgaggatcccgaccgcgtcgtgaccgagaacgacgcgaagaagccgagcgaagacgatccgaagattcaggcggtcgagactccggccgctgaagcgtcgccgaaatcggtggcgaccgctcgtcagacgctggaggaggacgcgcgcgaggccgagaaggcgatggcgcctgtcatcggtatcggcaaggacatcctgaagctgacggccgactggaaccgcaagatcagcgcgcatctcacgctgcacaaggtcaatcctgaaggcaaggtgcccaacaaccagaaggtcaaggtgagcttcgccatcaaccggaagggcaacgtgctttcagtggatgtcgtggaatcgtcgggggacgcggcctacgatgcggcagcgatatcgatcgtccgcaagtcggaccccattccgcagccgcctgccggactgaccgacgaccggttcgaacgtaccgtcgacatcatcttcaccccgccggacgcgaagaagaaaaggaggactcagcgccagtagagccgaattccgacgtagaccaccaccagacaggcgaagatcagcgccaccggaaggggccgtttctgggggccggcgaatgccgatgctgcgaaggaggcggacttcttctgcttcggcgccgggcggcggaatgcggtaacgttgtccgccgccgtttcgggtgggcgtgggcggacgtccggtggggttcctgcgccgcccatttcggcataataggccttgtagatcgctccgatggtggcctcggtggcttcgccctcgctcatttgcgccagcaggttcttgtagctggcgaggaactcctgggcctccggcggcagtgcggacgacccgttgagcttcgccatcatcttccaggtggcaaaatcggcacgggcgcgggtgtcggcgcgtcgcgcgatgagcatatcggcagctttgaccaagtcggcctctggcccttcggctggtgttcgggtgtcgctgttcaactacgcgttgccggtcaggaagagaacagcctgaatcacataaccggtcaacgtccgcagtattgcggaaataacatcaagatttagaccgaactgggaacctgcaagcggcagcaggatcaacaggctgatcaggattagcattccgaacggctcgagccgggccagcggcacggcgagggggcggggcagtagcccgaccgcgacccgcccgccatcgagcggtgggatcggcatcatgttgaagacggccagcaccgcgttgatgatgagcgcattcttgaggttgtcggcaacccatttcgccgcgctcgcgggcaccaggggcaaggcatggaaggcgagagcggtggcgagcgccaacaggatgttggtcgccggcccggcgagcgccacccagaccatgtccagccttggattgttcagcttacggaagttcaccggcaccggcttggcgtagccgaacaggaacggtgaatgcgcgaacagcagcatggccggcaggatcacggtgccgaacgggtcgatatgcttgatcgggttgaagctgacgcggccgagctgcgaggccgtgttgtcgcccagccggtccgcgacgaaggcgtgcgcggcctcgtggaaggtgatggcgagcacgagcggaagaacccataccgacaagtcataaaaggatatattcacagctcatccgttccggttcggcgcgcgcgctttgcaaagcaggccgtatagggccgcaaccctttacgatctaccttatatggcgccgaattccgaaattgcccgttgcaaatggtccgccagcagtgcggccggtcgcgacagattacgcgcgcgatggaggcggatgtccgcggtcggcagcggcggcaggctgtcgcgcaggacgcgcaggcgaggaggcagggtgcccaccttcacgaccgtgattgcgaggccctgtgccgcgatcgctaccaccgccgcaagtgtccggctgacgaaggcaaggcgccacggccgggcggccgcatcgagggcctcaatagcccattgccggaacaggcagcccggcggatagagcgcgacgggcaggatgtcgtgcggtgcggcgaccgggtatgacgcgcctgcggcccagaccggccgctcgcgccgcagcagttcgccgtcgccgtgtccttccggatgcatggcaatgacgagatcataagcttcgccgagccgggccggcatcgtggcggttagccggtatctatctcgacccggatctccggatagcttctggcaaagtacgcaagcaaaggtggaatgacgattgtaccgtagtcgtccattgccccgaggcggacgacggcttcgcgcctgcgcgggcggagcgcatcgactgcctctgcattgaggtcgagaagccgcttggcatagacaagcagctcctgacccgctgcgctcagtgccacgcccgacctcgtgcgatggaacagcctgacgtccagccggtcttcgagacgtttgatctggacactcaccgccgattgcgtgcggttgaggatcgtggcggcgcgcgtgaacgaccgatgctccgcaacggcgaggaaggccttcagaaggtcggggtcgaggtcggccgcggtcatgacgaaaacttatcctggaattacggaaattccattccccgtttcggcgcgcctcctatgctgtccgcaaagccgtcggggaggagtcgtggccgagatccttggcgtttttgctgcggtgttgtcgagcgcgctgggtgggacctccatcggtgccacgcgttatctcgtcgggagcatcgatccgctcgcgatcggctcgttccgcttcggcatcggcttcctcctgctgttgcctctcgcgctgctgcgcgccgatcactggcccaagcgagaggactgggccgccgccgtcggcctcggaattctattcttcgccctgtttccgatcctgttcaacgcctcgctgatcttcacgaccgccccgcgtggcgcgcttgcgttgtcgacgctttctttgttgtcgctcgtgatcggggccgctctcggcgccgaagccctgacctggcgcaagtcggtgggtgtcgtgatcgcgacgtttggcgttgcggtggcgcttctctccgatctgacttcggccccgtcgggagcctggcgcggagatctcctgatgacagcggctgcgctgtgcatggcgctctatggcatctggtcgaaaccgctgatccgccgctccagctcgatcgccttcacgaccatcagcatggcggcgggtgctgcctgcttgatcctgctctcctgcgtccgcggcagttttgccccggtcgcgaacttcggtgcgccgcaatggctggcggcgctctatctcggcggcttcggtgcggcgctgaccttccatctctgggccttcgctctggagcggacgacgccgacgcgcgtcgcgatctcagtgacggtcaatccgatcacggcatcgctggtcggagcctggctgctgaacgaaccgctgcgctggaatctcgcggcgggcatcgttgcggtctttgccgggatctggatatcgacgacgaccggacggcgcgatcggccgggaggcgcgtccgcctcacaccagacctgacgttatgtcgggatcgttcccggatattgcaccaatccgtcatcgaccttcacccaggtgagcttctcgctcacccagatgtgctcggtcggggcgaaagcattgcgatcatcgaaagtggcgagggcgacccccgccagcgttccgttgcgccgccatgcgaacaggcgcgtgccgcagtgcttgcagaacacgcggtcgatgttctcggaggaggcgtagcgtgcggtctcaccctcgacgctgagcgcgcgctgatcgaactgcgcgcgggcgaagtagggcgagcccatcgccttctggcagatgcggcaatgacagatgcggacgttgagcggctcgccttccgccttgaaccgcaccgcgccgcacaggcatccgccttcccggatcatgatgaccttaataggttgcgcgcccacccgaaatgtcgaacaccgcgccggtcgagaatgcgcagtcctcggatgcgagccaggcgaccatcgcggcgagctcttccacgagcacgaagcggcctttcgggatcttcgacagcatgaaatcgatgtgttgctgagtcatctggtcgaagattgcggtctttgccgccgccggcgtcaccgcattgacgagaatgtcgtgtgccgccagttccttgccgagcgatttcgtcagcgcgatcaggccggccttggaggccgaatagtgtgcggcgttggggttaccttccttgccggcgatcgaggcgatgttcacgatgcgcccgtatttctgcttgagcatcacgggcacgatcgccttgcttacgatgaacgggccgtcgaggttgatgcgcaacaccttgcgccattcctccaggtcggtctcccagaccggcttgttgacaccggcgatgccggcattgttgacgagaatgtcgatcttcccgaaggcggccagagttgcatcgcgggcctgatcgactgcctgggtgtcggtgacgtcgaccttgaagactttcgtctcgccaccgacttcgcttgccgtcttctccgccagcgtcgattcgaagtcccagatcgcgacctttgcgcccgaggcgacgaagcgctcggtgatggcgcggccaaagccctgcgcaccgccggtgacaatggcgacgcggccgtcgagatcgatcttgttcatgccgggtgcccctggggtcagagcatgtagccgccgtcgaccacgaggtcgacgccggtggtgaaggcgctctcgtcgctgccgagatagaccgccatggccgcgatctcctcggcggtgccgagccgccccatcttctggcgggagatgaacatctccttgccctgcggcccttgtgctgcggcgcggtcgagcatcgagggcgtctcgacggtgccgggacagatcgagttgcagcggatgcccttggtgatgaagtcgagcgcgaccgcacgcgtcagcagcgacaccgccgcttttgatgcgctgtagacgtagcgattggcgggcggcctcaaggccgcgcaggacgagatgttgacgatgctgccgccgccccccgcaagcatctccggcaggaacgccttgatggtccggtgcatcgacttgacattgaggtcgaacgagaagtcgaaatcctcttcggagcagtccaggatggtgccgtggtgcacgaagccggccgcgttgagcaggatgtcgatcctgccgacgcgcttggcgaacgcattgacctcggcggtgttgcggacgtcgagcttggcgacttcagtgatgccttccttggtcagggtcgcgatcccggcctcgttgatgtcggtggcgatgacggttgcgccctcgcgcgcgaacgcgatggcgcaggcgcgcccgattccagccgcagcagccgtgacgacggcgcgcttgcccttgaggcggtctgccattttgttgttctcctcaccctgaatctgatggctgtgtcgtcattgcgagcgaagcgaagcaatccannnnnnnnnngtggcttctagtgattatcccgcgccacgccaaacgtaccggcgacgttctgatagcgggtggcgagctccatgcaggcgccggtcgattgctggccgacggtgttgcggtagatctcctgccacggcgtctggttcggcgggtgcttgaagccgccactggccttgagctcggcatgccgcttcttcagctcctcgtccgagatcaggatgttggcactgcccttgttgagatcgatccgcaccgtgtcgccggtcttgaggatcgcgagaccgccattggcggcggcttccggcgaagcattgaggatcgagggcgagcccgaggtgccggactggcggccgtcaccgatgcagggcagggacaggatgccgcgtttgatcaatgctgccggcggctgcatgttcacgacctcggcgccgccggggtagccgatcggaccggtgccgcggatgaacagcacgcagtgctcgtcgatgtcgagcgcggggtcatcgatccgctcgtgatagtcctcaggtccttcgaacacgatggcgcggccttcgaaggcgttcgggtccttcggattgctgaggtagcggtcgcggaactccttggagattacgctggtcttcatgatcgcggaatcgaacagattgcccttcagcaccaggaagccggcgtccttcaccagcggcttgtcgtaggcccagatcacgtcgttatcaggcgcgggcgcattcctgcaattctcgccgatgccgcggccgttgaccgtgactgcatcctcgtggatccgcttgtgcttcatcagctcgcgcaccacggccggcacgccaccggcgcggtggaattcctcgccgagatagaagcctgccggctgcatgttgacgagcagcggcacgtcatggccgaccttctgccagtcctcgatcgaaagctcgacgccgatatggcgggccagcgcattgatgtggatcggcgcattggtcgagccgccgatcgcggaattgatcacgatgcaattctcgaacgccttgcgggtcaggatgtccgaaggcttcagatcctcccagaccatctcgacgatgcgcttgcccgtctcgtaggcgatctggccgcgctcgcgatagggtgcggggattgccgcacagccgggcagggagaagccgagcgcttcggcaagcccgttcatggtcgaggccgtgcccatcgtgttacaatggccgaccgagggcgccgaggaagccacgatctccatgaactcttcatagtcgatctcgccggcggcaagccgctcgcgcgacttccagacgatggtgccggagccggtacgctcgccggcatgccagccgttcagcatcggtccgcccgacagcacgatcgcgggcaggttcacggtggccgccgccatcatgcaggccggggtggtcttgtcgcagccggtggtcagcaccacgccgtcgagcggatagccgtagaggatttcgacgaggccgagataggcgaggtttcggtcgagcgccgcggtcgggcgcttgccggtctcctggatcggatgggtcgggaattccatcgcaatgccgccggcttcgcggatgccctcacggacgcgatgggcaagctcgatgtggtggcggttgcagggagagaggtcgttgccggtctgggcgatgccgatgatcggcttgccggactgcagctcggcgcgggtgaggccgtagttcaggtaacgctccatatagagcgccgtcatgcccggattgtgcgggttgttgaaccattcttgcgagcgaagatggcggcgggagccgttgctgccggcggcatgcccattggttggcttctttgtcattggtttctcctgcaatgcaaacgcaccggcgtccgtctcacggtagcggcatgtgcgatgcccaacggcgcgagcgatgatctgccgtcccgctggcggggtcgtttcctcataagtgcaatactagtcgtggctacttggtaacgctatcattttgttcgctgcgcccgcggcggaagtggccggcctgctgtccgcacgtcgtgctgacgagctttgccgctcgatcaccttgaagccgagatcgagcaccgcctgctccggccgccgcccttcgatggcgttgatcagnnnnnnnnnnggtgcggacgctggtgagagtggggacggcggaggccatgaattcgaggtcgttgaagccgacgatcgcgatctgctcggggacctcgatctcccggcgccggcattcgaacaggacgccgagcgcgaggtcgtcgttggcgcagaacaccgcgtctatgtcgggctcgcgcgccagaagatcggtgaacagcgcgccgccgagcgtcacggaggttggcgtcgccgtcgtgaccacgagacgctgatcgaacagtccggcgtccttcatcgccgagacatatccgtcgaggcgccgctgcactctgggatccatgcgtgcgccgacgaagccgatcttgcggtggccttgttcgaacaggtgcgctatcgcggcgcgggccgcatcgtagtgtgaaaagccgatcatcatgtcgaccggatccggaccgatctccatgatctgcacgatcgggcagtctgcggcctccagcatcgcgcgggactcggctgtctggtcgatgccagtgacgatcagcccggcgggtttctgcgccagaaacagacgcagcagcttctcttcctggagaatgctgtagcgtgtgttggacaactggatcgagtaacggctgccttcggatgcatcatagatgccgcgcagcacatccgagaacacgttattcgtgagggaggggatcaatacaccgatgacttcggtgcgttgcgaggccagcgcgcgggccgcaaggttgggcacatagccgagctccttcgcggcactctcaacccgtgtccgcttggcgacggacagagcctccggattgcggaagaagcgggacgcggtaatcgggctgacgccggcgagctcggccacttcggccagccggattttgcctgacttggtgcgttttcgacccatttgctgctcttaacacagtcagtcctgcaaacaaaggaacgttgacagcgctaccagcaacgactaaccaaagacaaattgccaaaaccgcacaaactaccgacaatgtcgcccgctaagatcgggcttcgttcggtgaagtctgaaaaaacaagacggtcgcggcgcttggaggcgtcgtggactttcgaggagggagctagatgtcgtctgtgcaaatccgcgacgtgcggaaatcgttcggcaatttcgaagtcctgcacggcgtgacgataccgatcgaggacggccaattcgtcgtcctggttggtccctccggctgcggcaagtcgacgcttctgcgcatgctcgccggtctcgagaacatcacctccggcacgatctcgatcggcgatcgcgtcgtcaacaatgtccagcccaaggagcgggacatcgcgatggtgttccagaactacgcgctctatccgcacatgacggtcgccgacaacatgggcttctcgctgaagctgcggaatgccagcgccgacgagatcaacaagcgcgtcaagcgcgcggccgagatcctggcgctgtcgccgctgctggaccgctacccgcgccagctctccggcggccagcgccagcgcgtcgccatggggcgcgccatcgtgcgcgatccgcaggtgttcttgttcgacgagcctttgtcgaacctggatgccaagctgcgcgtcgccatgcgcaccgaaatcaaggaactgcaccagcggctgaagacgacgaccgtctacgtcacccacgaccagatcgaggccatgaccatggccgacaagatcgtcgtcatgcatgacggcatcgtcgagcagatgggcacgccgctcgagctctacgacaagcccgacaaccagttcgtcgccggcttcatcggctcgcccgcaatgaacttcctcaaggggcatgtgcgcgtcaatggcgttgccaccttcgagggaccgaacggcgtcaagctgccgctcaagacggcgccgacggcgtccgacggccgtcccgcggtctacggcgtgcggccggagcatttcaccatcgccgacgatggcgccgaggccgagatcatcgtggtcgagccgaccggctcggagacgcaggtgttcgccaaggtcggtggcgagcaggtggtcgcggtcttccgcgagcgtcaccagttcaacccgggtgacaagatacggctgaagcccgacccggcgctggtgcacttgtttgacgacgcgacggggaaacgcctcaacgcgtagcgcataaagcaacaaagcataagacgacaaaaaacatcacagggaggacgacatgcaagactttacccgccgaacattgcttcaaggcggaacggcactggctgcgaccggcatgctgaccgggccggcactgttcgacttcgccagggcctgggcgcagagcgcgccctggaaagccgagcccggcgccaagctgaccgtgatgcgctggaagcgcttcgtgccggcggaggacgatgcgttcaacgcaatggttgcggccttcaaggctgcgaccggcaccgagatgaacgtgttcagcgaatccttcgaggacgtgcagccgaaggcctcggttgcagccaacaccggttcggggctcgatctcgcctggggcctgcacacgctgccgcagctgttcccgaccaaagtgctgaagatgaacgacgtcgccgattatctcggcaagaaatacggcggctggaccgacgcggccgccaagacctgcaagcagggaaatgactggctcggcatccccgtcgcgaccaacggcggttacatgacgtaccgcaagtcggcgctcgacaaggccggcttcaaggaattcccgaaggacttccccggcttcctcgagatgtgcaaggcgctgaaggcgaacaacacgccggccggcttcgcgctcggccacgcatcgggcgacggcaattcgtggctgcactgggtgctgtgggggcatggcgcgtacacggtcgaccagaacgacaagatcgtgatcaattcgccggagacggcgaaggcgctggaatactgcaaggcgctgtacgagagcttcatcccgggcactgcgtcctggaacgactcctccaacaacaaggcgttcctcgctggcgaactctattgcacagcgaacggaatctcgatctacgtcgccgccaagacggatgcgagcaagaaggagctcgctgcggacacctatcacgcgctctggccggtcggtccggtcggcaagccgactgagctgcagctggcgctgccgatcctcgcgttcaacttcaccaagtatccgaacgcggcgaaggcattcgtcgccttcatgctggagaaggagaactacgagaagtggctggatggcgcgcagggctatctgacgcagaccttgaacgcctatgagtccgcgccgatctggacagcggatcccaagaacgccgtgttcgcacaggcttcaaagcgcacgctgcccgcgtccggtatcggcacggtcggcgagaaggcggcaaccgcgatcgccgacttcatcgtcgtcgacatgttcgccaattactgcaccggcaccaaggatgcgaagggtgcgatggcggaagccgagcgccagctgaaacgcatctatcgctgacggtcaccgggcgggcggccctccggccgcccgcccgtcaatatttttgatcagggatatcgggcatggctgatgtcgcaattccccgggccaagcctcagttgagcgaggacagcgcctggatccagctcaaacacaatcgcaactggctcggcttctggttcatggtgccggccatggcgttcctgatcttcttcctggcttatccgctggggctcggcatttggctgtccttcacggacacccgcatcggcagggtcgggcaattcgtcgccaccgagaactatgagtggctctgggacgactctatcttctggttgtcggtattcaacacgctgctctacacgttcgtcgccagtgccttcaaattcggcatcgggctctatcttgcgctgctgctcaacgagcatatgccgttcaaggcgatgctgcgcgccatggtgctcatccccttcatcgttccgacggtgctgtcggctctcgccttctggtggatcttcgactcgcaattctcgatcatttcctggtcgctgaagcagctcggactgatcagccagaacatcaatttcctgggggacaccacctgggcgcggatctgtgtgatcttcgccaatgtctggcgcggcgttcccttcgtggcgatcacgctgcttgcgggattgcagaccgtctcgccatcgctctatgaggccgcaacgctcgacggcgcgtcgcgctggcagatgttccggcacatcacctatccgttgctgacgccgatcatcgcggtcgtgatgacgttctcggtgctgttcaccttcaccgacttccagctgatctgggcgatgacgcgtggcggcccggtcaacgccacccatttgatggccacgctgtcttaccagcgcgcgatcattgccgggcagctgggcgagggagccgcgatctccagcgcgatgatccccttcctgctcgcagccatcatggtctcgtggttcggcctgcagcgcaggaaatggcagcagggagagaacaatgactgatctgccgaccaggtcgattgatctcaaggccaccctgtcggcgtcctctccgaccgcggcgaaggacgaccatagcgagggcatgagctatctgcagtcggtgccgcgcaggatggtgacgctgtatctgccgctcacgatcatcgtggtcgtcctgctgttcccgttctactggatggcgctgacgtcggtgaagcccgacgagcagttgctcgacctcgacaagtacaatccgttctggacttggaatccgacgttcaagcactttcacaagcttctgttcgagagctattacccgcactggctctggaatacgatgtacgtggccgtgtgcgcgacggtgctgtcgatctttgcgagcgtgctggccgcctacgcgatcgtgcggttgcgctacaagggcgccaatctcgttggcgggctgatcttcctcgcctatctggtgccgccgtcgatcctgttcattccgctcgccaccgtcgtgtttcagtacggcctgttcgactcgccgcttgcgctgatcctgacctatccgaccatcctgattccgttttcgacatggctgctgatgggttatttcaagaccatcccgttcgagctggaggagtgcgcgctgatcgacggggcaagccgatggcagatcctggtcaagatcgtgctgccgctcgcgatccccggcctgatctcggccttcatcttctgcttcactttgtgctggaacgagttcatctacgccctgacgttcctgcaatcgaccagcaacaagacggtcccggtcgcgatcgtcaacgagttcgtcgacggcgacatctaccgctggggctcgctgatggccggagcgctggccggctcgctgccgctcgtgatcctttacgccttcttcgtggagcattatgtgtcggcgatgaccggcgccgtgaaggagtgatcgcggtgcttgccgaagcggcatccggagcggtgcgcttcggccaataagaaggagttaggctcttgcacattctggttctgggcgctgccggcatggttggccgcaaactctgcgaacggctgctgcgcgacggccggctgggcaagagcgacatcaccaagctcaccatgcatgacgtggtcgaaccgaagaagccggagaacgccggcttcccggtcgagaccatctcgggcgatttcgcggtaccgggcgcggccgaaaagctggtcgccggccgccccgacgtgatcttccatctcgccgccatcgtctcgggcgaggcagagctcgacttcgacaaggggtatcgtatcaacctcgacggcacgcggatgctgctcgacgcgatcaggctcgcgggcggcggttacaagccacgcgtggtcttcacgtcctcgatcgcggtgttcggtgcgccgttcccggatgcgatcggcgacgagttcttccacaccccgctgctcagctacgggacccagaaggcgatcggcgaattgctgctcgccgactattcccgtcgcggcttcctcgacggcatcggcattcgcctgccgacgatctgtatccggcccggcctgccaaacaaggcggcctcgggtttcttctccaacatcctgcgcgagccgctggccggcaaggaggcgatcctcccggtgtccgaggacgtccgccactggcacgccacgccgcgctcggccgtcggcttccttctgcacgccggcaccatggacctcgccgccgtcggcccgcgccgcaacctgaccatgccgggcctgtcggccacggtcggcgagcagatcgccgccttgaagcgggttgccggcgagaaggtcgccgcgcgcatcaagcgcgagccggatcccttcatcgtcggcatcgtcggcggctggccacgcaatttcgatccgaagcgcgcacgcgagctcggcttcaccaccgccgagaagaacttcgacgacatcattcgcattcacatcgaagacgagctcggcggcaatttcgttccctgatctccgactgggcgggccctggtgatggcgagcgttgcttgcatcggcgaatgcatggtcgagctgaggcaggcgcaaggaggcgcatctgccgggcagggcggcggcctgtactcacggggcttcggcggcgacaccctcaacacggccgtctatctggcgcggctcgacatcaaggtcgattatttcaccgcactcggcgatgacggtctcagcgacgagatggtcgcggcctggaatgcggaaggcgtcggcacgcggcgtgtcgtgcggctggcaggcaagctgcccggcctctacatgatccagacggatgcaaagggcgagcgccagttcttccactggcgcgacagcgcggctgcgcggcagctgatgagcctgccggagaccgacgagatcctcaactcgctgatgagctatgacgtcgtctatctctccgcgatcacgctctcgatctacgacgcacccggacgcgagcggctgctcgccgcgatcaagcgcgcgcgcctgctcggcacccgcttcgtgttcgacaccaattttcgcgcacgcgggtggcccgatcgcgacgttgcgcgcgaggtgtttgccgcggcgcttgcgactgccgacatcgtgctgacctcgaccgaggatctgctcgcactctatccgggcgagagcgacgatcaactgatggcgcgcattcccagccccgagctggtgttccgcctggccgagccggtgagcctgctacgctttcccggcgggaccagcgaggttccggccgagccgatgaccaagcccgtggtggacacgactgccgccggtgacagctttgcggccgcctatattgcggcccgcctcggcggttccgatccggtcgaggcggcccaggccgggcatcgcctcgccggcgtcgtgatttgctatcccggtgccatcattccgggctatgccatgccgccgaagaaacggcaccggccggcgccctctcgccaagccaccaagtgaatcgagacctaatgaccacgagtgcccaacagaatcacctcgtcgccctgttcaaggccgcgacggtcattcccgtcctgaccatcgagcgaatccaggatgcggtgccgctggcgcgtgcgctggtcgccggcggcgttcgcacgctggaggtgaccctgcgcacccccgttgcgatcgaggcggcacgggcgatgatggcggaggtgcccgaggcggtcgtcggcattggcacgatcctcaacccggccgacttcacccgtgtcgagaagcttggcgtggcgttcggcatcagtccgggcctgacccccgatctcctgaaggtggcgaccgacagctccttgcccttcgcgccgggcattgccacggcctccgagctgatgatggcgctgtcctacggtttcgacgtcgccaaattctttccggccgagcaggccggcggcatcaagggcctgcgcgccctcggcgggccgttcccgaacctacgcttctgtccgaccggcgggatcggtgaggccaatgcggcgacctggctggccgagcccaacgtggtcgcggtcggcgggtcctggctttgcccgccggcggagatccgggctgggaactgggccggcataactgccatctgcgagcggacagtcaaggcgctgaaagccgcgtgaagtcttgccaatgctaggctaagacttagctcaggaagagacctccagggagaatggaccatgaccgccagcatcgtcggatgggcgcatacaccgttcggcaagttcgacacggagaccgtggaaagcctcgtcgtgcgggtcgccaatgaggcgctggccgacgccggcgtttcggctggtgatgtcgacgagatcgtgctcggtcatttcaatgccggcttctctccgcaggacttcaccgcctcgctggtgcttcaggccgaccccaagctgcgcttcaagccggcgacgcgcgtcgagaatgcctgcgcgaccggctccgccgccgtccatcagggcctgcgcgcgattgccgcaggggccgccaagatcgtcctggtcgtcggcgtcgagcagatgacgcgcacgcccggtccggagatcggcaagaacctgctcaaggcctcctatctgcccgaggacggcgacacggtcggcggcttcgccggcgtgttcggcaagatcgccagctcctatttccagaagtatggcgaccagtcagatgcgctggcgctgatcgcagccaagaaccacaagaacggcgtcgccaatcccttcgcccagatgcgcaaggatttcggcttcgacttctgccgcgccgagagcgagaagaacccttacgtcgccggtcccctgaagcgcacggactgctcgttggtctcggacggtgccgctgcgctggtgctggccgaccctgagacagccaaaaccatgaacaagtcgatcggtttccgcgccaccgcgcacgcccaggacttcctgccgatgagcaagcgtgacatcctccagttcgagggctgcacggtcgcctggcagcgcgcgctggaaaaagccggtgtgacgctctccgatctctccttcgtcgagacccatgactgcttcacggttgccgagctgatcgaatacgaagcgatgggcctgacgccgaaggggcagggcgcccgtgccatcaaggaaggctggacgctcaaggacggcaagctcccggtcaatccctccgggggcctcaaggccaaggggcacccgatcggcgccaccggcgtttccatgcacgtgatgaccgcgatgcagctggcggggcaagcgcccgaaggcatgcagctcaagaatgccaagctcggcggcatcttcaacatgggcggtgctgccgtcgccaactacgtctcggtgctggagccgctgaagtaggtcgctctgtgggctgggcacgggcgccacgcgccgtgcccacctctttgcgctaaatcatggtgggcctgcctcggccagccttaatgctcctgattgatttgcagggaatgcatcatgagcactgactacgaagactcgctgtcgatggacgcactcaacgatcgtattgcgatcctcgaggacaatattcgccagctcatcgagcaggccgcggcggcctcgggcgagcagagcgagtcgcgcatcgccgaccggatcacccagcagaacgacgagctcgatcggctcctcaagatccgcgaatcccgtcagaagaaatagcgggcgacatcgccgcaccgcgcatgccgccatacgccgcccgcccttgcgcgtgcggcggcgctgccgttagctgggaccgaaatcgcgagggcacctgggtcccgcgcaatcgggagcgaacgatggggccactgaagggcgtcagggtcatcgacatgaccaccgtgctgatggggccctatgcgacccagatgctcggcgactacggcgccgacgtcgtcaaggtggaatccctggagggtgacgtcacacgcctgatcggcccgatgcgtcacgccggcatgggtccggtgtttctcaacaccaaccgcagcaagcgctcgatctgcctcgatttgaagaagcccgccgggcgcgaggccgtgctgagattgctgaaggacgccgacgtcctcgtctacaacgtccgtccgcaggccatggcacggctgcagctcggctacgacgtcgtctctgccatcaatccccgcctggtctacgccggcgtgttcggtttcggccaggacgggccctatgccgcaaaacccgcctatgacgatctgatccagggcgccaccgcgctgccggcgctgatggcgcagaccggcgacggcgtgccgcgctacgtgccgaacgcgctggtcgaccgcatcgtcggcctcaccgccgtcggcgcgatctgcgccagcctcgtccaccgcgaccgcaccggccgcggccagcgtctggacatcccgatgttcgagaccatggccggcttcgtcatgggcgaccacatgggcgggctcaccttcgagccgccgctcgacaaaggcggctatgcccgccacctctcgcgcgaccgcaggccgtacaagacctcggacggctatctcagcgtcatcgtctacaacgacaagcaatgggagaacttcttcaaggccacgaagcgcgacgatcttcgcgccgatcccaaattcgcaaccttcgccggccgcgccgccaatatcgacgtggtctacgccgagctcgctcgcatcttcgagacacgcacgacggcggaatggatcgagctgctcaccaaggccgacgtcccggtgatgccgatgcacgaccttgcctcgatgttgcacgacgagcatcttgaggcgacgaactttttcccggtggtgaaccatccaacagaaggcgaaatccgcagcatgaaggtgacggcgacgtggtcagagaccgaagccgagccatcgcgcctggcgccgcggctcaacgagcatggcgccgagatcctgcgcgagatcggttattccgccgacgagatcgcagccatggtgcgcgacggcgtcacgcgctcggcgccggaggaggagaggtagggatgaccacagctctctcatccgtcattccgcggcgcgacaatgtcgcgagtccggaatccattcatgctcggcacatgctgcgcgatggattccggactcggcccttcgggccgccccggaatgacaggagggcaccatgagcttcatcaccggcgtcggcctcacaccgttcggcaagcacgaaggctcgtcctcgctcgatctgatgagcaaggcggcgcaagccgcgctggacgatgccgggctgaagcgttcggatatcgacggcatcctctgcggctactccaccgtctcgcctcacatcatgctggcgaccgtcttcgccgagcactttggcatccgtcctgcttatgcccacgccgtgcaggtcggcggcgcgacggggctcgcgatgacgatgctcgcgcatcacctcgtcgaatccggcatcgtccgccacgtgctcgtcgtcgcgggcgagaaccgcctcaccgggcagagccgcgatgcctcggtccaggcgctggcgcaggtcggacatcccgactacgaggtgccgctagggccgactattcctgcctattatggcctcgttgccaaccgctatatgcacgaatacggcgtgaccgaagaggaccttgcccagttcgcggtgctgatgcgcagccacgcctgcacccatcccggcgcgcaattccacgatcccattacggtcgccgacgtcatggcctcgaagccggtggcgatgccgctcaagctgctcgactgctgcccggtctccgatggcggcgcggccttcgtcatcagtcgcgaacggaccgggcaagcgggcgtgcgcatccgcggctgcgcccaggcccacacccatcagcatgtcaccgcagctcccgccctcagcgagctcggcgccgagatctcgatcgcgcgtgcgaaggacgccgcgggcctggcgatctccgacgtgcgctacgccgccatctacgacagttttacgatcacgcttgcgatgctgctggaggacctcggccttgccgggcgcggtgaggctgccgcccgcgttcgatcaggccatttcggccgcgacggcgcgatgccgctgaacacccacggcggcctgctcagctacggccattgcggggtcggcggcgccatggcgcatctggtcgaagcgcatttgcagatgacgggccgggcggctgaccgacaggtgcgggatgcgtccattgcgctgttgcacggcgacggcggcgtgctgtcctctcacgtgagcatgttcctggagcgggtgcgatgagcgagcgtctgacggactggaccaagggcgaagaggcgatcacctaccagacctgcatctcatgcggtcacgtgcagtatttccatcgcgccttctgcgcggcctgcggtgcatccggcccgcgcgcgcagcgcgccagcggcaagggcagggtgtacgcgacctcgctggtctgccgggccgccacatcagagacgcgggcgcacgtaccctacaacatcctgctggtcgattgtgcagagggttttcgcatgatggcgcatggcgacgacgatctcgccatcggcgattcggtcaccgcaagcttcaagccctttgccggccggctcgtgccgttcttcacgaggtcgtagagggattcgtcattcgggggcggtcatgcgaccgagcctggaacgggtattctgggcctggcttgtgcgagagccaccccggaatgacgaaagcactaaaactccaactagcgcccgtagaacaagatgctggcgatgacgagcatcgccgtcaccgccagcatatgcgcgagcgctcccgaggccgcccccttggtggcttccttcatgcctttttctccctagacttgggcgtgactcaccgttgtgcggctagcgcacccgatggccaattgttttactcggaacaccccatttgcgagtactcgccgcgctttgtccccacacggcgaatatcgactgtctcagggttgatcagcaatgcggcggcaatttgactccctgatgttgctcctgcgtccacgcgcgcatagagtcatcgggaaattgtgcccacgacgacaagaagcatcaaaagcccagggaaaacttcagcaaaatggcccgtatcgactacagcgacccgtccaaggcatccgaccgcacccgcgagctcctcggcaagaaccgcaatgccaatatcttccgcatgatggcgcactcgccgagctatctcgagcagtactgccgccttggcggcgccatacgccacaagggcgagctcgacccgatcgtgcgtgagcttgcgatcacccgcaccggaattctgtgcgaggctccgtacgaggtcgtcgcgcacaagcgcatcggcaagaatgtcggcgtcaccgacgagcagaacgaggcgctcgagaactggcaggcggcgtcttgcttcgatgaggtgcagcgcgccgcgctcgccttcaccgacgagatcgtgaagctgcgcaagccgaccgatgcgacgttcaaggccatcgcatcgaagctgacgcccgctgcattggtcgaattgcagctctcggtgggcttctacatcatgacctcgaaattcctggagaccttcgagatcgatctccagcccgtcaccgaagtggtgggctgaatcgacgcaagcggcggggaatgccgatgacgatcgatgaatatgtggcctgggccgcgagcatagcgaaagtcgacgagcatccgtccaacgagcggctgtcctatctcggtcttggccttgccggcgaggccggcgaggtggccgaccacgtcaagaagctcttgcgagacggctggctggaccaggcgggcctcgtcaatgagctcggcgacgtcatctattattgggcctgcttgtgtgcggccaccgggcagcagccgtccgaagtgctgaaggcaagtgcggcgcggatcaatcgccggctgagcgaggccgcgagtcgttgagaccttttcctgacgaggcggaggagcgtcgttctacgtcgacgtcaatatgtcgaccttggcgttggcgacgatcaggcggtcggccagcagctgggccagattgcgcatgatgcattcgctggcgcgcgggtgctgcttgcggaagcgctggaaatccttcagcggcacttcgtacgtcgttgctgccaggtcggcggacacatcggccgaccttgtcggctccagcagcgccatttcgccgaacgccatgccggcggtgagtgtcgccagccggatgccgtcgggcaaggtgacgtgcaccgcgccgctgcgcaggaagcaaagggtatcggcggggtcgccggccgcgagaatcttcgcgccggatggataggccctgatggtgcagagcgaggccagatcggtcagttcttcctcgctcaaccctgtcagcagcggttgctcggcgagctcggtggtctcgtgaaaatcgatcgagccgccgtagcgatacacgatctggtcttcggcccattcaatggcggtgtcgagcaggtagaagtcccggacgttcttcagctccgccgtccattcccgcaaggtgtcccattccttggaggcgcgcctgacgcctgacagcacgacggtcacgttcaaggccgcaagctcctcgaacgcttcggcgatcagccgcgccccggcgcgcgtggtcgaggtgacgcgatggagatcgaagatcacgaattgcggccgcggtcgcccggcgagccgccgcgagacgtaatcgaccgcggagagcgacagcgtgccgaccagctcgatgatccgcacttcctgctcatgcgccgccaggatttcgcgctcctgaggccggcgcacgcggcgggacgggctcttgccgatgttgtagtccgctatgacggcgttgcgggcgtcatcgctgcggttgagcatgtgcaggtcgtaatgcgaggacagcgcctcgcagaccttgatgccgcgcacgctgttgccgtgcttgtcgagcttcggcgaatagctgccgaggccgagccgggccgggagcgctgcgagaatgccgccgccgacgccgctcttggcgggaatgccgatccggtagatccattcgccggcataatcgtacatgcccgacgacgtcatcaccgagagcgtgcgcgagatcgcgtaaggcgtgagcacctgctcgccggtcacggggttaatgccgcggttcgcgagcgtcgcggccatcaccgcgatgtcccgcgcggtgaccagcactgcgcattgtcggaaatagacgtcgaggacgccagcgacgctgtccgagatgaccgcattggtcttcaagagatagccgatggcgcggttgcggtcgccggtctggctctcggaagcatagaccgcctcgtcaacggcaaggtcgcggccggcaaagcggctgagggcggcacggatctgctcgaaggcctccgtgcccctgctgtcgtagatcagcccggtgcaggcgatcgcgccggcattgaccatcggattgaacggatggttctcggagttgagccggatcgagttgaaggggtcccccgagggctcgaccccgatcgcgctctcgaccctgccggcgccaagcaggtccagcgccagcgcgaacacgaaaggcttcgacatcgattggatggtgaagggcacccggctgtcgccgacctcatagacatggccatccagcgtcgccaggctgatgccgaaacaggcagggtccgccttgctcagctcgggaatgtaatcggcaacgctgcctgaggtctcggccgagaattcactgaggcaatggtccagaaaccgcagcagtggcggcttcgagcgggtccaggcggcggcgagaggcgattgcggcttcatcgccctctgttgtgcaacgcaatcagggtgcgcgcaacccgtccggcacctcgggctggcgtcggaccagaagaagcgcgatcaagatcgtcggcagcaggatcccgaggccgagcagcgtcacctgcatctgcgacagcggcatgattccgccgccgggggtcgcgaccacgaagccgccgatcaccagcagcacgcggatcggccattccagcgcccctgcggcgcgcaaattgccgacgaagggctggtagccctggatgccaccgcagatgaacagcgtgccgaaggcggcaaggcccatcaggccaagagctgcgagatatgggttcggcccttgcagcaccagggccggattcaagacgaagaagaacggcaggaaatagatgatgctgccgacccacatcgactcccagccggtcttcatcgccggcgaaccggcgatgcctgcggctgcgaaagaagcgatcgcgaccggcggcgtgatggaagacagcatgccccagtagaagatgaacatgtgcaccgccatgcggttgagcccgagcttctccagcgccggcgcgaccaggatggcgaggaagatgtagcaggccgtcgttgtcagcccgaggccgaggatgaggctggtcagtgcgcacatcgccagcagcaggaaggcgttgtcgccggcaatatgcagcaggtcgttggcaaggctcgagaccacgccggtcatcgagaatgcgccgatgaggaggccgcagccggcgaggataccagcgagctccacgaaggtgcgcccgttcacctccaggaatctgccgatcgtggcaaatgtccagcgcgtgtccttggaaaagaactggttgagaacaagcagcaacgcggtcgcatagaatggcgcgtggctctcgcgcttgaagtagagcagcatgacgatcaggagcgcgatgacgaagacgtagtaccagccgtccttgatcgtatccatgatccgcggcagctcggagcgcggaatgcccttcagattgtggcgtgcggcataggcatcgacctgcatgaacaggccgatgtagtacagcacggccggaatgacggcggcgagcgcgacttcggcgtaactgacattgagaaactgcgcgatcacgaaggcggtggcgcccatcaccggtggtgccagcaccgcgccggtcgaggcgcaggcttcgatcgcggcggcataggaggcgcggaagccgctcttcttcatcacggggatggtcatcgtgccggcggtgagcacgttggagatgatcgagcccgacatcatgccgagcaggccgctggcaaagatacagactttcgccgcgccgccgcggaacgtgccgcacagcgcgaacgagagattgatgaagaatttgccggctcccgtcatcatcagcgcggtgccgaacacaaggaagccgatcacggtatcggcgaaggcctggatggggatgccaagcaggctttcgccggacagcacgtgataggcggtcgcctgctccagcgtcgactgcgtgccgcggaacggtccgagccagccggcctcggcgaacaagggatagaccgtgaagggaaagacgctcagcagcaggctccagcccccggtgcggcgcagcgcctccatcagcatcgcccacatcacgaggccggcggcgattacgctggtcggcgcgccgccgaattcccagccggcctccgcggccttgcgcacattggtcatcagcatgagcgccgccgcgaaggtcgcgacgaacaggacgaggtcataccagggaatgcgatcgagcggcgctcgttcggcccctgggaagatcaggaacgtgaacggcagcatcaacgcgatcaggaggtagaaatactccgtgttgagctgggtgtatccgatgaagaagcgcagcgagaactgctggttgatgcacagcaggatggtcgccgctgtcgcgccgaccagcgcccatcgccagaggccgcgaagcgtgcggacgcgcgtgacctctgcctcctgcatgttgccggcggcaccgtgcggatcgtcgaagacgacccgcttggcctcgtcttgcggggcggtggagattgaaacagacatgatcgaccccgcacgtgggctgattgatatattttggtggccggccgttggttgaatcgatcgatccgcgggctcctcaacctctcccgctcgcgggagaggtcgcgccgaaggcgcgcgtgagggccgtctcctctaggagggtgtcccattgcggaaacaccctctcccgcaagcgggagagggggcgcgcctcgcgcgcggcgacgagcgagctcatgtgccgctctactcctcgaacccattcggcatgccggccttggcaagcgcggcggcgcgcgccttcatccaaccatcgaggaagggcttgtcgtccgacggcggactggatttgccgtaatcggcccacgcggcggcgagcacctcctggcgcttgatcagcttgttgttgtgcgcttcctgcgtatcgctccattgcccggcttccttcagcgccttcactgcgccgggatgcaccggcaccacccagttcttggtttgccggtcggccgcgagcccgccggcgccgggtgcggagtccttgtaggcgtcgtagttcacgatcattgccttcgtcatcgcatagacctgatcggccggttgcgaggcgtaggcgacgaagatcgggtagggatagttgccgagctcgaccggcttctccggcgagatgccggcgccgcaggtcgcaagctgcgggaagaagaacgagccgaccttctgcatccgcgcccagccttccttgtccttggcgggcagcggcggccagatcaggccgcgcggcgaggtctcggcttccttggcggggccggtgatggtggtgccgaaggcggcgtcgacgtcattgttgataaggcccttccacatcgcgccgtagctggcgaactcgaccaccttgacgtccttctgcgtcagcccggcgaaggcgagcaccgcgagcgaattctggttcagcgcaggcgagccgaccacgaagccgacccgcttgcccttgagatctttcagctccttcacgccggtgtcggcggccacgccgagcgatccgcaattgcagtcgacgctcgagagcaggatctgaagcggctgcgggccccattccttggagccgaactcgaacacgccttcctgcgcgaaataggtgcctgatcccatcgcggccgatgccgcgcgcttggcgcgcaacggcgcgaggcgggcaacgtcgttgcccgcgggaagtacgcgcacgtcggtgccgtacttgtccttcatcatcttgcctacgccgaccgcgatgttgaagccggccgtaccggtgtcataggccgtgaaggtcagtgtcgccggcagcttgatgtcctcggcgaacgaacagcgtgtagacgcaaaagaaatgcctgccaccacggcaggtgcgagcatgaacaatccacgaagcatgtttccctccatcgtcttcgcttaagcgcgaagattttctttctttgtttgaaacaacgttttgtttgcaacagatcatgtcaccgcgatcaagcgatggcaacgccgtaccgcgaatacagcaatgcggctgacagattgtcgcggaaaacgccggataatgccgtcaccgcgtgacgatcgcgatcgcttgtccttcggcaacgacgtcgtcgagcttcaccagaagagatgtgatggtcccgctcgcgggcgagggcaccggaatttccatcttcatcgcttcgacaattacaacgtcatcgccatctgcaacggttcctccaacttgcacgggagttgcgcagacgcgtcccgctacttctgtgacgatcttaatttctggcatgccatcgcctttttgttgtcgtcgcaaaatgcctgaggtagcgtcgtctgcaagtggaatttaattccgcagagcggaacaattggtagggaacatgggacgacgatcggagcggttgagtaggcaaggcgtgctcgctggcgacgcgggcgagggagatgtcatccaagtggtgtcgcgcgcgttcgacgtgttgcgatgcttcgagggccacgatagcaggctcggcaatctagagatctcaaaccgctgcggtctgccgcgttcgacggtatcgcggctcacgcacacgctgacccgcatgggccagctggtctatttgccgcgcgatcaaaaatatcgcatcggcccgagcgccgtggcgatgagcgcctcgatgatgaaaggcgcgcagctgcgcagcatgattcgccagcggcttcaggaagtggccgagcaattgcctggcaccgtcggcttcgtcgtccccgatcgcttccatctcgtctatctccagttcgcgcgctcgccctccgcactcggcttgcacgagggcaccggcagccgcatcgcgatggcctcgaccgcagcaggcgcggcctacacggcggcattgtcgccggaagtcggcgatgccttcatcgccgagatggagcgcgaagcgcccgaggctgcaaagattctcaggcctcgcatcgaggccaaccggcagtcgttgcgcgagcgcggctatgtcgttgcctgcggcctctggagcccgcacatcaacggcctcgcggtgccgatctggtcgccgcaataccagaccttcgtcgtcatcacgatcggcctcttggctgccatgtatgacgagcagcgtctgcatgccgaagtcgccccgctgatgctggagcttggccgttcgctcggcagcctgatggaaggcgcagaaggcgacgccttcaacaaccgcatctcgcgcaaaccggtcgccatggccgtgcacaacaataacaagccgatcaactcggagggaatgaatgaactggaagccggaactcgacgagctcgcccggcgcgaagccttcgcgcgggagatgggcggcgttgacaaggtcaagcgacagcatgaccagggccggctgactgttcgggaacgtatcgacaagctgatcgacaaaggcagctttcacgagatcggtgctgtttccggcatcggtgagtacgattccagcggcgagctgcagaagctgacgccggcgaactgcgtgttcggtcgcgcccgcgtcgacggccgcaccgtggtcgtggtcggcgacgatttcacggtgcgcggtggctcggccgatgcgtcgatctcggcaaagccgttgatggcggaggagatggcgcacgattttcgtctgcccatcgtccgcatcatcgagggctccggcggcggcggctcggtcaagaccatcgagaccaagggcgcggcgaacctgccgggcgggatcggcggcacgcgctggtatcgcttcacgacggaaaatctgtcgcgcgtgccggtggtcgcactcggcctcggctcggtagcgggcctgggtgcggcgcgtcttgccgccagccactattccatcataacccggaagtccgcgatgttcgtcgcagggccgccggtggtgaaggcgctagggcaggatcttaccaaggaagagctcggcggcgccgatatccagacccgcgccggcgcggtcgatcatgccgtcgacaccgaggaggaagccttcgcctgtgcgcgacgattcctttcttatctgccatcatcggtctacgagctgccgcccaccttgccctgcaccgataatccggagcggggcgacgaagcgctgatgaacgcggtgccgcgtaaccgcaagcaggtctacaaggtgcgacctatcatcgagtcggtcgtcgacaagggctcgttcttcgaggtcgccaagaattttggcaagcccattatcgtcggcctcgcgcggctcgagggcagggcggtcatggtgcttgccagcgacagcttccactatggcggctcctggaccgcggatgcctgccagaaggtggtgcgctgggtcgacttcgccgagaccttccatctccccatcgtctatctcatggattgccccggcttcatgatcggcctcgatgccgagaaggcggccaccatccgccatggggtccgcgccatggctgcggtcaaccagaccacggtgccctggtgcaccgtcatcctgcgcaacgccttcggcgttgccggcgtggtgcatcagccggctgaccgcttctcgattcgctacgcctggccctcggcctattggggctcgctgccgctggagggcggcatcgaggcggcctaccgcgccgacatcgacgcggcggaagacaaggcggcgaaactcaaggagatcgaggaccggctcaacaagctgcgctcgccattccgctccgccgaaaagttctgggtcgaggagatcatcgatcccaggaagacgcggtcgctgctgtgcgagtttgcgcggctggcggagccgctgcgcaaggccgggccgccggagaacttctcgatcaggccgtgatgttcagcaatcatcgcggctgcgacaatcttgtcatggccgcgatgggcgtgacctcaaaacaagaacgcgctacgttccccggataagagcaagaggaaacgtcaatcgtgtacgacttcatcatcgtggggggcggctccgcggggtccgtgctggcgcaccggctctcggcaaggagcgccaacaaggttctgctgtgcgaagccgggcaggacacgccgcccggcaacgagccggccgagatcagggacagctatcccggcaccgcctatttcgatccgcgcttccattggactgaactgaaggtcaccacgcaggtcatcagccacaacaatccgaacgaagcgcgtcctcccttgcgcaaatacgagcaggccagggtgctcggcggcggctcctcgatcaacggtcagatggccaatcgcggcgcaccgaccgactacgacgaatggcaagcgcggggcgccgaaggctggagctggaatgacgtgctgcccttcttcaagaaggtcgagcgcgacctcgatttcgacggaccgtatcacggcaaggacggccgaatcccggtgcgccgcattccgcgggcgcactggacgcagcattcggaggcgttcgcgcaagccttccagcaggccggccaccagttcgtgcccgaccagaacggcgagttcgtggacggctttttcccggtgacgcattcgaaccaagccgagcagcgcgtctcggccgcgatgggctacctcgatcgcgacacccgcaagcgcaccaacctcacgatctccaccaacacgcaggtcagagagctgctgttcgagggcacgcgctgcgtcggtgtgaaggcgttggtggacgggcgcgagcaggaattccgcggacgcgagatcattctttccagcggcgccatccattcgccggcgcatctgctccgcgccggtatcggcccggttggtcacctcaaggatatgggcattcccgtcttgatggggctgcctggcgtcggccagcgcctgatggatcatccctccatctcgctgtcgtcctttgtccgacgcggcgcgcgcatgaacgagcacaccaggcgccacatgcagctcgggctgcgctattcctccgggctgccgggcgtcccgaagggcgacatgttcgtcgtcgtgctgagcaaatcggcctggcacgccgtaggcgcgcaaatcggctcgctgctgaccttcgtcaacaagacctattccgagaccggacaggtcaagctggcctcgcgcgatccctcggcggaaccgatcgtcgagttcaacctgttgtccgaccggcgcgacctcgatcgccttatgagcggctttcgcaagatggcggccgtgcagatgagcgaatggtcaggaaggtgacggacaagccattcccggcctcctacaccgaccgcgtccgcaagatcggcgtggtcaacacgacgaacaagattctgaccacgatcgccgccgcgttgatggacgggccggccgcactgcgccactacatgatcgacaatttcgtggtcgaggggttcacctttgaccaggtcatgagcgacgacgaggcgctggaagccttcgtgcgcaaggcgacgatcggcgtctggcacgcctcgtgctcgtgccgcatgggacgtgccgacgatccgatggcggtggtcgataccgagggccgcgtgaagggcatccagggcctgcgcgtcgtcgacgcctcgatcttcccggtggtaccgtgcgctaacaccaattttccggtgctgatgtcggcggagaagatcgccgccgcgatcatgcagtaggaggggacaatctcgcgctgtcggccggacgctttgaacatgatctaggttaacggcgtaggtagaagcagttttttggccgcgctttgggcccatttcggccaaatcagtattggtttctcccgaccggggcaggatctcccaactcagagacctgcaatgatcaaacgagttttttctgcgtgcatcctctttatcgctacctgcgccgtctccgaagcgcggccctaccgcattcttcaagcccctgagtgcaacgtcaccatgccctgcgatttctcgtactcgcaaacgcgccgcgagcgggctcccaggcgcacgttgcgggcctatcgctcaacgcaaatgacggtgaccgacgcggggaatactcccacgtcaacgattgtctcgaacgatcgggttgttggcgggcgtcccgccgggtgcccgtcgtctttctgcggctgcggcgcctccctgcgcgtatttggtcgcatcatcccggaattgaatctcgcgtcgaactggctgcgctttccgcggacgtcgccggcgccgggaatggttgcggcccgccgcggccatgttttcgttctggagcagcacctcggcggcgatatgtggatggcatatgatgccaattccggcggtcgcgcgacccgactgcatgcgcgctccctgcgaggttacacaatcgtcaacccgcgcgcctgatccgggacagggtgcccggcgtcatcacagccggagcaccttgccgggattcatgatgttttgcggatcgagcgcgcgcttgatggcgcgcatgatgtcgagctcggttttcggtcggtagcggctgagctcgtcgagcttgtcgatgccgatgccgtgctccgccgagatcgatccgcccagggaagtgacgagatcgttcacggcccgggtgatggcgcccttgtactggttcagcgtcttctgatccatgccgccaggccccatgaacgaaaaatgcagattgccgtcgccgatgtgtccgagcggatagggcctgatggtcgggagaatgtcgagcacggctctggtacccttgtcgatgaactccggtatccgggagattgccaccgaaatgtcgtagctgagcccaggtccttccgcccgcgacgcctcggcgacaccttcgcggatgcgccacatgttgcgcgactgcccgaccgtatgcgcgatcgcggcatcgagcacgcggccggccccgagctgatcggcgagaaactgctccagcttctcggacatgccctccatcccatcgcgtcgcgcccgcgcggacgaccattccagcagaaggtaccatggcgtctccgccttgagcggatcctgggtgccggggatatggcgcagcaccatgtcgacggcgctgcggctcatcagctcgcaggagccgacattgtcttcggacgccgcatgcgcctcggacaggatctccagtgccgcgcggggatcgcgaatcgccagccatgaggtgcagacgtccttcggcgccggccatagcttgagcacggccttggtgatgatgcccagcgtgccctcggctcccatgaacaagtgcttgaggtcgtagccggtgttgtcctttttgagcgcgcgcagtccgtcccagacctcgccgttgggcaacacgacctcgagccccagcacgagattgcgggcatttccataccgcaatacttggacgccgccggcattggtcgaaaggttgccgccgatcatgcaggagccctgggcgccgaggctgagcggcaggaatctgtcgtgttcggccgctgtttcctgaagcgtctgcagcacgcaaccggcctcgaccgtcatcgaatagccgacgggatcgacgtccagcacgcggttcatccgtcccagcgacaagacgatgccggtatgcgcaggccagggcgtcgccccgcccatcagaccggtattgccgccctgcggcacgatcgcgatgccatgctcatgacagagtcgcacgactttcgagacttcctcggtgctgcccggacgaacgacggcgccggcaccaccaaccaacaatcctcgccaatcggtcacgaaaggctgtttgccatgctcgtcctcgatcagacccttctcgccgacgatcgcgcgcaacgcatcgcgcatctcggatgtcaaaggagtggtcgggatgatgggatcggaggacaggaaggcggccggcatttcatttcccctggcgcatcttggtgtgcactgcgcacgtgacgtgcggaggctattgtccacgtttggggcggggagtctaacgggaatgtgggccgaacctgtggacccacacgggtgcgtcatcaacgcctcggccgggcaggaccggtgccgcagcaacgacggaatccgacgcgccgtcgtcgaggccggatccgtgtgtctcttcttcgcgtgtgtcgccgccctcggacgcccggcctgcgaccttttccgatccggcaatgttcaggcaatctctgcaacatttctgaacatcgtcgccaacatcccgtggctgttcgagcgtagaacgcgcccagactttgttgcggatcgggatcggaagaatgctattgaagttttcggcggcgcacatgggcgttggcgcggcctgtctcgtgctcgtcggcatcagcccgttgcgcgcagagccggtgttcgacggtttggccggtgcttggtcgggcgtcggcacgatgaagccgtccgatgggccgcgtgagaaggtccgctgcaaagtggcgtacgacgtcaccaggccgggacggtccctgaccctcaatctgcgctgcgcaagcgatgcgtacaagatggtcctgtccgcaaacatcgagcagagcggaacggagctttccggcaactggttcgagagcgaataccgacaaggcggcaaggtctacggcacgaacaaggacggcctgatcgaggcacgaattgagggaaacacggtggccgcgctggtgacgatccagaccaagagcaatcgtcaatccttcctgatggaggcgccggggtcctggatgtcggaggtcgcgatcgaattgaacaaggattcgaagtgacgccgatcctcgtgccgtagcaatcgtgcatgcacagcaatcgccctggcgcctcggcgcaaacttggccggctgcgtcgcacctgcgtcaggccgcatcgtcggcccaccggctcgagcggatcctgatcgcatcgcgctttaggccatcacgggctgcggtttgggctgccgcgccagcgccagcacgatcagcgcggcgaacacgcacagcgcgccggctatgaagaaggcaggcaggtagctctcatagaccgtccgcgagaagccggcgccaaacgctgcggtgcccgcgccgagctgatgcccggcaaagatccagccgaacaccagattggcgcgctcgggtccgaacttctgcgcggtgaggcgcacggtcggcggcaccgtggcgatccagtcgaggccgtagaacattgcgaagacggacaggccgtagaacgagaagtcgctgaacggcaggaagatcagcgagagcccgcgcaggccgtagtaccagaacagcagccagcgattgtcgtagcgatccgacagccagccggacaggatggtgccaatgaagtcgaagatgcccatcgcggcgagcaggctggcggcttgcacctgcgggatgccgaaatcgaggcacatcgggatcaggtgcacctggacgaggccattggtcgaggcgccgcatacgaagaaggtggcgaacaggatccagaacgccgtcgatctcgatgcatcgcgcagcgtgcccagcgcaacgcccgtgatcgagccgtggctcaccggcggcgcgggcaggggttctgtgccctcgtcgccgaacggccgcaggccgacatcgctgggacggtcacacatcgcgagcagcaccgccagtgcggagacgccgagcatgacgcagacgaggccgagcgcgagccgccagccgtagcgctcggtgaggcttgcgagcagcggcaggaacacgagctgcccagtggcgacgctcgcggtcatgatgccgaccacgaggccgcgtcttgccgcgaaccagcgcgtggcaatcgtcgcgccgagcaccagcgcggtcatgccggtgccgatgccgatcaccacgccccagagggcgatgagctgccagacttccgtcatgccgagagagagcacgagcgcgcaaaccacaatcagctgcgcgatgagcgtgatgttgcgcagaccgtagcgattgagcagggcggccgcgaacggcgccatcaggccgaacaggatgaagcggatcgacagcgccgaggagatttccgccgtgctccagccgaactccttttgaagcgggacgatgaacacaccgggcgcgccgaccgtgccggcgctgatcagtgccgcgaggaaggtcacgccgaccatcacccagccataatggatgttgcggcgggacagttctgccgcgagccagttcgagatcattgggcctcaatgtgggttggcgagcccggtgggacccgcgtcatcgttgcagtctggcatgagggaggggaagtctaaaatgacagacttccctcaatttcggccatagatactagcgcgccagccgctccacagcgatggcggttgcctcgccgccgccgatgcagagcgccgcgatgccgcgcctgaggttctgcgcctcgagcgcatgcagcagcgtcacgatcagccgcgcgccggtggcgccgatgggatggccgagcgcgcaggctccgccgttgatgttgagcttgtcgcgggggatcccgagatcacgctgcgccgccatcgccaccacggcaaacgcctcgttgatctcgaacaggtcgacgtcggaggcagtccagcccaccttgtcgagcagcttgcggatcgccgggattggcgcggtggtgaaccattgcggctcctggctgtgggtggcgtgacccttgatttcagcgagagctggcagaccgctgcgatcggcgagcgaacgcttggtcagcaccagcgccgcggcgccgtcggcgttggcggaggaggcggccggcgtgatggttccgttggcacggaacgccggtttcaacccgggaattttcgcgggatcgaccttcagcggatgctcgtcattggcgatcacgcgcgggccggccttttcggccagcgtgatgggtgcaatctccgccttgaacgcgccgccttccactgctttgcgggcgcgtccgagcgtttccatcgcgtatgcgtcctggtccttgcgtgtgaactggtaggcttccgcggtcgcttcgccgaaatcgcccatggagcggccggtctcataggcgtcctccagcccgtccatcatcatgtggtcgatgatgcggtcgtggccgacacgatagccgccgcgcgccttggcgagcagatacggcgcgttgctcatgctctccatgccgccggagacgacgatctcggccgagccggcgcggatgatgtcgtgggccagcatcgtcgccttcatgccagagccgcagaccttgttgaccgtggtcgcgccagtggagtcgggcagaccggcggcgcgtgccgcttgccgcgcgggcgcctggccctgtccggccggcagcacgcaccccatgaagacctcgtcgaccttctctggcgcaagcctggcacgctccagcgccgcgccgatcacatgcgatccgagcttgtgcgcgggcagcggcgacaattcgcccatgaagcggccaagcggcgtacgggcggcggagacgatgacgacgggatcggcggcttcggccatgacgggactccctgcgatgacgtttaagattatgatcatcatatgatgcggcgcaagaaaagcaaccgcggcagagatgagaaaatgtcgtggttcggatgagatttggtcgatcagtcctcgccgtcattgtccgcctggtgcgcaattgcgcaggggcgggcaatccggtatttcccgaggcggcgcggctggatccgagaaaccgcggcgcctggatgcctcgcttccgcggggcatgacagcgtcggtgcagcgcctatcgcttccggttcacgaaagcgcccatcagccgcgtcggctcgtccgtcaggaaagactcgccgaacaccttcacgctgagattcaccgattcggtcagcggcaattcctcccatcgccgcagcagagccttctgcgatcgcagtgcctcgggaccgcattcgagcagcgccttgacggtgcgctcgatctccgcatccagttctcctggcgcggcgaccttgtcgaccaggccccaggccagcgccgtggacgcatcgatgttctccgccgtcatcaccagccagcgcgcccgggcccagccgatcaggcgcggcaggagcgccgcgtggatcaccgaggggatgccgacgcgcacctccggcatgccgaaatgcgcatcgtgcgcggcgatgcggaagtcgcaggccgccgccacttcgagcccgccgccgaggcaccagccgggcatgcgtgcgatcaccggggcaggaaactgacgaacggcctcgcagagatcgcgcaggcggctgatgaaggcttcggccgacttctggtcgagcttggccatctccttgatgtcggcaccgccgatcatgcttttctcgctctggccgcgcagcaccacgacacggatgctgcggtcggacgcgagctgctgcaggccttcgcgcaccgcctcggtcaccggcgaacccagaatgttgagcggaccggcgttgcagatcgtgacatggacgatgccgcgctcatcgcgcgtcacgccgcagtggttgttgagcatttccatcgtggcatctcgaagctttcgtgggcggggcgaggcgcactgccggggcccacttccgggccgaaacgtaccgcttgtcaagctggctgacgggttgagtttgccagcgcgaagtccgtgatatagtatgatgtatatcatctaatggggtggccatgaccgacatcgatcagttcaagcttttctcaccggcgcagcgacgcgagcgggtggtggactggcaggtgcctgcgccggtcgcacgagccgccatgacgctttcgggcatggacgccatgcgcgccattcgcgacggccggctgccgccgccgcctttcgcaaagctgatcgggttcactatggccgcggtcgagccgggccgcatcgtcatggaactggagccgcgcgaggatctcgaaaataccatcggccttctgcacggggcgacggcggcggcgctgctcgataccgcgatgggatgcgcgatctcgacccgtctggaggcggggcagagctcggtgacgctcgacctgaagatgaccttcctgcgtccgctgtcggttcgctcaggcctgatctcggccgaggggagggtcatcaagctggggcgtcagaccagctacaccgaaggcttcgtccgcgacggcaaggaggcccttgcggtccatgcaactgcaaccttttcgatgatcggtgcagcttaacgtgaattaatgcacccgtttcggcgttcgcgtgttatgagatgaccttcgacattcaatgagacccgcatgcgctattccccggaacacaagcaggaaacccacgaccgtatcgtgaggaaggcctcggtgcggctgcgcgaaaagggagcccatggcatcggggtcgccgatctcatgaaggaggcgggcctcacccatggcggcttctacgcgcatttcgactcgcgcgaagcgctggtgatcgaggccttcggctatgccatggaccgctcgatggagcattggcgcaagatcaccggcgaggtgtcgccggagaagcggctggcgctgatcgcagaggcctatctctcggcgttgcaccgcgataatcccggccatggctgctcgattcccgcgcttggcgccgagatcgcccgggagagcccgaaaacgcgaaaggcctttgccggcaagctcgaggagatgatcgagcggctggccgactgtgtcccgaaccagccacgcaaggctgctcgcaagcaggccatcgcgacgctggcgacaatggccggcaccatgctgctggcgcgcatcgccggatcgggcgaattgtccgatgaggtgctgaaggcgggccgcgacagcgtgctcgagggagccaagcgcgagccgaaggtcggggcggcgaagaaggcgaagacttaggcgagatgaggtgggtagaggcgcgcatgcgccgtgccctccatccctcacgagcgcggcgctaccgccccgaaaacaacgcccgctcccgctccacgatctcgccgatgtaatcggccaccgcccggattcgcgccagatccttgctgtcggcgtgcatcagcatccagaacgtccgggtgatcgaaatttcctccggcagcaccggaacgagctgcggatagtcgctcgccatgaattgcggcagcacggcgatgccgaacccggagagggtggcattgagctgagcgatcaggttggcgctgcggaagcgtgcggaaatgcgcggcgacacctggggaagataatcgagctccggggtgaacaagagctcctcgatgtagccgacgaagcggtgctgcgtcaggtcctgccgcgatgtgatctcagggaagcgatcgagatagccaggcgcggcatagagcccgagacgatagtcgagcagcttgcgcccgacgatgcggccttccttcggcatggtcaggctgatcgcgatgtcggcctcgcgcttggagagactgaacagtcgcgcagtagctacaagttgtagatcgaggtcgggataacggtcggcgaagggggcgagccgcggcgccaggaacgcggtgccgaacccgtcgggcgcaccgatccgcaccgtgccggtcagccgcgccaccgagccgccgacctgttcctggttggcgacgatggtcgattccatcgcttccgcactgtctgcgacacgctggccggcttcggtgaggagatacccggtcttgcgccggtcaaacagttttgcagaaaggtgcttttccaaccgatcgacgcggcgaatcacggtggcgtggtcgacgcccagctgttttgccgcagccgagaccgagccgccccgcacgatggccagcacgaagcgaaagtcgtcccagtcgatagcgccttgatccggcattttcgcacatctatggtgcattatctcagacttgaatcctataaaatgcaggtcaataggatttgtcaaagcgaccacgctcggcctgaaggagatcattccatgcgttcaatcggacatttcatcggcggcaaggaggtcaagggcacctcgggccgcacggccgacgttttcgagccgatgaccggtgacgtgcaggcgaaggtcgcgctggcgtccaaggccgaggttcgcgccgccgtcgaaaacgcgcgcgcggcacagccggaatgggccgcgaccaatccgcagcgccgcgcccgcgtgatgatgaaattcctggagctgatccagcgcgattacgacaagctcgcggagttgctcgcgcgtgagcacggcaagaccgtgcctgatgccaagggcgacatccagcgcggcctcgaagtcgtcgaattcgcctgcggcatcccgcacctgatgaagggcgagtacaccgaaggggccggccccggcatcgacatctattcgatgcgccagccgctcggcgtcgtcgccggaatcacgccgttcaacttcccggcgatgatcccgatgtggaagttcgcgcccgcgatcgcctgcggcaacgccttcatcctcaagccgtcggagcgcgatcccggcgtgccgatgaagctcgcagagctgatgatcgaggcgggcctgccggccggcatcctcaacgtcgtcaacggcgacaaggaagcggtcgacgccatcctcgacgatcccgatatcaaggccattggcttcgtcggctcgacgcccatcgcgcagtacatctatgagcgcgcggcgcagaccgggaagcgctgccagtgcttcggcggcgccaagaaccacgccatcgtcatgcccgacgccgacatggaccaggctgtcgacgcgctgatcggcgccggctacggctcggccggagaacgctgcatggccgtctcggtcgcggtgcccgtcggcaagtccaccgccgaccgcctcatggagaagctgatcccgcgcgtcgagtcgttgaagatcggcacctcgatcgacccgtcggccgattacggtccgctggtgacgcgcgaggcggtcgagaaggtcaagagctacattgacatcggcatcaaggaaggcgcgacgctggccgtcgacggccgcggcttcaagatgcagggctatgagaacggcttctatctcggaggctcgctgttcgacaacgtcaccaaggacatgcggatctacaaggaagagattttcggtcccgtgctctcggtcgtgcgcgcgcatgactacaaggaggcgctggcgctgccctccgagcatgactacggcaacggcgttgcgatcttcacccgcgacggcgacgccgcgcgcgacttcgccgccaaggtcaacgtcggcatggtcggcatcaacgtgccgatcccggtgccgatcgcctattacaccttcggcggctggaagaagtcgggcttcggcgacctcaaccagcacggtccggactcgatccgcttctacaccaagaccaagacggtgacctcgcgctggccgtccggcgtcaaggagggcgcggagttctcgatcccgctgatgaagtaaggctgtagcccagcgcgtcattgcgagagcgtagcgacgaagcaatccagagtctttctgagggggcagcgtggattgctttgctgtgctctcgatgacgctggataagagggtaagcggcaacgatgcagttcgctctgaacgaagatcagatcgcggttcgcgacatggcgctcgcgttcgcggcggaaaaaatcgcgccgcatacgctgcgctgggacgaggagaagcatttccccgtcgaggtcatgcgcgaggccgccacgctcggcatgggcggcatttacatccgcgacgatgtcggcggctccggcatgacacggttcgatgcggcgctgatcttcgaggcgctggcgacgggctgcccgaccacctcggctttcatctccattcacaacatggcgagctggatgatcgatgccttcggcagcgacacccagcggcaccaatggctgccgaagctctgcgccatggagctgatcgcgagctactgcctcaccgagccgggcgccggctcggacgccgcggcattgcgcacccgcgcagtgcgcgacggtgaccattacgtcctcaacggccagaagcagttcatctcgggcgccggcggcaccgacctcctggttgcgatggtgcgaaccggcggcgacggccccggtggcatctcgacgctcgtcatcgacggcaagactccgggcgtctcgttcggcgccaacgagcgcaagatgggctggaacgcgcagccgacccgcgcggtgatgttcgagaacgcccgcgtgccagtcgctaaccggctgagcgaagagggtatgggcttcaagatcgcgatggccggcctcgacggcggccggctcaacatcacggcgtgctcgctcgggggtgcgcagaccgcactcgacaaggcgcgcagctacatgaaagagcgcaaggcgttcggaaagcggctggacgaattccaggcgctgcagttccgccttgcggacatggccatcgagctcgaagccgcccgcactttcctgtggcgcgcagccgcggcactcgaccggaaggaccccgacgccaccatgctctgcgcgatggccaagcggttcggcaccgatgtgggcttcgaggtcgccaaccacgcgctgcagcttcacggcggttacggttacctcagcgaatacggcatcgagaagatcgtgcgcgacctgcgcgtgcaccagatcctcgaaggcaccaacgaaatcatgcgtctcatcgtggcgcgcaaactgatcgagggcgcccgatgagcggagtggacgagggggatctcatcgttcgccgtgagggcgcagcgggggtgatccggctcaaccggccgaaggcgctcaatgccatgacgctggaaatgtccatcggcatcgacgcggcgctcgaccgcttcgagagcgatcctgaggtcgggctgatcatcctggaaggcgctggcgagcggggcctctgcgccggtggcgacatccgcggcctctgggagagctcacgcgaaggcggcgatctcggtgcgcggttctggcgccaggaatacgtcatgaatgcacggatcgcgaagtatccgaagccttatgtggcgttcatggatggcctcgtcatgggtggcggtgtcggtctttccggccatgccagccatcgtgtcgtgacggatcgcaccaagctcgcaatgcccgaagtcgggctcggcttcttcccggatgtcggcggcacctggctcctctcgcgctcgcccggcgagatcggcacctatttcggcctcaccggccagaccatgaacgggcccgacgcgatccacgccaggttcgcggacgccgtggtgccagtggccaaatggccggaactgcgcgaggcgttggccaaagttcgccaaggcgcgaccgcagccgatgtgaccaggctgatcgatggttttgcaacgggcgagaccgccgggccggttgccgcgaagcaggcgacgatcgatgcgctgttcggcttcgaccgcatggaggacatcttcgcggcgctcgcgcgcgacggctccgaattcgcgatggccacgctcaagacgctcaacgagaagtcgccgcgtggcatggtggtgacgctgaagctgttgcgcctcgcgcgcgccgcatcgagcctggaagactgcctggttcgcgaatatcgcgccgcgcttgaagtgttccgcagcgacgatttccgcgagggcgtgcgcgcggccgtgatcgacaaggaccgcaatccgagttggtcaccgccgcggatcgaggatgtgacgccggagatgcttgcgccgtatctcgccgagatcggcgccgacgagctgaggttcaactagtgtgaaatctcgtcaaatcgatgcggaagaattcggaccacctctccctgccggggagaggtggttccaaagctgccaactgtgctgaatttgaaatagatcagcgtctcaagcgggaggaaacgacaatggccacgatcgcattcatcggtctcggcaacatgggtggcccgatggccgccaatctggtcaaggccggccacaaggtcgtggcgttcgacctcgtcgaggcctcgcgcaatcaggccaaggccgatggtgccagcgttgcggaaagcgcatcaggggccgtgaagggcgccgaagtcgtcgtcaccatgctgccggcgggcaagcatgtgctcggcgtctggaacgaggtcgtccccgccatgaccaagggcgcgctgatcatcgacagctccaccatcgacgtcgagagcgccagggccgcgcatgcgctagctgccaagcacggcgtgctctcggtcgacgcgcccgtctccggggggaccggcggcgccaagggcgcaacgctcaccttcatgtgcggcggcgaagagaaggcgttcgcggccgccaaaccggtgctcgagaatatgggcaagaagatcgtgcattgcggcggtgccggcgcgggtcaggcggcaaagatctgcaacaacatgatcctcggcgtctccatgatcgcggtggcgaggcttttgccctgggcgagaagcttggcctttcgcatcaggcgctgttcgatgtcgcctcgacctcgtcaggccagtgctggtcgctgacgacctattgcccggtgccgggcccggtgccgacctcgccggcgaacaacgactacaagccgggctttgcctcggcgctgatggtgaaggatctgaccttggcgcaggacgcggcgaaggctgcgggcgcggcgacgccgctcggcaagcatgcgcaggagatttatcagtctttcgacgcagccggacagggcggggtggatttttccggaattatcaagcacgttaggagtctggccgggaaagtttgatgacgacatttcaggaagcgcgcgcgtttctgctaaagcaccgcacggattacgaggcagcggtcaaaggattccgctggcccgatccggctcctttcaactgggcgctcgactggttcgacgccgatctggcggcgaatccggacagcaaggatcgtgctgcgctctggatcgtcgacgccgcgcaggacaagcagaccaagctctccttcgcggcgctctcgaagcgctcgaaccaggtcgcgaatttcctccgtgcgcaagggctcaggcgcggcgatcacctcttgctgctgctcggcaacgtggttccgctctgggagacgatgctggcggcgatgaagctcggcgttgtcgtgatcccagcgaccacgctgctgaccgccaacgaacttcgcgaccggctcgatcgcggcaaggcgaaagcggtggtggcggccgaggaccaggtggccaagttcgcgagccttggtaccgagaatgtcgtccgcatcgtggtcggcgcggcgcccgatggatggctgacctatgacgaggcagcgaaagccgcggagagtttcacgcctgacggtccgaccaatgccgacgacccgatgctgctttatttcacttcaggcaccacggcaaagccaaagctggtgcggcacagccagcgcagctatcccgtcggccatctctccaccatgtactggatcggattgaagcccggcgacatccacctcaacatctcctcgcccggctgggccaagcacgcctggagctgcttcttcgcgccttggaacgcgggtgcgaccgtgttcgtggtcaaccagccgcgcttcgatgccaaggcgctgctcgccaccatcggccgctgcggcgtcaccacgctgtgcgcgccgccgacggtgtggcggctgttcatccaggagaacctggcctcgttcaaggtggccctgcgcgaggtctgcggcgccggcgaaccgctgaacccggaggtgatcgatcaggtgcgggcggcctgggggctcaccatccgtgacggatatggccagaccgaaaccacggcgcttgccggcaactcgcccggccagaagatcaaggtcggctcgatgggccggccgctgccgggctatcgcgtgcagatcagcgatgccgacggcaatccggcgaaggaaggcgaggtcacgctgatgctgggcgccgatcgtcccgccggcttgatgcagggctatcagggcgacgacggcaagctgtctggcgccgaaggcgagctctatcgcagcggcgacgtggtcttcgaagacgacgagggctatctcaccttcgtcggccgcgccgacgacgtgttcaaatcatcggattaccgcatcagtccgttcgagctcgagagcgtgctgctcgagcatgagctggtcgcggaagcggcggtggtgccgagccccgacccgattcggctcgccatcccaaaggccttcgtgctgctgacgtcgggcacggagcgttcacccgagaccgcgctctccatcttcaaacatcttcacacgcgccttgcgccattcaagcgcatccgtcgtctcgaaatcgtaaccgagctgccgaagacgatctcgggaaagatccgtcgcgtccagctacgacggctggagcgcgacaatgatcgcgacgatccgctgcgcggccgggaattccgcgaggaggatttcccggagctgtcaaagattcggggcgaaagctaggtgaacgaagagagcgcgtcattccggggcgatgcgcagcatcgaacccggaatgacagtggttggagtcatgaatgaacgaagtctggaagaagccgcccatcacgctcgaggcctatcaggccatggtcggcaaggagatcggcgtgtcgtcgtggcacctgatcgaccaaccccgtatcgacacctatgccgacgtgatcgaggatcaccagttcatccacgtcgatccggaacgcgcgaagagagagaccgcgttcggcactaccatcgcgcacggctttctcacgatgtcgctgctgtcgatcatgtcctacgaggtgatgccggtgatcgccggcaccacgatgggcgtgaactacggcttcgacaagctgcgtttcatctcgccagtgcgcgcgggcaagcgcgtgcgcggccgcttcgtgctggcggaagcgaagctccgcaagcccaacgaattgcagtcccgcaccaacgtcactgtggagatcgaaggcgaggacaagcccgcgctcgtcgccgactggctcggcctgatctatttcgcgtaagtcccggccgggcttgacccggtcctccatcgctgctcaaaaagccggtcaaatcgcgctcggtgccccctctgcccttgtgggagagggtggcttcgcggaacgcgaagccgggtgaggggtgtctctccacgaactcggctgccgagagataccctcatccggcgccgtagccgacgctacgcgtcggcgtccattttaggtacggcggccgtaggccgccgatggccaccttctcccacaaggggagaaggaagaaaggaagcacactcatggcaatcaggttcgacggacgcgtcgccatcgtcaccggcgcgggcaatggtctcggcaaggcgcacgcgctggggttggccagccgcggcgccaaggtcgtggtcaacgatttcggcggcgcgcgtgacggcaccggcggctcgctgtcgccggcggaggcggtggttgaggagatccgcaaagcgggtggcaccgcgatggccgacggcgcggacgtgtcgaatttcgagcaggtcaccgccatggtcgagcgcgccaccaaggaatggggcagcgtcgatcttctctgcgccaatgccggcatcctccgcgacaaatcgttcggcaagatggaggtggccgatttccagaaggtgctcgacgtgcatctcgtcggcaccttctattgctgcaaggcggcctgggccggcatgcgcgatcgcaattacggccgcatcgtgctgacgacgtcgtcctcggggctctacggcaatttcggccaggccaattacggcgcggcgaaatccggcatggttggcctgatgaacgtgctggccgaggaaggccgcaagaacaacattcgcgtcaacatcatctcgcccaccgcggcaacccgcatgaccgaagagctgctgccgccgcaggcgctgcaattgatgaagccgaacgcgatcacgccggcggtcgagtacatgctgagcgaggacgcgccgacccgcaccatcatgggtgccggcgccggctcgttcgccgtgatcaagatattggagagcgagggcatcaacctgccggaatccgaatggactccggacgcggtggccgcgcatttcgccgagatcagcgacatgtcgaaggcgagggcgttgacgggtgccttcgagcagacgcagaaatatgtggcgcaagccgcggcaagggcgggcatcaagctgtagttttccgtcattccggggcgcccgaagggcgagccccggaatccgtcctgccaccgcctctgccgcccaatggattccgggcacgcgcgaggcgcgccccggaatgacgagctagacgcgaggacctggcctggactcccgctatgacatcacctgacaaccacgtcgccatcatcggcgccggtcccgccgggctgatggctgcggaggtgctggcgcagggcggcatccgcgtcaccgtctatgacgccatgccatcggcaggccgcaaattcctgatggccggccgcggcggcctcaatctcacccacagcgagccgttgccgcagttcatggcgcgctatcgcgaggcggcgccgaagctgcacgcggcgatcgccgcgttccctccggacgcgctacgcacctggagcgaggcgctgggcgagccgaccttcatcggcaccagcggccgcgtgtttccgaaggcgttcaaggcctcgcccttgctgcgcgcctggctgcggcggctcgatgccgccggcgtgcgctttgcgtttcgtcatcgctggatcgggtgggacgacgaggggaggctggcgtttcaaacgatcgatggcacgaaggctgtcactgccgacgccaccgtgctggcgctcggtggtgcaagctggccgcggctgggctcggacggcggctgggcgagcatcctggccgacagaggcatcgccatctcgccgcttcggcccgccaattccggcttcacagttagctggtccgacgtcttccgcgcgcgcttcgaggggcagccgctcaaggggatcgcgctgagcttcggtctgcacaggcttcgcggcgaggctgttgtcacgcagtccggcatcgagggcggcgtgatctatgcgctgtcagccgaactgcgcgaggcgatcgccgtgaagcacgaggcggtgctgcacgtcgccttgcgcccggacatcgatcagctcgagcttgccagacgcctgtccgcaccgcgcggcaagcaatcgctctccaacttcctgcgcaaggctgtgcagctttcgcccgtcgccgtcgggctgttgcaggaagccacgatcaatgcaggccagtcgttgtcgacgatgtcgccggaacgattggcggagttcatcaacgccgtgccgatcaagctgaccggggtggcgccgattgcgcgcgcgatatcgagtgccggcggcatctcgttcgatgagctcgatgctgattacatgatccgcaagctgcccggcgtgttcgccgccggcgagatgctggactgggaagcgccgaccggcggctatctgctccagtcgtcctttgcgaccggtgccgccgcgggcaggggcgcgctggagtggctgaagcgctacttaccgtcattgcgggcgagttcctcgcaatgacggtcgcgaagcagagggcgcctaccgcagcttcccccttgctgccaccggcagcgtgccgatgatctcttcgccgcgcaccatcaccacttcgtccatcatgttgacgaccacgcagacatggttcggcacgatgcgaacgacatcgcccacattggggcgggtgttgctgcgggagaggtcgaggaagccgtgctcctcggcgaacttcgcgattttcgcttcggggtgctcgaggatcaggccgtgaccatcgaggccgccggtatctgtcgtcagcgtcttcgagccggcatcgaggatgccgcgctcgggcgcggcgcggctcaccacggtggaatagatgtgcagcgcgcagtcgtcccagctggcgacgccggccgccacctgcatgcggtcgttataaatataggtgccgaagcggtgctcggtgccgcccttcagcttgccgagattcttcaggttcggcgtgcctccggtggagacgatcttggcatccagcccgtgtgcccgcacgccggccaatgcttcgtcgtaaaacttctgcgcctcggcccagccggtctcggtcggatacagcatgaagccggcaaactcgagtcccttcgaccccgcgatctcacgcgccagcgcaatcgcttcggccggcgtctcgacacctgcacgcttgcggcctgtgtcgcattcgaccacgaccgagagcgtacgccctgatgtcgccgctgccttgggcaaccccgcgacgaccgtggaattgtcggcagcgaccgtcattttggccttcgtctgcaatgcagccagccgcgccatcttctcctcgccgaggagattatagctgatcaggatgtcgtcgatgccggcattggccatgatttcggcctcgccgagcttctggcaggtgatgcccttggctccggccgcgacctgcatcttggcgatggtcgggttcttgtgcgtcttgatgtgaggacggttggcgactcccgcatcgtcgcaggccttctgaatccgcgcgatgttgcgctcgacccggtccaaatcgatgaccgcgcagggcgtgccgtattcacgggcgatctttgcggcgagggacgtcgtcatgatctaagcctgctctatctcttcgcgaagcatttcaagttcgagccagcgctcctcggcggcggacagttcttcgtgcgccttggcgatggcggccgatgtatcgtcgaatgtcttgcgatccttggcatagaggttgggatcgtccagcacgcgctgcagccttgcaatgtcggcctgcaacgtctccatcttcttcggcagcgtttccagcgcgtgcttctcgttgaagctcagcttccgtttgggagcggatgcgggagcagccggccgctcctctttcttctccgccaccggctgggccttcgccgtctcgcgcttcaggtcggcgccgcgctgcaccagcatgtcgctgtagccgccggcatattcgatccacctgccgttgccctcgggtgcgatcacggaggtgacgacgcggtcgaggaagtcgcgatcgtggctgatcaggatgaccgtgccgtcatagtcgccgagcatctcctcgagcacgtcgagggtctccagatcgagatcgttggtcggctcgtcgagcaccaggaggttcgagggctttgccagtgcgcgggccagcatcagccggccgcgctcgccgcccgagagcacttcgagcggcgtgccgcgttgctcctgcgcgaacaggaagtctttcatgtagcccaccacatgcttcggcttgccgccgaccatgatgtgatcgccgcgaccgccggtgagggcttccgccagcgtcgacttgggatcgaggctttcacggtgctggtcgagcgttgccatctccagattggctcccagccgcaccgtgccggaatcaggctgcatcgcgccggtcagcagattgacaagggtggtcttgccggccccattcgggccgatgatgccgagccggtcgccgcgctggatccgggtcgagaaattgtcgacgatcttgcgctcgccataggtcttgctgatgcccttggcctcgatcacgagcttgccggattgctccgcttccgctgcagcgaggttggcgctgccggcggtgccgcgatagttgcggcgctggtcgcgtagcgcatgcagattggcgaggcgcttgacgttgcgcttgcggcggccggaaacgccgtggcggagccaatgctcctcgtcgacgatcttgcggtcgagcttgtgctggtcgcgctcctcctccgcgagcacctcatcgcgccaggcctcgaacgaggcgaagccgcggtcgatctgcttgatcttgccgcggtcgagccaggcggtggagcgggagagattggtgaggaagcgacggtcgtggctgatgatcaccagcgcgctgcggcggctgtcgagctcctgctccagccactcgatggtggagagatcgaggtggttggtcggctcgtccagcagcaggatgtcgggcgagggcgccagcacataggccagcgctgcgcggcgcgcctcgccgccggagagattgtgcgggttctcctcgccggtgagtccgagctgctcgaggagatagcgcgcctggtgctggtcgtccccgggcgcgagcccggactcgacataggcgagcgtggtctcgtgctcgccgaaatccggctcctgcggcagatagcgaacagtggcgccgggctgcacgaagcgcgtgccgccgtcgggctcgacgaggccggcagcgattttgagcagcgtcgatttgccggagccgttgcggccgatcaggcagacccgttcactcggggcgacgttgagctcgacgcccgacagcagcggcgtgccgccgaaggtcaacctgatgtctttcagctggatcagcggcggcgccatgatcaaccccgactcgtggccgtcgcatcagcgcggcggcgggcgatccggcgcagcgtctggtcgagtgccgagaggaaagcggaacggtcgcgcggcgcgaacgatcgaggcccgccggtgacttcgccggccgagcgcagatcggtcatcagattgcgaaccgcgagcgtcattccaatcgactcttccgtgaatggtttgccgttcggcgcgatcacgtcggcgcccgccttgacgcagcggctcgccagcgggatgtccgaggtcacgacgatgtcgccgggtctggcgcgctcggcgatccagtcgtcggccgcgtccatgccggcgcctgcggcgatgcgctcgatcgatgggtcctgcggcacccgaatgaaattgccggcgacgacgctcaccggcacaccgtgccggagcgcgacgcgatagatctcgtccttcaccggacaggcgtcggcgtcgacatagatgcgggtgggggtgtcgctcattcgccgcgtggtaccccatccgggccgcaaaggcgaggggattgaccgctgttcccgggggcttacgatccaccctgaaacaagaatatggggaacgccaaaccatgccgaaccggctcgaaacctaccgcgtcgaggcctacaacaccgccaaacaatccgaaaataagatgcacgacgataccgtggcccgccgcttcggcttttccggcgggctggtcccgggcgtcgacgtcttcgcctacatgatgcacgtgccgaccgttcgctgggggcgggacttcctgtcgcgcgggctgatcgaggcgcgcttcatcaagcccgtctatgacggcgagaccgccgacgtggacgcgatggagcacaacgacctgctcacgatcgaggtgttcagccgcaccgagctgtgcgccacggggacggcgtcgctgccggcggctgcgccggccgtctcgctgagcgactatgttgcggtcccagccgtcgccgagcgcacgccggtcagccccgcgacgttcgaaacgggcaaatggttcggcacaacaccccgacgctgggccgggcaggacgccgctgattatcttgcggacatcagggagttcgatccgatcttcgcgcgcgaggggcttggccatcccggcctgatccagcgggtgatgaaccgcgtgctggtcgacaacaccatcctgggcccgtggattcacgtcggcagccgcatgcagctgttgtcggcggcgcgcgtcggtgacgagatcagtgcgcgcgccaaggtcactgcgaactacgaaaagaagggccaccgcttcgtcgagttcgacgccctcgtcgtcgccaacggcacgacgccgctcgctcattgccagcacaccgcgatctaccagccgcgcgagcaggcggcagcgtaggtgttgactgtcattccggggcggtccgcgaggaccgaacccggaatctcgaggttctcaggtgcnnnnnnnnnngtgcgcaccgtagttcgatgcgttgcatcgccccggaacgacgaatccacccttacgccgccttggccttcgcctcctggatcgcgcgccacacgcgctcgggggtcagcggcatgtcaatgtgcttgatgccgtactcggacagcgcatcgatcacggcgttcaccaccgtcgacaggctgccggcgcaaccggcttcgccgcagcccttgctgccgagcggattggtcgtggccggcaccgggtggtcgccgacggtcatgttcggcacgtcctcggcgcgtggcagggcgtaatccatcaacgagcccgtgatcggctggccgctctcgtcgtagcggacatgctccatcagcgcctggccgatgccttggaccacgccgccatggagctggcccgcgaccagcatcgggttgatcaccgtgccgaaatcgttgaccgcgctgtagcgcacgatctgcaccacgccggtctcgggatcgatctcgacctcggcgacgtggcagccgttcgggaatgcggaggcgatcggttcgctggtgtgatcgacgtcgagcgtatcaggcacgccctccggcaccttgccgtcatgcagtttcttggccagctccatgatgtcgatgctgcgatcggtgcccgcgatcgtgaacctgccatcggcgaattcgatgtcggcctcggacgcttcgagcatatgcgccgcagcgcgcttgcctttctcgatgaccagctttgccgcgccaacgatggcctggccgctcgccatgatcgagcgcgagccgccggtgccgttgccggtgtgcacgatgtcgctgtcgccctgcaccagcttgatgctgtcgaagggcacccccaattgcgcgctcagcacctgcgcgaacggcgtggcatggccctggccatagtcgagcgtgccggtgatgagctgcacggtgccgtcggcgtcgaacacgatcttgcccagctcggggctcggcggcgccgtgacctcgagataggaaccgaccgcgatgccgcgcagcttgccggccttcctgctttccttcttgcgcttggcgaaattctcgtggtcggagatttcgagcgccttgttgaatacggcctggaagtcgccgctgtcataggtgacaccggaggaggccgcgaacgggatctggttcggcttgatgaagttgcgcttgcgcaaggccagccggtcgatgcccatctcgtcggcggcgcggtcgatcaggcgttccatgtagtagttcgcctcgggccggccggcgccgcgataggcgcccatcaacgtggtgttggtgagcaccaccttgatgtcgacggccatcagcggcgtgcgatagacgctggaaaaattcttgccggtgttgagcgagagcgggcccggcgcaacgccggtgatgtaggcgccgagattgccataaccggaaagcttcgccgctaggaaatgcccgtcggcatcgagcgcgagctcggcatggatcttctgcgcacggccatggctgtcggagaggaaggcggtcgagcgttcatcgagccatttcaccgggcggcccagcgtcttggccgcgtaaaggatgcacatatattccggatagttgatgttcttcatgccgaaggagccgccgacattggcggtgaggatgcgaaccttctcgttcggcactttcaagttcttggcgagattggtgcggttgccggccacgccttgcgtcggcacctgaagcgtgtagcgctcggtcttcttgtcataggaggcaagaccgacgcgcggctccatcgagaccacggcgacacgggtgttctcgatgtcgagcttggtcacatgagcggcgctggcaaaagcggcgttcaccttctccgtgtcgccataatgatagtcgagcgccacgttgttggggatgtggtcgtaaagctgcggcgcgccgggcctggaagcttcctcaggatcagtcaccgcgggcagcggctcgatatcgagctcgaccgcctcggccgcatcacgcgcctgtgccagcgtctctgcgacaacgaaggcgacgggatcgccgacgaagcggaccttgtcggtcgcgagcggctggcggttggtctggcgcaggggcgagccgtcacggctcttcaggggcaggccgcaggtgaaggggccgtagccggcggcatcgagatctttcccggtccatacccccagcacgcccggcatcgccttggcggcctcgatgccgatcccacgaatgacgccatgggcatgggtggagcggacgaccacggcataggcctggcccggcaggttgaaatcgtcggtgtagcggcccttgccgcgcaccagcgtgtcgtcctccttccggcggaccggttgtccgacgccgtacttttgcagtgcaatagcgttctcgagcgtggtcgatttggtgtgttcttgcatggaattgacctgaaaaaccggcatttgcgcattttcgcggcagcagggcaccggacctctctcagataacccacgcccccgttcacgacaacgcacgaatgggcatggtcccatgtgatgcgttgttgcgcaggcctgccgcgctgctaatgtttcaagcgaaaaatcaattccagaccggccagattggccgcggaaagacagtttgtatgaatgaccacacgcggctcggtgacggccatgggccgcacggcgagctggaggggtcgatggcggcggtggcgttggccaccaaaccttccatccccgcacaggcggcgggaaccggcgtctatgcggcgctggacctcggcaccaacaattgcagactgctgattgcctgtccgacccaggacggttttcgcgtggtcgattccttctcgcgcatcatccggctcggcgaaggggtctcggcgacggggtgcatcagcgaagctgcgatcgagcgcgccatcgcggcgctcagcatctgccgcgacaagatcaatctgcggaaggcgcggcggttgcggctgatcgcgaccgaggcctgccgcgcggcctcgaacgcggagggttttcgcagccgcgttgccgccgagaccggcatcgagctcgaggtgatcgaccgcgagaccgaagccgcgctcgccgtgctcggctgctcgccgctgatcgatcccagaggacgcggcgcgatcctgttcgacatcggcggcggctcgacggagctggtgcggatcgagcgcgatcccgcagatccggaaccgcgcatcaaggcctggatgtcgattccctacggtgtggtcacgctcgccgagcagttcggcggtcgggacgtgacgcccgggatctatgccgcgatggagcaggaggtcgccagccatgtcgcgccgttcgcagaagagcacggtcgcgagctcgccgacatgcatctgctcggcacgtcgggcacggtgacgacgctcgccggcattcacctcaatctcgcccgctacgaccggcgccgcatcgacagcatctggatgaacgacgccgacatcaccgcgaccatcagcaagctgctgggcatgagctacgaggagcgcgccgccaacagctgcatcagcgtcgagcgcgccgatctcgtgctggccggctgcgccatcctcgatgccatccggcgcgcctttccgctgccgcgcctgcgcgttgccgaccgcggcctgcgcgagggcatgctggtcgagatgatgcgcgaggacggcgcgctcaggagctggtgacatggccaaggacaccaccggccgcttgcacgtccaggtcaagaccggcggcaagcgcaaactgtcgtcgaagctgtggctggagcggcagctcaatgatccctatgtcgccaaggccaaggcagccggctatcgctcgcgcgcggctttcaagctcctcgagatcgatgacaagtatcggctgttgaaacccggcatggccgtggtcgatctcggcgccgcgccggggggctggagtcagatcgcggccaagcgcgtcggctcgacggagggcaagggcaaggtcgtcgccatcgatctgttggagatgcccgagattcccggcgtcgatttcgcgcagctcgatttcatggacaatgatgcccccgacaagctcaccgcgatgctcggcggcaaggccgatgtcgtgatgtccgacatggccgccaacacgaccggacaccgcaagaccgaccagctccgcatcgtcggcctggtcgagaccgcggctgcgtttgcccgcgatgtgctcaagccgggcggcacgttcctcgccaagacgttccagagcggcgccgatgccgacctgctcgcccagctcaaacgcgattttgcagcggtgcgccacgtcaagccggcggcgagccggcaggattcctcggaacgctacgtgctggcgacggggtttcggggcggggaaacggcgtagccgcaagctacagggactgcgctaccccagccgctgatcccgcacgtcctgcgtatcctccgacgccgccttgaccgccgccttctcggcacccttgcccgcgcccttgcggctggcgatctcgaccgcctttcggccggagatctcgtggccggcatcggcgggcatctgccagaagaaccagctggacgccgccgaggccagcgcgaccacgacgaaagccggcgcgaacacggtggcgttgagctcgctgacatgactgaaccacatcgtcgtctcgacgcaggccgcaccgagcgcgacgcccgcggagaccgccagctgctggttgacgctgacgagcgtcgtggcgcggctcatctgcgcggtctcgacctcggcataggccaccgtgttgatcgcggtgaactccagcgagcggaagaagccgccgaccaccaggatgaccatgatgatgagcagcggcgtcgtcaccgtgaacagggcgcagacgccgaggaagaaggcgctgatgatcgcattcaccgtcatcaggttgcggaagccgaaggtgcggatgatccgcgccgccagcgtcttcattcccatggctcctaacgaggaggcaaaggtgacgagacccgaatggaacggcgagaggccgaaaccgatctgcatcagcagcggcagcaggaaaggcagtgcgccgataccgagccggaacaggaagccgcccaacacggccgcccgcagcgtcggcagcctcagaagcgaaaaatccagcacgggcgacccggtgcgccgcgcgtgaatgacgtagagcgtcatcgagatcgcaccacctgcgatcaacgcggcaaccgtgctccagggcaacaggttgagaccggcaaccgacaggccgaaggcgatacccgcgaggccgatgcccgcgagcaccatgccatagagatcgaacggctcgcgttcctcgctcttgatgggatcgatgtagcgcagcgccatgaagatgccgagcaacccgatcgggatgttgatcaggaagatccagtgccaggatgcgtaggtcgtgatgaagccgccgagcggcggtccgatcacggggccgatgagggcggggacggtgacccaggccatcgcattgaccagcgcgctcttgtcgaccgagcgcagcagcacgaggcgcccgaccggtgtcatcatcgccccgcccatgccctgcaggatgcgcgcgaacacgaagtcggtgaccgaggtcgagagcgcgcaaccgaccgagccgaccatgaacacaccgaccgcgatcgcgaacaccatccgcgccccgaaccgatcggcggtccagccgctcgccgggatgaacaccgcgagggatagaagataggacgtgatcgcgagcttcagcgtcagcgggctggtgccgatgtcggcggcgatcgccggcagcgaagtggcgatgacagtggaatccatgttctccatgaagagagcagtggccacgatcagcggaatgacgcgttgcttgtcgaccatgaggatcggtaacgaaaatcggaaaggacgggtgcagtttgcggcttaacaccgccgcccggcggcgaccatcgctgatcggcgcatggcacctaaaccctgcgtgaaaacggtgtgactctgcgcctccgtcattctggggccgccgcttccgctctctcatcgttcccgggcatgctccggaatgacggtcagggtgctgtcgcgtggggccgagatcgccgattccggctcaaaaaaccctgtgcatggctggccagcggcccgaattgctttgattcgtcacgcggccgtgctatcgacccgcgtcaaccccaccgatgggctccgattctcaaggcgatgccgcaaggttcgccgtgggcggcgctcatccataagcatttgcggcagggccgcaggaaggagttggcaaatggccacggtgcaacttcagggcatccgcgaagcctttacgttcgacgacgtgctgttgaagccgggcctgtccgacgtcatgccgggcgaggtcgacatccgttcccgcgtcacccgcgccattccgctcaacattccgatcatggcctccgccatggacacggtcaccgaggcccgcatggcgatcgccatggcgcagtccggcggccttggcgtcatccaccgcaatttcgatccggaagggcaagctgctcaggtccgccaggtcaagcgctacgagtcgggcatggtggtgaacccgctcaccatcagccccgacgccacgctcgaggacgcgctgaagctgatgagcgatcacggcatctccggcattcccgtcgtcaccggcgccggcaagtccacgcccggcaagctggtgggcatcctcaccaaccgtgatgtgcgctttgcgaccaatcgccagcaaaagatctccgagctgatgacgcacgaaaacctcgttacggtccgggagaatgtcagccaggacgaggcgcggcggatgctgcatcagcatcgcatcgagaagcttctcgtcgtcgacgaccaatatcgctgcgtcggcctcatcaccgtgaaggacatggagaaggcggtcgcccatccgctcgcctgcaaggacgcccaggggcgcctgcgtgttgccgccgccaccaccgtcggcgacagcggtttcgagcgcaccgagcgactgatcgatgccggcgtcgacctcgtcgtcgtcgataccgcgcacggccattcccgtcatgtgctgcatgcggtgaaccgcatcaagcgcctgtcgaactccgtccaagtcgtcgccggcaacgtcgccaccacggaaggcgcgcaggcgctgatcgatgcgggggccgattgcatcaaggtcggcatcggcccgggctcgatctgcaccacgcgcatcgtcgccggcgtgggcgttccccagctcactgcgatcatggatgcggtggaagcggcgaagaaggccgacattcccgtcatcgccgacggcggcatcaagttctccggcgaccttgccaaggcgctcgccgccggtgccgacatcgcgatggtcggctcgctgctggcgggtaccgacgagacgcccggcgaagtattcttgtggcagggccgttcctacaaggcctatcgcggcatgggctcggtcggtgcgatggctcgcggctcggccgaccgctatttccagcaggacatcaaggacacgctcaagctcgtccctgaaggcattgagggccaggtaccctacaagggcgctgtcggccacgtcatgcaccagctcgccggcggcttgcgcgccgcgatgggctatgtcggtgcgcgcgacatgaaggagctgcacgagaaagcccagttcgtccgcatcaccggcgccggcctccgcgaaagccacgtccacgacgtcacgatcacgcgcgagagcccgaactatccgggcgggggttagttacgccgacgcaacgccatgtgatgggatcggcggagccgagtcattcagcttcgccgcatccggtcgcttgctgttcatcagcgaccagatcagcgcaacgggcgtcgccaggactgcccacagcgcttggccgtcgaggctgacccagctgttgacggttatgccggcgaggcagagcagagacgtcacgaaggccaggaaattcaacaggtagataaacaaaacgcaggggtgactgagaaagagcgcgatccacgttggcaggaagaggagagcaaaacctgcgagataatgtgccgcctcaccgagattaggggtgtcgtcagcgaaccacgccgagagcaccgggccgatcgcaaagatcaggaccggaaaggacgccagggcggccgtgactttccaagccatgctcttcgttgctgcgagacccatttgcccgatctgctgcctcagcgatgtcatttcctgtccaattttcgttttggatgttgatctctttggcaacgccgctgtgcacggcagaggcgaggtggtctctctcgtgcaccctagactggtggggtgatcacggccctaattcgccgcttaaaattctaacgaaggatggcgccggtcgcgttccctctcgtgccccggacgcggcgcagcaccgcgtccgggacgcgagagatgcgcgtgtcgaaacgtcactaaactccaccgcttttgtgttgacgcgccgctccgcctccgcttccgttcgcgccgaaacacaattcggaggaagcatgtcccaaggcaaacgcatcgttctcgccgcacgtcccgtcggcgaacccaagccgtctgattttcgcctggaggaattcgctgttccgacgccggggccgggcgaggtcctgctgcgcacgatctggctgtcgctcgatccctacatgcgggggcgcatgagcgaggggccgtcctacgcagctccggtgccggtcggcggggtgatggaaggcgaggcggtcagcgaagtcgcggcgtccaacaatcccgatttcgcagtcggcgacatcgtgcgcatccgctcgggatggcagacccatgcgatctcgaacgggaagggcctgatcaaggtcgatcccaagctcggtccgatctcgacctccatcggcgtgctcggcatgcccggcatgactgcctatacgggtctgctcgacatcggcaagccgcaacccggcgagaccgtcgtcgttgccggcgcttctggcgcggtcggctccgcggtgggccagatcgccaggatcaagggcgcccgcgcggtcggcatcgccggcggcaaggacaagtgcgactacgtcgtgaaggaactcggcttcgatgcctgcatcgatcaccgcgatcccgatctcgccgccaagctcaaggacgcctgccccaagggcatcgacgtctacttcgagaatgtcggcggcgccgtgttcgaggcggtcttcccgctgctcaatccgttcgcgcgtgtgccggtctgcggcctcatcgcccattacaacgacaccgaggccaagccgccgaaatgggccgcgagcctgatgcgcgcgaccctgaccaagcggctgacgttccgcggcttcatcgtgtccgacttcgccgcccgccatggcgacttcctgcgcgacatgtcgacctgggtccgcgagggtaaggtcaagtacaaggaattcgtcaccgaaggcctggagagtgcgccgggcgcgttcatcggcctgctgaagggagccaattttggcaagcagctggtgcgcgtcggaccggacaaggcttagcgcgacatcggccaggtctcacgtgcttccgtgccaagctggctcgtgggatggttaagaaagagtcaccaaatggtcacacctgcccgcaaaaaccgcaggtgtgaccgcctgttcgttgacggttcgacgaaggcattgaatcatcgcgcatattttaggtgctgcgatgttcgagatcagtattttctgcgtaatcctcctggccgccggctattgggcgaccatgttcatcatgggccgtcgcgacgacgtcatccatggcaggttcgtgcacacggaggaggagggcgatttcacgccggccgcgatgcccgcgccaccgccgtttccgaagcgtccggtgaaagctgcgcagtccgctggtattcagccagtcggcaccgaggccaagcccgtgaacagcgaggcgctgcaatccctgctcgccgcgatccagcaggatctcaagagcgtcgcttagtcactgctcgcccatctgggcaagcaattcctcaatatcgacatcgcgctggcccgccgccctgacgtgtcggacctcgagactgtcgggctggaagcggtattcgacgaggccgacttccttgaccgcgatgcggtcctgccgcttatcgttgatgacgaagcccgctgacggcgcccagacgtggcgggtgtggcgccaggtgaagtcgcggcgctggtgcacgtggccgctggcgaccagacgcaagtcgaccttcccgaacatctcgatcagccgcgctcgcgccggctgcggcacgtagcggatcgacgtctccggcgtctcggggtcgtcgggctggttgagaaacagcggcttgtgcaggaacagcgcgaccggcccgccgttcgtgcgcgaaatctcggaggcgagccaatcgaactgctgggcctcgaaaggcagccccgagttcatcaccagagaattgaggccgatgaagcgccagccacaggcctcgaacgaccaatggtcttcgccgatgatctcgcaaaactgcccgcgatgcgcctcgttgaccggaggcttcggcgccggaccgatcgtcgtcggattgtcgccgatatcgtgattgccggggagatagcggcaggaaacgggcagcgcgtcgtgcaagcccttcgcgaattcgacgtcgtcgcggcttgtcggcccgtcgaacgagacgtcgccggtgttgacgaccaggtcgggcctgccggcgtcgatgtggtcgccgatcgcctcgaagttggcgatcaggccgggaaagcgccggccgagatgggtgtcggaaatctgggtgaggcgaaattcgggcatgcgaccatcctagccgcggccgcgcgtcggaacgatgacggcgtaggtgggatcgcgacgaacaaagtttaaagcacgcggtagcggatcgtgtagccgtcctgcggtgcgaccgcgccggcgagcggcgatgcgattcggtcggccagatgccagggaccgaactgctcggagcgatgcggttgcgccggcagacgcaggcggaattcgaacgtgcccttgccgggcaggttcacgaccaggacgcggtcggccgtgcggtggttgagcgccaccgcgccgcgcagcaccgcccgcccgtcggcaagatcccgcacgccatcgaccagcgccagggtctggttgcgatcggtgtgcagctcgatctggctgtcggtgaccgccgccagcatctcccgcggcatgcggatctcgaattcgatggcgggcttggacggattgaggccgagataagcaagcgccgcgtggcgcatgtcgtaggcggcaaaggcgaacaaggcgagtgcagcgaacgcagccaggccatgccgggcgacatcgcgccaagttcgatagctcaggcggaagtacaccgtcatggccagcgcgaccgccagcgccgtcgcgatgcccgatagcgcagacatcagaatgccgagctggccgctggcggatgcggtgaagaggctggacaaggtgttcatggcgccatctcgcgtcgggcccaagcggccgaaatcgcttcaactatcggcggttggtcgccgaagcgggaacggcggttcaagtcgttcattgtcagcgccaagagtcgccgctaatgacgggcggcggcatttcgcctcccgggaaagttccgatgtccgttcaaatggtcctgctgccggtcttcgtgcaggtcgctctcaccttcgcgcttctgatcgggatggtcatggcgcgccgcaagacgctggtcgcgggggagaccaagatccgcgacattgcgctgggcgagccgaactggccgaagggcgccacacagatcgccaattgctgccgcaaccagttcgagctgccggtgctgttctacgtcctgatcgcactggcattgccgctccgccgcgccgatctcttcatcgtgctgatgtcctgggtgttcgtggtgacgcgctttgcccacgcgggtgttttcgtctcctcgaacgatctgggccgccgctccaccgtgtggctcgccggcgtgctggtactgctggcgatgtggatctacttcgcgctgaagcttctgctgctgatctaggcgctccgcgcccttcgaaagaattcaaatgacacccgctgcacggctgtccgcagccatcgaactgatcgacaccatcgagagggaccgcgtgcccgccgccaaggcactgaaggagtggggcaccgcgcaccgcttcgccggttccggcgaccgcgccgcgattgccggcctcgtctgggacgtgctgcgccgctacgcctcgagcgcattcctgatggattccgataccgcgcgggctaggctgatcggcatgctccgcctcgagcgcaacatggatacggccaccatggccgcgctgttcgacggcagccggtttgcgccggcgccgctgaccgaggccgagcaggccgcgctcgcctcgcgctccctcaaggacgcgccctcggcgatcgccggcgattaccccgaatggctcgacccgcatcttgcaaaagtattcggcgagacccgcgccgcggaagccgccgcgatggccagtcgggccccgctcgatttgcgcgtcaacacgctaaagtccaatcgcgacaaggtgctgcgcgcgcttgctcatcttcatgcgaaaccgacgccctggtccgcaaccggcgtgcgcatcgagctttcggccgatgcgcgcaatcccggcatccaggcggaagaggatttcatcaagggcgcaattgaagtgcaggatgagggatcgcagcttgcggcccagctcaccgcggcaaaacccggcgagcaggtgatcgatctctgcgccggcgccggcggcaagacactggcgctcgccgccctcattcagggcaagggccggctgatcgcgaccgaccgcgacaagcgccagctcgcgccgatccatgagcggctgtcgcgggccggcgtccacaacgccgacgtccgcacgcccaagggcgaggcggatccgctggccgatatccgaggcacagccgacctcgtcgtgatcgacgccccctgcacgggaaccggcacctggcgtcgcaaccccgacgccaaatggcggatgcgcccgggcgcgctggagatccgcctgcgcgaccaggccgaggtgctggagcgggcggtgccgctggttaaggctggcgggcgcatcgcctacatcacttgctcggtgctttcggaggagaacggggagcaggtaagggcgttcaccgcacgccatcccgaattcgcggtcgtcccccccgagcagaccgcgagcgtgctctgggacaaggcggaagcttttggcgaggccgcgctgaagtcgacggaaggctggctgatgacgtcgcggcggacggggacggacgggtttttcgtgtcggtgctgaggaaaatcggctaagtggtcctcagtagtcattccggggctcgtcctgcggagcgctccggattgacggcctcaaatacaaaaccccgcgcaccggatcccggccgcggggctttctgagtctagcgttctgccggtacgtccgtggtcagaacgatgcgcaggcgttagccgacgcggagattgtcagccgaggacttgccgctgcggcgatcggcgacgatgtcgaacgagaccttctggccctcgttgagggtggagaggccggcgcgctcgaccgcgctgatgtggacgaacacgtccttctggccgtcgtccggctggatgaaaccataacccttttgggtgttgaaccacttcacggtgcccatagccatgggagtttcctttgttagagagggtacgcacgcggaccggtacgcgtcgctgcgcccttgatcctgttcagtcgatgtttggagaagtcatctgaagcgtgcgcgcccgtcggtaacgaagcgaagcggcccagtcgttcggccaagtatcgatgatcacaatatagcgagaattttgggctacttcaaggcaccacccgcggctcggcatgtcgcgcgtgtttgctattttgcggtgcaaattaaccgttgcggcttcaatcgacgatgaagagcgtggcgcccgtcgcggtcgaggaccggtgcgcggcgtcgccaaaatccgacacctggtagctcattcccgccgtaagcttgaacttgcgcccgtcgcgcagctcggagtcgaggtcgcccttcaacacgtagagcacgtggccgcggtcgcaccaatgatcggcgacatagcccggcgaatactccaccatccgcacccgtagatcgccgatagtgagcgtgcgccattttgcctcgccgctctcgccgggatgcgtggtcacgtcgatcttgctccagtcggtgacggtgaagggggaggtggggagcttcatggggagtcctgaatggggggcgatgcttggcgtaatgacatagcaacaaactccgtcattgcggggagcctccaacgaagcaatccaggactgtatccggggatagatactggatttgcttcgctacgctggcaacgacggacaggctagtgcaccaaatggttcgccgagccctgcacgatcagccctgcatcgttcacccgcagatactcgcagatcttcttcccgcgctcgttcgcatagaacaccacgacgctgtcggggctgacgaacagatcgatcagcgagaaatgcagctccggcagcagcccgagtgccttgccccaataggcgcgcaaagcctccttgccccgcaccgtgccgctggcgtcgaaccccatcgcggggatgcggtccgaggtcatcacggctgcctcgtcatagagcgcgtgctcgcgctcgaggtcgcgcgcgttccaggcctcgacccaggtgcggccgagcgcggccagcattgacggtggatgatgctgtggcatgacgttctccctgatggccctctcggggggcggatataataggtcagtattactgacctttatagccctgtccatgcccaaagaagcatgtgggcgcgcgcagccgcgcggttgcggcccgggccgcgccagcgtatctgctggccatgacagcagcacagaacgaccgctccgcgtcgacgccctcggtggcctcggcgcacgacaagattctcatcgtcgacttcggcagccaggtgacgcagctgatcgcgcgtcgcgtccgcgaggacggcgtctattgcgagatcgtcccgttcaacaaggccgaagccgccttcgacgagatgaagccgaaggcggtgatcctctccggcggccccgagtcggtgcatgaggccggctcgccccgcgcgccgcaatcgatcttcgattccggcgtgcccgtgatgggtatctgttacggtcagatgaccatggcggcacagctcggcggggaggtcgagggcgggcatcaccgcgagttcggccgcgccgatgtcgaggtgaaagccgacagccagctgttcgcggacgtctggtcgtcgggcagcaagaaccaggtctggatgagccatggcgaccgcatcaccaagatgccgccgggcttctccgtcgccggcacctcgccgaatgcgcccttcgcgatcatccaggacgagaggcgcaaatattacggcctgatgtttcatcccgaagtggtgcatacgcccgacggcgcaaaactcattcgcaacttcgtccgcaagatcgccggtctcaccggcgactggaccatgcgcgccttccgcgaggaggagatcgccaagatccgcgcgcaggtcggcaagggcagggtgatctgcggcctctccggcggcgtcgattcagcggtcgcggccgtcctgatccacgaggccatcggcgaccagctcacctgcgtcttcgtcgatcacggcctgatgcgcctcaacgaggccgagcaggtcgtcgacctcttccgccaccactacaacattcccctcgtgcacgtggacgcctcgaaacagtttttgggcgaactcgagggcgtcaccgacccggaagcgaagcgcaagaccatcggccgcctcttcatcgaggtgttcgaggccgaggccaagaagatcggcggcgccgatttcctggcgcaaggcacgctctaccccgacgtgatcgagagcgtctccttcaccggcggaccgtcagtcaccatcaagtcgcaccacaatgtcggcggtctgcccgagcgcatgaacatgaagctcgtcgagcccttgcgcgagctgttcaaggacgaggtgcgcaagctcgggcgtgagctcggtctgcccgaaatcttcgtcggccgccacccgttcccgggcccgggccttgccatacgctgccccggcgagatcacccgcgacaagctcgacatcctgcgcaaggcggacgccgtctacatcgaccagatccgcaagcacggcctctacgacgagatttggcaggcttttgcggtgctgctcccggtcaagaccgtcggcgtcatgggcgacggccgcacctacgactacgtcgtgggcctgcgcgccgtcacctcgaccgacggcatgaccgcggacttctaccagttcgacatgaaattcctgggcgagacggcgacgcgcatcatcaacgaggtgaagggcgtgaaccgggtggtgtatgatgtgacgagcaagccgcccgggacgatcgagtgggaatgagagagccgtattgatttagggggacggcggtcctttgtcgaacggtgagattcaccgcgtcgttcgcgtgcgccgaaacaatcgcaggtgtcgacagttcacggctgctctccgcgtgtgaaccgttcacggctctgcggcgttaaagggatgtgcaagtctcctcctttgccccagagccatacatcctgatcctgacaggagcgggcctgctcatcgcgctcgttgcctggctaccactcgccctaaagcggcttcccctgtctctgccgatcgtctgcatcgggattggtgctgcgatcttctcgctgccggcagtctcgctccggccactgccgctcaactacccggacttcaccgagcgtttcaccgagttcgtcgtgatcattgcgctgatgggggccggcttgaagctcgatcgcccgttcagttggcgaaagtggagcgtaacctggcggttgctggcgatcacgatgccgatcggaatccttgcaatcactgcattggggggatggatgctgggcctgccctggatcgcggcgctgttgctggcggcgagtctggcgccgaccgatccggtgctcgcgtccgacgtccaggtcgggcctcccaagaccggggaagaggatgaggttcgcttcgggctgacatccgaggcaggcttgaacgacggcttcgccttcccgttcgtgaatcttgcgatcgcgctcggtttggcgatggcaacgggtgaaccctgggcagggcagtggctgctccacaatgtgctgtgggagattggcgccggcctcatcggtggctggctcattggccggctgttcggctggctcacgtttcacgttcccgccgacacgaagctgtcgaggacgggagacggtctcatcgcgatcgcggccacgttcgtttcttacggtgtgacagaactcatccactgctacggcttccttgccgttttcgtcaccgcactgacgctgcgccgatcgcaccgcgaccacgaattcaacaggcaaatgcacgacatcaccgagcaggtcgagcggctggccatgatggtcctgctgctgctgttcggcggggcattggtcagcggtttgctgcgcccgctcgagttggtggacgtggcggcggcggcggcgattctgctcgtcatccggccgatcggcggtttgattgcgctggctggattcaaggctcgcttctcggagaagatgacgctggccttcttcggaatccgaggtgtgggctcgttctactatctggcctatgggctcaaccatatggagttgaccgtcggcgagcggctgtgggctatcgttggcctcgtagcgctgttgtcgattctgcttcacggactgactgtcacgccggtcatgcgacaactcgacaggagtcagggtcgggatccagacgccgatgatgctgctccaccgccaaacgtgcagagaccggcgtcggcttaggatcgaacgatgcccggcactggcagcttcgacgccgcgagaacgcatttgcgtcgaacgcactcgcagctcgtcggctgcagaccgtgcggggggtaggacattccgacgtcttgagaccgtagtgtgccaaggataccctccagacagtgctcgcagaatgcttaagactctcgacatctgatgatcgaggcagctggaaccagcgcaggttgaaagcgttagctgcgggccgcaattgatgtcgggggcggagctatgtccgacttactgcccagcgcgttggatcttgcgcgcttccagttcgccttcacggtggtctggcacttcctgtttccggccttcaccatcggactcgcgagctatcttgccgtgctcgaaggtctgtggctgtggacgggccgcggcgcctatctcgatacctaccgctattggttgaagattttcgcggtcgccttcgccatgggcgtcgtgtcgggtatcgtcatgtcgtaccaattcggcacgaactggtcggtgtttgccgacaagacatcgccggtgctcggaccgctcctcggctatgaagtgctgacggcattctttctcgaggccggcttccttggcgtgatgctctttggccttggccgcgttggtccgcgcctgcatttcgtcgcgacctgcttcgtcgcgggcggcaccttgctctcggccttctggattctcgccgcgaattcctggatgcagacgccgacgggacatgggacggggccggacggccagttcattcccgagagctggctcgcaatcatcttcaatccgtcgttcccctatcggttcgcccatactgtcaccgcggcctacctgacgaccgcgatgatcgtgggggccgtgggcgcctggcaccttctgcgggacaggatgaacgaacgcgctcgcatcatgttttcaatggcgatgtggatggcggcgatcgtggcgccgatgcagctcctgatcggcgatctgcatggcgtgaattcgtaccaccatcagccggtcaaagtcgcggccatggaaggccacttcgagaccgaacgccgtgcgtcctccatcctgttcggcatgccggatgccgaagccggggtgacgcgcggccaaattgccattcctggcttcgcgagcctttatctgacgcacagccttgatggagaggtcaaggggctcaaggctttcccgaaagatacatggccgaccaacattccactcgtcttctgggcgttccgcatcatggtcggcctgggaattctgatgatcgtgctcggcatggcctcgctcgttctgcgttggcgcgacgggctgtacgacaccccgtggctgcaccgctttgccgtggccatggggccgtcggggctgatcgcggtgacggccggatggacggtgacggaggcgggacgccagccattcacggtttacggactcctgaggactgccgatagcgtcgcgccgatcgccgcgccggccgtggccgcgtcactggcggcattcgtagtcgtgtacttcgtcgtgttcggcgcggggatcgcgtatctgtttcacctcttccgccagacgcctgaagccggcgagcacggaccgccacagggccagccggtccgcacggccggcattacgccggccccagcgttgatagccggggcgccggcgacacacagagcagagtcgcgtcaagcggggatcaggccatgagcatcgacctcacactgatatgggccctgctgatcgccacggccgtgctgctctacgtgatgatggacggcttcgaccttggcgtcggcatcctgtttccggccgaggtggcgagagccgaccgcgacgtcatggtcaattccgtggcaccggtctgggacggcaacgaaacctggctcgtcctcggcggcggcggattgttcgcggtgtttccgctggcctacgcgacgatttttcccgcgctctacatgccgcttattctgatgctgctcgcgttggtgtttcgcggagtggccttcgaaatgcggtttcgagcgcggacgcccgccggtgaaacatggtgggaccgcgccttctcgtggggcagctttgccgccgcattcctccagggcgtctgccttggcgccatcgtgcagggcattcgtgtggaggggcgtgcttacgccggcgggtggtgggactggctgacgcctttctcggttctgaccggtattgccctggttgtcggctacggcctgctcggcgcgtgctggctggtttggaagaccgacggcgcgcttcaggcacgctgccgcaactatgcacgcgttctcggctttgcgacgctcggcttcattgccgtcatatccgtgatgatggtcatccagagcccggcgttccgggagcgatggctgacgctgccaaacatgctttacgcagcgcctgtgccagttctcgtggccctgctggcatggcgctttcatcgcgcgctcggcaagggcgaggatgtggtgccgttcctgtgcgcgcttggcttcttcgtgctgtcctacatagggcttggcatcagcatgtggccgatgatcgtgccgccctccattacgatctggctggcagccacgcatcccagcagccagttgttcctgctcgtcggcgcggcggtgctggtgccggtgatcctcgtctatactggctacgtctactggatatttcgcggcaaggtgcggcacggcgaggggtatcactgatgctgcgtgtgtctcgaacctggaggcagctgttatggttcgtggcgctgtgggcggcgggtgtgattacgctgctggcgatcgcaatgcctatccgatggctgctgaagacggggtagagaagctgccgatcgatggccttggtcaaggctgcggcaaggaacgcgagcagaaaggaccgctgcgaagcggcagagtgcagcgacgatcccctcgggaagcccgtgcatcgccataccgagcgcgaccagcgcaagcacgctggccaaccgatcgagtaggcttcactccgcacgacgtgctctctcgtagcgggagtcgaactggcgtggtttgacaaagatcaacttcaaggggcaccgccaggcagtagctcaggctgttcgcgttctcggagcctgcctgaatgatccgtctctcggcactaagttcgacacggctgcgcattgcgctggtcatcgtgctcggattgatctttgcggccctgcaactcactgcaaatgttgcgccgtcgcctgaaagcacgtctgcttggcagcacgatggaaggcttcacgttttctttcatccggactgccctcattgccacagggccatcgagtttctcaggacacaaccgcgtgtcgatttcgtccttcacgatgtgtcgaattcggccaacgaaaccctgttccttgccattgctcgtcagcacgccataccggagcacgaacttggcgttcccctcttcgtgcgcggctcgcgctacctgctcggcttcgagtcggcggagaaaacgggcagggacctgctggctcttgtggctgatgagaccgcgattgcgcgtccggaggacgccgcccgcaaaataagcttgccgtggctgggagacattgaccccgtcggttattcccttccgacgctgggcattctgatgggcctcgccgacggcttcaatccctgcgccatgtgggtcctcgtctatttgatctcgctgatcgcgggcatcaaggactacggcaagatctggtggctggtggggagcttcgtcctcgcgtcaggcgtgctctacttcctgttcatgacggcgtggctgaacacattcctcgtggtcggtcatatccgcccgctcacacagatcgttgggctggtggcgatcgggatcggcatcgatcatctctatgagcttgccgtgacgcgtggcgtgaccgtctgcgacgtcggcaataccgaacagcggcagcagacgatgcaacgaatccgcaagatcgtcgccgcgcccgtcggcctggtaagtctgctgctgatcgtcggtctggcgtttaccgtcaacgcgatcgagttcgcgtgttcggcggcgctgccggcgatctacactcatatgctcgcgctggcagacctctcgaccggagcatactacgcctacatcggattgtacgtaacgttcttcatgctcgacgatctcgtcatttttggactcgcggcattcaccgtgcagaaggtcattgatacgcgctatgccgcgttgagccgcggcgccggtggcgtggtcctgatcgggcttggcctctggatgctggcgcgctgagaatggagagtcccgggaagcgaacttgttatctcttgaagtcaatgtactaccaatacttgcatagagcgggagcaaggggcgaaagtcggtcgtatcgccggatgaagtggtgtcggagggcgttcttctcgttcccgctccgcgacggtttgtttgacctacgtcattgtgacgatcctcgaagctggtagcgtgttcctgtcggttcaaacgctgttgcgaggtcgatgacaatgaagagtccggccctatcgcgcattttctcggcgagcctggcggctgtgatcgccatcgcgccatcgctctcgctcgcttgtacgcgactggtctatctcggcgccaacaatcaggtcgtcactgcgcggtcgatggactggcggtttgagatgccgaccaatctctggatattcccgagaggcatggcgcgcagcggcgaggtcgggccgaactcgctgaaatggaaatccaaattcggcagcgtggttgcctccgcttacgacgtttcgacgtcggacggcatgaacgaggcgggactggtcgccaacgtcctctggctcaccgagtccgaatacccgaagttcggtcccggcaagcccggcctgtccattgccgcctgggcccaatacgtgctcgacaatttcgccaccgttcaggatgcggttgcggtactcgagacggatccattcatgatcgtcaccgacaacgtgcccggacagaaattgctcgccacgcttcatctgtctctttcggacgccacgggcgacagcgcgatcatcgaatacgtcaatggccggccggtcattcatcacggccgcaagtaccaggtgatgacgaattccccggtcttcgaacagcagctggcgctgaacgaatattggaaggagatcggcggcacggtgatgctgccgggcaccaaccgcgccgcagaccggtttgcgcgggcatccttttacgtcaacgcggttccaaaagatgaaaatcccgaccgtgccttggccagcgtcttcagcgtgatccggaacgtgtcggtgccgttcggcatttcgacgccggatcagcccaacatttcctcgacgcggtggcgcacggtggccgaccatcaacgcaagctctacttcttcgagtccgtgctgactccgaacacattctgggtggatctcaagacaatcgatttttcaccggagaaggggcgagtgaagaagctcgatcttggcccccaacagtcgcgaatctttgccggcgatgcgaccgcgaatttccaggaggccgagccattcaagttcctgggtctgccgatgtgagcgccacccgctgcgacggcggcgccaggggccgattcgatttccacggttcgagcaaattctgcgaggaccgatgtaagcccgaaccggggaagtggctcgatccgtgtggtaggcggtgagggcgttgacattcagcttatattgccccgacagtctgccgatcgttgcacggtaacaggttgtcttatgaagaagatccggatctttgggcgggtggtttgtatcgccctcacactcacgagcgcggccgccgatgcctgcacgcgattcgtctacgagacgggaaacaagacctatatcgttgcgcggtcgatggactggatggaggatcccaggaccgatctctgggcgttcccgcaagggatggcgcgcgacggaggcgtggggcgtggctccgtctcctggacgtcgaaatacgggtccgtggtcgcatccttctacaacatcgcgaccgtcgaaggcatgaacaccgccggcctcgtcgccaacacgctctacctcgtcgagaccgactatggcgacgccaaggcctcgggcaagccgctgatgtcggtcggagcctggactcaatatgcactcgacaacttcgcgacagtggccgaggccgtcgaagccctctcgcgcgagccgtttgccattgtcgcgccagcgcttcccgatggcaacgccgcaggcgggcacctgtccctggcggacgcctccggggacagcgcgatcttcgagtacgtgaaaggcaagctcgtcattcaccacaaccgatcctatacggtcatgacgaactcgccgcctttcgaccagcagctggcgatctcgacctactggaaaaacatcgacggcctctcgttcctgccgggcacgatcaattcttccgaccgcttcgtgcgcgcgagctgggctctccagtatgctccgaaggagaaggacaacaggctggcagtggccacgtccttctccatgatccgcgcgatctcggtgccgctcggccttgccgaggcgggcaagccgaatatcgccgggaccatctggcgctcggtttccgatattcaggccaagcggtactatttcgagtcgtcctacaatccctcgatcttctgggttgacctcgccaagctcgatctggccgccggctccaagccccgccgcctcgatctcaccagccgcccgatctatgcaggagaagtgtcggacaagttcgcaccggccgagcccttcaaattcctgtcgcagtgaaaggagagggcgactagcgtcgctgtggcataagcagatcgggcctctgcctggtcgcagccggccgctgctgccgtcccgaccgcgcgtaggcgcccggcgcaaacgtcggatctccgtcacgtcctctcgtgatacgacatccgtatcgccccctccggagcccgccttgatgcccgtcgcgactgccgccagccagcctcccgccactgccgttgaaaccgaccccgaagccctcggctggatgcgcggctttccgccctcgcccgaccgcaccatcaccttccaggacggctcgttccgcagcttccccgaactgcgctgggcctggagcaacatccgccagctggtgccgacggtgaatgtgtggcgcggggcggggccggcgtcggtgctgccgcgggacgaccatgacatcggcacggtcgcttcgaccacgatggacggccggccaatgacgttcgcgaagatgctggaggagacctatgccgatggcatcgcggttttgcaccggggcacgctgatttatgagcgctatttcggcgcgctgaagccgcacaagccgcatatcggcatgtcggtgacgaagtcgttcaccggcgtgctcgccggcatgctggtcgccgagggcaagatcgatccgcaggcaccggtgacggactacgtgccggagctgaaggcaagcgcgtttggcgatgcgcgcgtgcatgaggtcatggatatgaccacggggctcctctacaccgaggtctacaccgacaagaattcggacgtgtggggcctgcggcgtgccaacggcatggctcccatcccgcccgactacgacggcccgaccaccatctttgatttcctcatcgcgcagaagaagcagggcgagcacggcaaggccttcgcctacaagaccgtcaacaccgacgtgctcgcttggatctgccggcgcgtcagcggcatgtctctctccgatttgctctccgagcgcatctggcagccgatgggagcggaggaggacgcgcattatcacgtcgatcgcatcggcacggagagcgggggcggcggtctctccaccacgctgcgcgatctcgcccgcttcggtgagaccatgcgcaatcacggccgcttcaacggccgccagatcgtgccgccgagggtggtcgaggatatcgcgcgcggcggcgatcccgaaaaattcaagccggccggctacaccacactgcccggcgcgtcataccgtaatcagtggtgggtcacccacaacgaacatggcgcctacatggcgcgcggcgtttacggtcaaggcatctacatcgaccccaaggccgagatggtgatcgcgcgctacgcctcgcatcccatggccggcaacgccgccaacgacccgctgacgctgccggcctacatggcgctggcgaaggcgctgatggcgggcgggtagggcgcgtcaagactggcttcttcgtagcccggatggagcgaaagcgagatccgggacgaacgaagtgagttgcgcgactgccccgtcacccctcaagcggcgtcgtcacgcctcctgccaatgcggataggtgacgtaggcggtgacggcgccttgctcgtgtgagcggatcgtgacggtctcgcccttcggcatatggacgatctcgccgggccccgcggtcacggtgttgccgtcgctcgtgaccgacagcttgccttcgaggacgatcatgacatcgtcgaccttcatcgtctcatcgagattttggttcggcgcgtagcggccgaaaccgatcgtgatggggccgccgtggcgttggtcgatcacattgccggcgaagatatcgccgtcttgtcccggcgagcgttcgagcgaagcgccggcgagggcgaatttgcgaactttcatgacatcgttccgtcttgtgtggctggggaggcacgaatagacgccgtggccgttgtttggttcgcctcgccgcgcgaggcggtttgacgcagtggagcattcataatataagtattgacttatataattggaaatcgatattggttcgacaggagaacgccagggagaaccgaaaatgcagatcgacgtcgcccgggtcttggggcttgtgacgcgctcggtgaggagcttcgacaaggacggcaagccggcgagtgcggtgacgctgacgcggctctacgacaccagcgtcgacgatctctgggacgccgtgaccagcagggagcgcatcccgcgctggttcgcgccggtcgagggtgaccttcggctcggtggacgctaccaggtcaagggcaatgccggcggcaccatcacctcctgcacgccgccgacccattttgcagcgacgtgggnnnnnnnnnnctctgagcgcagagcgaagccaggcgcgcttgacgcttgagcacaccgcgatcattggggatcattgggaccagttcggcccgggtgcggtgggcatcggttgggacctcgcgcttgcgggtcttgagcgctaccttgcgaccggagcatcggtcgatcatgaaacggccgaggcctggatggtctcgccggagggcaaggactttatgacgacaagcggcgaatcttggcgtgcggcgcatgtggcaggcggggtcgatccggccacggcgaaggagcggtcggaccgcaccatcgccttttatcgcggcgagacgccgcccgatatcacgcatcccggcacaggaagctgatgcacgccttcgaagtcctcgccgatcccgtgcgccgtcgcatcctcgagctgctcgcgcccggggaaatggcatccggtgaggtcgtcgaagcgatcggggccgagttcggcatcacgcaggcggcagtctcgcagcacctcaaggtgctgcgcgagagcggttttgcgaccgtgcgggcggaggcgcaacggcgcctctattcggtggacgctgcgggcctccgcgccgtggattcgtggatcggccagttcaggacgttctgggagccgaagctcgatgcgctggcgaccgagatcgcgcgaggcaaacgcgaacgtcgcaccgcgccaatgaccaagcgcggcgggaagagggcttgagcgtcgcagcacagtccggactgcgggagcgtatatggtgccgctccgcttctctcatccagcctgtgaactccgcgacatcttctcgaacttcttgatcagccgctcccgctttagccgcgacagccgctggatccagaacatgccgtcaagctggtcaatttcgtgctggtgacagaccgcgcgcaaaccttccgactcctcggcgtgcatgttgccgtcgagatcctgatagctgatccgcacgcgggcgtgacgctgcacctcgtcattgatccccggcatggagacgctgccctcgcgatgcaggatcatctcgggcgacctccatgtgatctccgggttgacgtaggtctgcgggccggcctcggcatcgagctccagcacgacgacacgcaagggcacgccgatatgcggcgccgtgatgccgatgccgggcgcagcgcgcatcgtatcaagcaggtccagcgcaagctcgcgcaaggcgtcgtcgaaatcagtgaccggacgggcagggctcgcaagccggcggtcggggtagcggaggacagggcggatggtcatggaggctcctaccactcacggatcattgaagcactctcatcttgagtatctaccaactggaaggtagatgactggccatgagcaacgtttcatccacagccaacgacattctcgcctgcgcgcgcaccctgatcatcgcgggcggctacaacggcttcagctacgccgacatcgccgatgtcgtcggcatccgcaagccgagcattcaccaccatttcgccagcaaagtcgatctggtccggaccctcgtgtcgcgctatcgcgaggaggcgcaagccggactggcggcgcttgaacgcaacgttgcggatcccggcgagcagctcagaagctacatcgcgtactgggaggtatgtatcaaggacgcgacggctccgttctgcgtgtgtgcgctcctggcaagcgagcttccgatcttgcccgaggaagtcgccgttgaagtgcgagctcatttccgcgcgctggcctcgtggctgacctcggcgatggagcgcggcaagcggcagggacgattgcaactcgccagcacggcaaggatcgaggcggaatcgtttatggcaaccgttcacggcgcgatgctgtcggcgcgcgcctatggcgatcccaagatgttcgggaccatcacgcggccgctgctggatcggctttccagcaggcactgaggagatcgacgcggtgcaagcccgcgcggtgggcatgcatccgcttcgtaatctaccaactagtaggtaaggaaaaagaagtgagagctcatgaactgacctcggatacggccgatcaatggctgaagcagtactacttcctgcgggcggcgttttccgttggctgggtcgttctggccttggccatcgcgccgtcatctgcggtgatcgcggcgacgctactcgttgcgtatccggcatgggacgccgcggccaactatctcgacgcgctctcgaacggcgggttgaaccagaaccgcacgcagggcctcaacgtgctcgtcagcctggcgaccaccattgcggtcatcctggccttgcaggtcagcatgaactgggtgctcggaatcttcggcgcctgggcgatcctgtccggattgctccaactcggcactgccttgcggcgctggaagctgtttggcgcgcaatgggccatggttctcagcggaggccagtcggcgctggcgggcggcttcttcatctttcaggcctcgatgccagcaatcccgtcgatctcgaatgtcgcgggctatgccgcggtcggcgcgctctacttcctggtctcggcggtctggttgaccgtcacggattggcggcgtcgtgccgccacatgaaaattcgcagggacgtcacgccgcatacggcgtgacgtccctgtgcgggaaccggccgtcgaacggaccagccgtggtcacgatcggagtcgtggacgagatcaggatcggcgggatgtggcatttgtgccggtgttttgcccgacgagtcaaaggacggtccaggccttgcacgttgctgacgccgtaagtcattgatcctgcagcgaccggctactgtgcatggggttgttttcgcaggcttgttggcagctcgcaaacgatgccacacaatatgcatcagcttgtcgactgcggcggttcccgttcgtctttcacccagacagatctgacgggagacccaaatgacttcttccaactatcgctgggtgatcgtcgccgccggcggcctgctcggctgcgtcgcagtcggcggcatgttttcgctgccggtgttcctgcagccgatcgcaaaggacaccgggtggtcggtgaccggcatttccagcgcgatgacggtcggcttcctggcgatggccttcaccagcatggcctggggcacgctgaccgatcgcttcggcccgttgcccgtggtgctgacgggatcgatcgtgctcacgctcagcctgttagccgcgagccatgcgacctcgctgatcgtgttccagatcgtgttcggcctcctggtcggcgcgtcctgtgcggcgatcttcgcgccgatgatggcgaccgtcaccggctggttcgacacaaaccgcagcctcgcggtgtcgctggtctccgccggcatgggcatggcgccgatgacgatgtcgccgttggcggcctggctcgtctccggccacgactggcgcacctcgatgcagatcatcgcgctcgtggtcggggccatcatgatcccggtctcgttcctggtgcgccgtccgccggcgctcgcgcaggctgctgtcgcaccgggcgagggcgctgcgcaggccgagatgtcgatgggcgacgcgctgcgctcgccgcaattcctcatcctgctcgcgaccaacttcttctgctgcgcgacccattcgggtccgatcatccacaccgtcagctatgccgtgagctgcggcattccgctggtcgcggcggtgacgatctacagcatcgaggggtttgccggcctgggcgggcgcatcgccttcggcctgatgggcgaccgcttcggcgccaagcgcgtgctggtttctgggctgctgctgcaggccttcggcgcgctcgcctatgtcttcgccaaccagcttgccacgttctacgcggtcggcgccatcttcggcttcatctacgccggcaccatgccgctctacgccgtcctcatccgcgagaactttccgctcaggatgatgggcacggtgatcggcggcacggcgatggccggcagcctcggcatggccacgggcccgctcgccggcggcctgatctacgacgccttctcgagctacgcctggctctacatcgcctcgtgggcgatgggccttggtgcgttcctgatggcgatgacgttccggccgttcgcaaagccgcaaggcgaggtggcgccggcgccggcgtgagctccggatgaaggcggggcgtcagagttgcgcctcgatcgcgagcttgtcgatcaccgaccagacctgccggatcttgccgtcgcgaaattcgtagaacacgttctcgcagaaggacacgcgcttgccgttgacggcaagacccaggaatgtcccgactggtgcgcaatcgaacttcagtcgggcggcgatgcggggtggcgcggagatcagcatctcgatgtggaattgcagatcgggaatctcccgaatgtcccgttccagcatcgcgcgatagcccggcagcccgaggggccgcgcgttgtgggcgacgtcttcgtgcacgaattgtctgagcgccggccagtctcgccggttcaggcaggcgatgtagtcgcggtagaactcggcgagctcgtctgtcgtcatggcgaggctcctgtggtccgggtcgcaacgcacgagcaccgcaaacaggtccagctcagaggcgcttctcgaagaagaggtccggatagggatcatcgttgaagcggggaatctcgcgccagcccgtgctgcgatagagctggccggcttcgggcagcgcgctgttggtgtcgagccgcagcagcccgatgccgagttcccgcgctgcatcctcggctgcatccatcaggcgccggccgagccgcaatccgcgggctgccggcgcgacccacagccgcttgatctcggcgtagccgtgatcagttcccttcaacccgacgcaaccgatcggcagtgtgtccgacatcgcgacgatgaaggtgccgcgcggccggcgcatgtccttggcatcaggatcgcgcgagagcgagacgtcgaagccctggctgaagcggcgcccgagctcggcatagtactcgccgaggcagtagcgcgcctgttcgctccgcgggtccacctcgtcaagtgcgacgcgctcgcgcgtcagcgcggaggcaatcaggtccattgccgccaataaggcctcgcgctgcgaatgttgcgcgaggaggccttccgcctgcgcgttcgacagcgcttcgtaggccgcgaactcgcgccggcccgcgcgcgtcaattttgcgacacgccgccgcgcatcgtcctcatgcgcggcggtctcgatcagcccctcgtcttcgaggctgcgcagcaggcggctcatcagccctgaatcgagagcgagatagtcgcggatctccgccacatcggaacgcccgtgcccgatcgcattgagcacgcgcgccgcaccaagcggccggccgcgtccgagaaaggaggtgtcgagcgcgccgacggcggaggtgacggcacggttgaagcggcggacgcgggagaccgggtcgagcatgatgtctgactttagtcagataaaatgacctgtcaacggtggcgaaccgatcgggcgcaattgtgcgcctcattgtgagttgtgccggagcggaagctcgctaccatgtgccggctgcggcgacacgcggccgagccagcacagcaagcggagacgacatgagcgggcaggagcgcaaggtcaagggatcggatctgttcgttgcggcgcttgagaatgagggcgttgacaaaatcttcggcattcccggcgaagagaatctcgatctggtcgaatccctccgcacctccaaaatcgagctgatcctgacccgccacgagcaggctgcggccttcatggccgctacccatggtcggctgaccgggaagcccggcgtctgtctgtcgacacttggtcctggtgctctcaacctgtctacgggcgccgcctacgcgcatctcggtgccatgccgatgatcctgatcaccggacagaagccgatcatgagcagccggcaggcgcgctttcagatcgtggacgtggtcgcgaccatgaagccgctgacgaagctgtcgcggcagatcgtcagcgcctccagcatcccgaccgtggtgcgcgatgcctttcgcgtcgcgatggaggagcggcccgggccggtgcatctcgagctgcccgaggacatcgcgggcgatgaagtgccgccggctcccgtgattccggttcatccgatcgagattccggttgcccatcacgttgcgctcgatcgggccgccgaactgattttggcagcaaagcgtccgctggtgatgatgggcgctgcgaccagccgaccgcgatcgacgcatggcatcgcaagcttcgtgcagcggaccgggattccgttcttcaccacgcaaatggggaagggcaccgtgcccggcggcaccaacctctacatgggcacggcagcgctgtccgagcgagactacgtccacgacgcgatcgatgcggctgatgtgatcgtcgccatcggacacgacccgatcgagaagccgccattcatcatggggccggcgggcccgaaggtgattcacgtgagctacacgccggcgagcgtggagctggtctactttcccgacgccgaggtcgtcggcgacgtcggcccaagtctggagctgctcgcggatcggatcgaaggcaggctgccgcaggcggcggcgctgctcccgctgcgcgaagagatattgaagcacctcgccgaccgggccaccgaagcgcgctggccgccgaccccgcagcggatcgtgcacgacatccgccgggtgatcccggagaacggcatcgtcgcgctcgacaacggcatgtacaagatctggttcgcgcgcaactaccgcacccgagtcgcgaacacgctgctgctcgacaacgcgcttgcgaccatgggcgccggcctcccgtcggcgatgatggccgcgatgctatatcccgaccgccgcgtgctcgccattgccggcgacggtggtttcatgatgaacagccaggagatggagacggctgtccgactcaagctcaatctggtcgtgctggtgctggaggacaatgcctacggcatgatccgctggaagcaggccgtcgatcgtttcgctgactacggcatgaccttccgcaatcccgacttcgttgtctacgggaaggcttatggcgcgaaaggacatcgcatcgagagcatcgaccgcttcggaccgacgctggaagaggcattccaggagggcggcgtgcatctggtctccatcccggtcgattattcggagaacgtgcgagtgctggtggatgagctaagggcgcacgagaaggcaaaggcgtgagtctgggccttctccgctacacacgtcattgcgagggcagcgaagcaatccagaatcgttcttgagaggcggctggattggtccgtcgcttccgctcgtcgcaatgacggagtatgcggatcggcccaaatgcgataacaatccgcttgagcattaccaacccaaccacaggactatgaaatgacccgcgttcgttgtgtcaccgagatgggcatgggcgtcgacgttcacggcagggacgctaccaaggcggcaaagcgcgcggtgtccgatgcgatccgacattcgagcctcggcttcttccggatgatcgggaagaccgcgaacgacatgttcgtcgacgtcacgattgcggtgcccaacccggaggccgtcgacaaggaagccgtcgccaaggagctgccttacggcaccgtaacggttacggcggtcaaaggcgggctggagattccctcggccacggaagcggccaacgatccgatcctgatcgccaatgcggccgtgatcgtcagcttcgacaaggactaggccaatgtccgacaccgatctggcgctgctggatcgtccgatctggagcgcgttgacgacgagccagaggcacctggccgaaggcggcccacgggcgctgcgctatcccgtggacatgacgccgtttgccgacatggccgacatgtcggcggaaagctttgctgcgctcggtgatctgctgtccggttctcaggtggctgcgctgttcacgccggagccggtcgaggttcccgcgggcttcaaggtggtgctcgccgatacaggtgagcagatgatcggctcgccggccgacagcccgttgcgcgatgccgagatcgtcacgttgggggcggccgacgtgcccgcgatgatggcactgaccgagctgacgaagcccggtccattcgcgcggcgtactcatgagctcggcacgttcctcggcattcgctccggcggcgaactggttgcgatgacgggggagcgcatgaagccgggaaagtttgtcgagatgaccgccgtctgcgtgcatccggactaccgtgggcggggctacgcgcaggcgttgctcgcggcggtcgcgcgccggatcgaggctcgcggcgagattccgttcctgcacgtgttttccagcaacacgtcggcgatcgcgctctacgaacggcagggcatgtggattcgacggcgcctgcacgtcactgcgctaatgaaacaggcatgagccgcgcgtagggcttcatattgcacgaattcgcgctatatcgattccaaccataacaggggggattacatggacgccaggacacctgatttttccgccgcacggacggcgatgcagcgctacgtcgatcaggagatcattccaggcgcatcctgggcggtgctgcgcgggcgcgaagtgctcgatcagcaatgcgtcggctttgccgatcgcgaggcgaacacagcgcttcggccggaccatattttccgcgcgttctccaacaccaagatcttcgtcacctgcgcgatcatgctgctggtcgaggaaggcggcatcgggctcgatgaccccgtcgaaaaggtcctgccgcagcttggcaatcgcaaggtgctgaagcagggcgcggcaagtctctcggacgtcgagcccgcaacaagcccgatcacgatccgcaagcttctgacccacacctccggcctgagctacggcatcttcgatcccggcacggtgctgttcaaggggtacaacgatgcgcgtgtgctcaatcctctgaccccgctctcggacctgatcgacaagcttgccgatctgccgctgtcctatcatccaggcacggcctgggaatattcagtggcgaccgacgtactcggccgtgtcgttgaggtcgtctcgggccagccgctcgacgtctttctcaaagcgcgcatcttcgacccgctcggcatgatcgataccggcttccacgtgccggaggcgcagcagggcaggctggtcgcgctctacaatggtgctgacgtgcttgaccctatgaagccgggtctcacgcgtgccgacaatcttccctttccgcaggcctatcggcggccattcccgaggctctcgggcggcggcggtctggtctctaccttgcctgatatgctcgcactggtgcgtgcgctgctgcccgggtctgatgcgctgctgaagccggcgacgctgcggctgatgatgacgaaccagctaggagcggggcagaccatccgtttcgcaactctcgggccgatccccggcaagggcttcggtctcggcggcgccgtcaccttcgcgccgacgccgttcgaccctccgaattcgaccggcgaattccagtggggcggtcttgccggcacccattggtggatctgcccggaggccaatactgcgggtgtgctgatggcccagcgctacatgggcttctggaatccgttcttcttcgagttcaagcggctggcctaccaggccgtaggcgcgaactgacgcgagagtcggctcgttcgtctgtctcaggctgcgacaagggcaaagcgagcgggaggttgggcctcccgctcgtcgttgtcagtccttccagggatcgaactcgccttcgccggccatcgcgaccgcgaacggccgcaacgtgtgcagcaccttcacggtgcccgcatgttgcgccagcacgtccggcaggcggcgataggccatcgggctctcgtcgaggtcggcaccgatcaaggtgacgccgcgctcgttgagccactggtccatctccgcccgcgagaagcgccgcttcgcctcccttcgtccgaacaggcggccggcgccgtgcacggtcgagtagagcgaggccctggcctccgggctgtcgacgccttcgaggatgacggcatcgtcgcccatcgagccgccgacgaatcccttctggccgggaaacgccggcgtcgcgcccttgcgcaccacccacagatccttgccgtcgtgggtctcacgccaggcgtagttgtggtggttgtgcaccgtctcggtcacgctgccgccgatgatctggcggacgcgctcgacgacccattcgcggcccgcataggcatagcgcccggcgagctgcatcgccgcgatgtagcggcggccgagctcgctgtcctcgtcaaccacggccggcggaacgttcatgccgtccttgccgccggcagccttgaggtagcgcgtcgcggaggtgtgcccgagaccgcggcttccgaaatggacgccgatccagacgaagccttcctcgtcgcgcatgaggtcgacataatggttgcccgatccgacagtgccgagctggctcaccgctttcttgcggtaatcctccatcgctctcgcgccaggcgtcgccgtcgtcgaacagttcgtgctcggcccgttcggcgttggcacggccgacgccgaacgagatcaccttggcgacgtcgcggatgatcgttggagcgatctgcgcgatgtcggcgaagcgggtgtcgagccgggccgccatgttgccgcagccgatgtcgaagccgacgccggagatgctgatctgcttctcataggcgatgaccccgccgaccggctgggcgtaaccgagatggccgtcggcgcagatcacgccggatacgacgttgccgaccgccatgcagttgcgcatctgcgcgatggtcgcgtcctcgtgcgggccgaacaccttcagcggcgcattctggaagcgggcgtcctgggtgcggaactcggcgatggagtctgcggtggcattggcctcgcgggcaagatgctccttgcgcgcggcatccttgtacaggcaccaggcgggctggccgcgtccttcgccgacgcgcgagtcgggatcgacgccggcggcaaggcagagctcgcgggcgcgttccatgtagggatcgggtcgtcgcatggtggtgggtccttgtcattccgctcgcacaatcctcgggcgggcggatcaatccggtgagttctaaagccccgggcgcagtctcctgcgtccggggccgctgtcgttccgcatcagttcaacgccgtctccgacgctgcgatccacgcgaccacggcctcggagaagccgttgacgcgggtccaggcgccgtggccgacaccgtgctgatacgaggccacgttgaccatggtgccgcgcgccctcggctcgggcacctggtcgtggctctgctcgtcggtgaagacgatgaggcgatcgcccttgcggtcgatctccgtcacggccttgccgagataggttccgccatgcggctgcgagttgatgatcgcatctcgaagcgcgaagccgcggcggggcgggaccttcacgacctcgtttgagaaggtgaagatctcgacctcgtcgcagatctcgcgcgcgaggatggcaaggccacacgccgcctccgcgcgcgtcatttccgactgcgcggagagggtcgcgaacatcgagcccgacacgtcgatcaggagccgggtgcggcccggaagccgtacatggtccttgaccgatttgagcatcgcagcctcgagctcgggctcgaagtccggcgcgtagcgcgccgccgtgatgaagcgatagggaaggagtcgatccgtccgcatcgcctcgatcgcccctgcgatggtctcgcgcgggaccagcgcattctgcatcaggcgcagattgcgcagcagcgccaggccgccgagcttgcgctcggcgatcagccgctcgaaggtctcgcgcttgttcttgccggccgagagcgaaacctcccaggtgtcgggagaggcgagctcgccatcgacgaactgcttccacaccttggcctgcccggcatccttcggcttggcgtggaccaggaacagcacgtccctgatccgcaccgcgccgtcgcgatcccacttggcgagctgataggcgtcgaacttggtcagcgcccgggctaggcccttcttcacctgcgccgaaaccggctgacgcttgcgctgctgcatcggccccagcgcatccgcccagtagatcgcgagcagctccgtcatctcgtcgggacgctggatcacccgggcgagcgtgtccgcgacaaggccgcggtgcttctcgctccgcgccatctcgcggatgacgagcagcggcgcgtgccgcagcttcatcacctcgcgcgcctcgatcgcaagctctgcgaccttggcaggcgcgaccttgggcaccagggccttgatgcggtcggcgatcgcaacgccgtcctcgtagaactggtcctcccacaggaggcagttcatcaatgcccgcttcagctccatctcgggcgtgaagcgcctcgcacgcgcgccctcccgcgtgaaggcgcgaacgatcttgttgagcctgaccatgacggcctcctcttgggttgattgtgaatgaaacggggtgccggggaacaagcgaggctgtcctgcccacgaggggctccacatgctctaccgctgagctacggacttgcgtccggaaggagtcgaaccttcgacagtgtgattcacgaagtaacagcgctcttcaccaccggcgcgaaagggacacgatccgggaacaggcgattctgtgacccggcaagcgcaagcttgccggaaagcgctctatccgctgagctaccggtgcatgggacaccgggcgggattcgaacccgcgacctctcgcgttgcaggcgaagtaacagaaatcttcaccacggatcgtgatggggttggcggggaacgggcgatgctgttgccgctccgaggagcaagaactgagctacggcatttcagccggcgagattcgaacccgcgacctccgtcctggcaggccaggacggcgctctaccgaagtaacagacatcttcaccaccgccgggccgatgctgtcgcactggccgttgatgggtacgctggggaacgggcgatatcggctttcagtgacgacaacgcagggccgtccttgcggagggacctgcgccgggccgcgtgcgtaccttttccgaggccgcatcccggtgcgtgtgtcaaaggcaggaggcatcacccgctttgccttgcggagaagtatccgacatcttcaccaccagcgtcggttgagccgcgaccactcgcggcaaaccgagttaaaaaaaatctatcgcggcgctgtcgacgcgccgccgtttgcgaacccgttgggttcgctctgccatcggtgtccggctcatcgcctcgttccctccggcaggccccgcgcacttgggcacgcgccttctcagcgcgagccccgggatccgggtctcccgttccggccgatgccgggttgttcggttgggccgcgcggcgggcaacaaaaaaccctccggagcggcaggctcgggagggtccgtgagaagcggacggtcgatcttgcggtcaggcaagatcgctcccatgagccgggcatgcaacatcgaatagctctgggctattcggcatgcggacaattctttcgtagcggtgcaacatcgctcggttcatggtgtctgtcgcaaacggaagtgtttgcgagggcgcgggacatacgcccgcgacttgtgaatgtcaagcgaagctgctcgagcaaattaagatgacgcacgcatgacgtcgaattttctcggtctcgatggatttcgtttcggctgggtctcagcctggatcgacgatcgtggcgaccacggcttcgattattcaccgggcctgacgcgcctgctcgcgatgcggcatgcgcgcgcgatgatcgacatgccgatcggattgaaatcgagcggctaccgcgcttgcgatctgcgggctcgcgaactggtaggacccgccgtctttctcggtgcacgccgcgacctctggacctttcccgacatggccgcagccaatcgccattactgggcgcacgaaggcgaggggaggggaatatcggtgcagctctggaacatcagggacaagctgagagaggtcgacgacgccatgacgccgaccagacaggcgacgatcggcgaggcgcatccggagttgatcttctggaatctcgctgggcaagtccgtcttgcaaagaagacgtcagcgcaggggctcgaacagcgcatttcgttgcttgagcaacgcggcttcacgcgtttgccgaaatggctgaagctgcgtcacggcactggcatcgcccgcgacgacctcatcgacgcgtgcgcctgcgcggtcgcggcgcgcgacagcaggcagcgcgtcggcggcaaggaattcgatccgcgcggattgcggatggagatcaactactgaatcgatcaattctcccgatcgatctcagctccgaaatgcctgcgaccgtttcggctcgggtccaaggagtcgctctcgtcatccaatcttgccgctctggcttcgtacgtctcggccattgcccgcagccgccgcgcggctgcgtcatgggcgagattgttcgcgacgcggcgacagcgtttggcgtggtcgagcagggcgcgcttctcgatgttcatctgcctacaacgcgcaagcatcgccgatgctcccatccaatcaccttgtcggcttgtcattaatcgggaaaaataggcaatattttcgcagaaggcgcggaacatggtgctggagctgacgttgagggcaaaagacgtcagtgggaagaacgatcatgtatgatgttcgccagtgggcgactgcgatgcttgcgatttcattcacggccatgctgctggtgacaggccgatggtttatcgactatcgattgcagcatgagacaaggactccggtcgtggcttccgcgacggtgccgctgtaggtcgccttgagcgacgctccgcctcgagcgctgaccttgccccgttcgccggctcgcctagattagaccacatcgtgcgatgcagccggagtgccgatgtctgatctatccgttttccccatcaccaagcgctggccggccaggcctcccgagctgcttcagctctactcctgcccacgccgaacggcgtcaaggtctcgatcatgctggaggagatcgggctgccttacgaggttcatctcgtcgatttcggcaaggacgatcagaagacggccgaattcctctcgctcaatccgaacggcaagattcccgcaattctcgatcccgacggccccggcggcaggccgctgccgctgttcgagtccggcgcgatcctgcaatacctcgcggagaagacgggcaagctgctgccggtagacgccgtgcgccgctaccagaccatccagtgggtgcacttccagatgggcggcatcgggccgatgttcggccaggtgggcttctttcacaaatttgccggcaaggatttcgaggacaagcggccccgtgaccgctacgtcgcggaagccaagcgcctgcttggcgtgatggagacgcatctttccatccggcaatggttcatggatgacgactacactatcgccgacatctccatgctcggctgggtgcgcaatctcatcggcttctacggggcgggcgatctcgtcgagttcagccagttcaagaccgtcggtgcctggctcgaacgcggccttgcgcgtccggcggtgcagcgcgggttgagcattccgcagcggccgtgatgcttcattagaacagccggccgccgttcggcacgggcttgctcggctgcaccagcacgaccttgccgttcgcatcggggaagccgagcgtcagcacctcggagacgacggggccgatctggcgcggcgggaagttgacgacggccgcgacctgctgccccacgagactatcgagtgggtgattttcggtgatctgggccgagctcttgcgcacgccgatgacggggccgaaatcgatccacagccgccacgccggcttgcgcgcctccggaaacggcttggcgtcgacgatcgtgccgacgcggacatcgaccgcgaggaagctgttgaagtcgatggtcggcgaggcggcggctgcgggatcgtgcgtcacgtgcatgggatgtccgttcggagagttgggtggttcgcaatattgtcgcgcgaagcggagtttcgtacaacgttggccccagcacgatacgccatgcgcgaggaccgtcttgcccaacatcatctacggcatcaagaattgcgacaccatgaagaaggcccgcgcctggctcgatgcccatggtgtgccttatgagtttcacgactacaaggcggcgggcgttgagaaggatcggctcgagcggtggagcggcaaggtcggctgggagacgctgctcaaccgcgcagggacgaccttcaagaagctgcccgattccgacaaggacgggctcaccgagaaaaaggcgctggcattgatgctggcgcagccatcgataatcaagcggccggtgctggaagtcggcggcaagctgctggtcggcttcaagccggagatctatgccaaggaggtcggcggcaaggcgcgctgactgctagttcaactcgatgatctcggtgacgatgccggaatccggctggtcggatagctcgaccacttccgcaggggagatgcggccgggagcgcgatgaaacagctcgcgatcaattacggcgcgcatctttggacgcggcagcgcgtcatttccgcgcatcaggttcttgatctcaaagcccccgtcctcgcagaaggtcttgaccgaagcgatgacgtgacagaccttgccgtcggtctggaacggcagcagcagcctttcataggcgacgttgcgcccatagatgtcctcgacgtcggccacgctgtagacgggcagtccgcgtgccacgcattgatggtagatcggcatcacgaggggcgcgagttgcggcccgatatagtcatccagcggaacgcccttgccggtatgtccataggcacgggagatgcgtgtgccttcgctctggatgatgaggcgcggcgtcggggccgagaaatccaccgtatagtagatgagatccgacagctcctcctcgagccgcgcgggctgatactcccagatcgccggcgcgatctgctggcgcgcataaagtcgcagccacgtgttcaggagatcgcgttgccggatcgacttgacgacggagggagcggcgcctgcaaaatccaaagcaatattctccgcacgtgaagacccccgcatgatccagcctgcgggaaaatttttgatgaaggctggcgcacggcgcgaaagaccgttaacgacggcttgatggccggtgccttgcgaaccgggaggccgggcaggcacgcatcaaaacacctccgaccaagggagcatttgtcccagccggaggcgtgatctgctcagctttccgccttgcctaacccccgtcacctccggcatattccgcgcccggaggcggcggcccgggtgggctccaaggcctccggacagccgaagcaacaaggacagccacgcgcctggcgcgggcagggggaaatctgtttggccgatgagttcattctcgaaacggaaggcttgaccaaggagttcgcgggcttcttcgccgtacgcgacgttgcgctcaaggttcgccgtgggagcattcacgcgttgatcggcccgaacggggccggcaagacgacctgcttcaatctcttgaccaagttcctcaaaccgtcagccggaaaaatcctgtacaaggggcaggacatcacggcgatggcgccggcggacgtcgcccgcatgggtctggtgcgttcgttccagatttcagcggtgtttccccatctcaccgcgctggaaaacgtccgcgtcgcgcttcagcgccagcatggctcttcgttcgatttctggcgctcgaagtcggtgctcaatcgcttcaacgaccgggcgcgtgagctgctgaacgatgtcggcctcagcgagttcgcgaacacgcccgcggtcgagatgccttatgggcgcaagcgcgcacttgagatcgcaacgacgctggcgctcgacccagagatgatgctgctcgacgagccgatggccggcatgggccacgaggacatcgacaagatcgcggcgctgatcaagcgcatctccgcgaaatataccatcctgatggtcgagcataatctgagcgtcgtggccaacctctccgacatcatcaccgtgctgacgcgcggtcaggtgctcgcgcagggccattattccgagctcaccaaggacgagcgcgtcaaggaagcctatctgggagccggtcatgcctgacactgcgatcgccgaggccccggccatggccacgaccggcggaaacatcctccaggtccgcaacctcgaagcctggtacggcgagtcccacatcctgcacgggatcaacttcgacgtgaatgcgggcgaggtcgtcaccctgctcgggcgtaacggcgccggcaagacgaccacgctaaagtcgatcatgggcatcatcggcaagcgctccggctcggtgaaattcaacgaccaagagatcatccgcgcgacctccgacaagatcgcgcgcatgggaatcgcgttctgcccggaagagcggggcatattctccagcctcgacgtgcgggagaatctgatgctgccgccggtggtccgtgagggcggactgccgctcgatcagatcttcgagctctttccgaacctgaaggagcggctcggcagccagggcaccaagctgtccggcggcgagcagcagatgctggcgatcgcgcgcatcctgcgcaccggcgcgagcttcctgatgctggacgagccgaccgaaggtctggcgcccgtcatcatccagcagatcggccacaccatcgcgcggctcaagaaggaggggttcacgatcctcctggtcgagcagaatttccgcttcgcgtccaccgtcgccgaccgttactacgtggtcgagcacggcaagatcattgacggattttccaacgcggagcttgccgccaacatggacaagctccacacctatctcggtgtctgatattgccgacaagaagattcaaaaaggaaagttgcatgaagaccatgtcgattgcgtcattgctgctgaccactgctcttgccgtcgcggtgacaggcgcagccttcgcgcaggacaagacggtcaagatcggcgcgctgtccgatcagtccggcctctatgccgacctcggcggaccgggctcgacgctcgccgcgcagatggccgttgaggattccggcctcgccgcgaagggctggaagatcgacatcatctccggcgatcaccagaacaagcccgatatcggcaccgcgatcgcgcggcagtggttcgacgtcgacaaggtcgacgtcatcgtcgacgtgccgaactccggcgtggcgctggccgtcaacaacgtcatcaaggagaagaacggcgtctacatcaactcgggcgcggcgacctccgacctcagcaacgcgcagtgctcgcccaataccgtgcactggacctacgacacctacatgctggcccacaccaccggacaggcgctggtgaaggccggcggcgacagctggttcttcctgaccgcggactatgccttcggtgcggcgctcgagcgcgacaccagcgcggtcgtcaccgccaacggcggcaaggtggtcggcggcgtcaagcatccgctgaatacgccggacttctcctccttcctgctccaggcgcagtcgtccaaggccaagatcatcggtcttgccaatgccggcggcgacaccaccaacacgatcaagcaggcggccgagttcggcatcggcaagggcggccagaagctcgcggccctcttgctgttcctcaccgacgtcaaggcgatcggcctggagacggcccagggcctcaacttcaccgagacgttctactgggacatgaacgaccagacccgggcgttctccaagcgctttgccgcgaggatgaagaacaatgcgccgccgaccatggtgcaggccggcgtctatgccggcgtgcgtcattatctcaaggcgctggaagccctcggcggcaacccgcatgacggcgtcaagatcgtccagaagatgaagtcgatgccgaccgaggacgatctgttcggcaagggcgagatccagccgaacgggcgcaccatccacaacgcctatctgttcgaggtgaagaagccctcggagtccaagggaccatgggacttctacaagctggtcggcaccgtgccgggcgaccaggctttcacgccgctatccgagagcaagtgcgcgctcttgaagaagtaagataacgtcgcgcaggtcttgaggcctgcgggcaagtttcagggaacgccgaagggaccgggtgcgggatcgatgcaggctctatacgctcagctactggtgggactgatcaacggctcgttttacgcgctgctcagtctcgggctcgccgtgatcttcggcatgctcaacatcatcaacttcgcccatggcgcgctctacatgatgggcgccttcgtcgcctacttcctgttgaacctgggcgggatcaactattggtgggcgctcctgctggcgccgatcatcgtcggcatctttggcatgatcctggagcggaccatgctgcaatggctgaccgggctcgaccatctctacgggctgctgctgaccttcggcatcgcgctgatcgttcagggcgtgttccagaactacttcggctcctccggcctgccttacgcgattccggaccagctcaagggcggcatgaatctcggcttcatgttcctgccgatctaccgtggctgggtcgtcgtgttctcgctggtggtgtgtctggccacctggttcctgatcgagaagacgcagctcggcgcttatctgcgcgccgccactgaaaaccccaccctggttcgcgccttcggcatcaacgtgccgcgcatgatcacactgacctacggtcttggcgtcggccttgccgcgctggccggcgtgctctcggcgccgatcaaccaggtgcggccgctcatgggcgccgacctcatcatcgtcgtgttcgcggtggtcgtgatcggcggcatgggatccatcatgggctcgatcatcaccggcttcgcgctcggcgtgatcgagggcctgaccaagtatttttaccccgaggcctccaacaccgtcgtgttcgtgctgatggtgctggtgctcttggtgaagccaacgggattgacgggaagggcggcctgagatgacaaccctgacggacgacacgctgccggcaaccccgcgcgcgatgcgcgacgagatgacggtgttcgtggtgatggcgctgctgcttgcggcggtcccattcacgggagtctatccgttcttcgtgatgcaggcgctgtgcttcgcgctgctcgcctgtgccttcaatctgctgatcggctatggcggcctgctctcgttcggccatgcgatgttcctgggaacggccggctattgcagcgcgcatgcgctcaaagtgtgggcgctgccgccggagctcggcattctcgtcggcgtcgcggcggctttcgtgctctcgatcgtcaccggctatatctcgatccgacgccagggcatctatttctcgatgatcaccctggcgctgtcgcagctcctgtacttcatctatctccaggccccgttcacccatggcgaggacggcatccagggcattccgcaggggcgcatgttcggcctcctcgatctgtctcagccgacggtgctgtattacgtggtgctggtcggcttccttgccggcttcctcctgatcttccgcatcatcaactcgccgtttggcgaggtgctgaaggccatccgcgagaacgagccgcgcgcgatctcgctgggctaccgcaccgaccagtacaagttcctggccttcgtcctgtcgggtacgctggccggccttgccggagcgctcaaagtcttcgtggcgcagaatgcctcgctcaccgacgtgcactggtcgatgtcgggcgaggtcgtcctgatgacgctcgtcggcggtctcggcaccatctttggtccggtggtcggcgccttcgtcatcatcgccatgcagcaatatctggcgggcttcggccagtgggtgacggtcatccagggcgtgatcttcgtgacctgcgtgctcaccttccgtcgcggcgtcgtcggcgaaatcgcgcactacttccgacgatcgctctaagtaattgattccagttcaatttacttgctgcgtgaaagcggtggatgatccggctccgcgggcgtgagatgacacgcgcgcggatcgaaaatggtctatgacagttttgtgacggccccttggggcctggccatttccaaccggtagcctacctcgatgatgcgatggtttcgtgcgttcctgcccagggaagagcggttcttcgacctgttcgaccggcatgcccagacggtgatccagggggccatcgcgctccagggtatgctcaacggggggcaggagacgccggtttattgccagcgcgtcaaccagttcgagaacgaggccgacaacatcactcgcgaggtgctgacagcggtgcggcgcaccttcatcacgccgttcgaccgcggcgacatcaagaacctcatcacctcgctggacgatgcgatcgaccagatgcagcagacggccaaggccgtcatgttgttcgaggttcgcagcttcgagccgcccatgcgcgagatcggcgcgctcctgatcgaatgcgccaatctggtgggacgtgcgctgccgctgatgcagtcgatcggacccaacgtcgcgatgctgactgccatcaccgaagagctcggcaagctcgaggggcgggtcgacgatctccacgacatcggcctcaaggagctctttctgaagcatcgcgaaggcaatgcgatggacttcatcgtcggcgccgaaatctacgatcatctcgagaaggtggccgatcgcttcgatgatgtcgcgaacgagatcaacagcatcgtcatcgagcaagtgtagcgcatgatccggacaggcgtgcagcggtcttccttcgcgacgaacgcggaacgcgttcgcgcggaggtcgtgcgcagagcttagagcgggggccgcgctgtggatgccgcgttggcttttcctgtcctggtcggcctgatcgccgtcgcgctgctgttcgacttcctgaacggcctccacgacgccgccaattcgatcgcgaccatcgtctcgacacgcgtgctgcggccgcaattcgccgtgttctgggccgccttcttcaatttcatcgcttttctggtgttcggactgcacgtcgcccagaccattggcaccggcatcatcgatcccgcggtcgtcgatgcccaggtgattttcgcggcgctggtcggggccatcgtctggaatctcgtgacctgggcgctcggtatcccgtcctcatcgtcgcacgcattgatcggcgggctcgtcggcggcggcatggccaaggcggggatctcggccgcggtctggagcggcctgtccaagacggtcctggcgatcgtgctgtcgccgctggtcggtttcctgctcgcgatgttgctggtggcggtcgtgtcctgggcgtcggtgcgctcgacgccgttcgcggtcgaccgcgcctttcgtatcctgcagttcgcgtccgcctcgctctattcgctcggccatggcggcaacgacgcgcagaagaccatgggcatcatcgcggtgctgctgtattcgcagggccatctcggcagcgagttctcggtgccgttctgggtggtgctgtcctgccaggcggcgatggcgctgggcacgctgatgggcggctggcggatcgtccgcaccatgggcctgcgcatcaccaaattgacgccgatgcagggcttttgcgccgagacgggcggcgcggcaaccctgttcatggcgacctatctcggcgttcccgtctcgaccacccataccatcaccggcgccatcgtcggcgtcggcgctgcgcgccgcgtctcggcggtgcgctggaacgtcgcaagctcgatcgtctatgcctgggtgatcacgatcccggcctcggccatcgtggccgcgctgacctggtgggtggtccagctcgtcaagtgacgagcttcagcccgatgatgccggcaacgatcaggccgatgctggcaagccggagcgcgctagccggctcgccgaacagaaagatcccgagcgccgcggtgccgaccgcgccgatgccggtccagaccgcgtaagcggttcccacgggcagggacctgagcgcaagcccgagcagaatgacgctcccggccatcgccgccagcgtgatcacggacggaacaagccgggtgaagccctcggtatatttcaggccgatcgcccagacgatctcgaggagaccggcgacgaacaggatgctccaggccatgacgaccctccaatcaaggcagggtcgtccccgcggcgaggtgctgagaaaggggaaggccgtccttcccgaaagccgatatggggctggccggaagcctccgcaatcaccacatgaggcttgatcaggcccgctttccctgccacacgctcccgccatgtccgacatcgccacccctacagccgaatcgccggcccgttccccgcttgccgccgaagtggcgcggcggcgcacctttgcgatcatctcgcatcctgacgccggcaagaccacgctgaccgaaaagctgctgcttttcggcggcgcgatcaatctggccggtcaggtcaaggccaagggcgagcggcgcaacacccgctctgactggatgaagatcgagcgcgagcgcggcatctccgtggtgacctcggtgatgaccttcgagttcgagggcctcgtcttcaacctcttggacacgccgggccacgaggacttttcggaggacacctatcgcacgctgacagccgtggattccgccgtgatggtgatcgacgccgccaagggcatcgaggcgcgcacccgcaagctgttcgaggtgtgccgtctgcgcgacattccgatcatcacctttatcaacaagatggaccgcgagagccgcgacgtgttcgagctgctcgacgagatcgagaagacgctggcgctcgacaccacgccgatgacctggccggtcggtcgcggtcgcgacttcctcggcacctacgacgtgatcaatggtggcgtgcggctgctggaaggcggcggcgccaagaccggcgcggcacagcagatcgcgatcgaagagctcgccaagctcagcgccaatctcgatgtctccgcggtaaaggacgagctcgagctcgtcaccgaggcgtcaaagccgttcgagctcgaggcgttccgcgagggccatctgacgccggtctatttcggcagcgcgctgcgcaatttcggcgttggcgacctcctggagggccttggcaggttcgcacccgaaccgcgcgctcaggacagcgaccagcgcaaggtcgaggccaccgatccgcgcatgagcgctttcgtgttcaagatccaggccaacatggatccgaaccaccgcgaccgcatcgccttcgcacggctctgctccggcaagctcagccgcggcatgaaggccaagctcgtgcgcaccggcaagagcatgccgctgtcgagcccgcaattcttcttcgcgcaggaccgctcggtggcggacgaggccttcgccggcgacgtcgtcggcatccccaatcacggcacgctgcgcatcggcgatacgctgacggaaggcgaggatttcaacttcgtcggcgtgccgagcttcgctccggaaattgtccgccgcgtacggctcaccgacgcgatgaaggcgaagaagctgaaggaagcgctccagcagatgtcggaagagggcgtggtacaggtgttccgcccacgcgacggcgcgccggcgcttgtcggagtggtcggtgcgctgcagctcgatgtgctgaaggcgcgtctcgaggccgaatattcgctgccggtcgagttcgaggtcagcgagttccagctggcgcgctgggtctcctccgaggaccgcaagaagctcgacaccttcatcgccgccaacacctccagcatcgccgacgacgtcgatggcgatcccgtgtatctggcacggaatgagttctatcttggctacaccaaggagcgcgcggagggcatcgagttcagcaacgtgaaggacgtcaagaagaaggggtagggcgcaacacgccccttcacgcgcgagcatgtgaatgcacgcggggttgacgtattcatgggcaatgccacttcttctcgtggcattgcgagctcattccatgtggcgtggcatcgttgtttttctgttgctgacgatctcaacgatcgcagcggacgcgcagcgtcgccagatcaatccgatcccgttcgcgcatgaaccgtgcagcgtgctcgatggccggccctgcacgccgtcctattgcagcccgctcgagtccggcccctgcatccccgagatcggctatccctacggccagaacctccagctcaccattcagagcgttccgtccgaggccgaccgcgtcaagtaccggaaaccggatcacgatctcgacaccatcggcgacctcttcgccgagctgcgcagctgctggtcgccgccggcggacaatgcgcgggagggcatgcagatggcggtgcgattcagcttcaacaaggtgggcggcttggtcggccccccgcgattgacctttgcgacagcgggcgtgccggccgccacccgcacgatctatcttgatgccatcaatgcatcgctgaacgcctgcctgccgctgaaattcaccagcggtctcggcggtgcgctggccgggcggccgatcgcgatccgctatgttgataatcggaagctcggacactagcgctatccctcatcctgaggagcgcgttctccacgcgcgtctcgaaggatgaaagcccccgttgctgcggcagccgggcctgcatgattcgagacgcgcgcaagggcgcgctcctcaccatgagggcctgagagttgcgagcggcagccaatcgatgatacctcagggccggggggctgctttgcggggaggatgtcgtgggtctgctggtcatgatcctggggctggtgctgttcttcggcatccatgttttcacgacgaaacgtgaggcgcgtgcgcaggcgatcgcaaggctgggcgaggggacctacaagatcctctattcgctcatctctcttgcggggctcgcgttgatcatctggggttatgcccactatcgcgccaccggatggatcgacgtctggtatccgccgaaggcgatgaagcacatcacgctcgccttgatgctgcccgcagtcatcctggtggtggcctcttacttgcgcggccgcatctatgcgacgttgaagcacccgatgctggccgggatcaagctatgggccgccgcgcacctgctcgccaatggcgatctcggctccatcatcctgttcggctcgttcctgggctgggcggtgtttgatcgcatcaccctcaagcatcgcgccgacagcggcgcgccgccgataccggtcggcggcgtcagcaacgatctgattcgcggtcgcggtaggcatcgtggcctatctcgcactggccttcgcgttccatccggtcgtgatcggcgttcccgtgatcggggtctagccggtcagcacaagacgcaacccggctgtccatgcgcggaagctgacaagagcaacaagccgagggcccttcgatggattggtcgcaatctcagatcccgccgatgcgtctcgaggcgcgctttggcgatcgggtggtgccggcattttcggatcggcctgcgagcgtctgggcgatgatcgcggaggcgcgcgatcgcaatgctgatggcgaggcgctgatctgcgccaatgtccgcctgagctggcagcaggccgttgagcagtcagcgcgcatcgctgccggatttcgcaggctcggcctccagcgcggcgaccgtgtcgccatcctgctcggcaatcgcatggagtttccgctgctgctgttcgccgccgcgcatgaagggctggtcaccgtgctgctcagcacgcgccagcagaagccggagatcgcttatgtcctggctgattgcggcgcgaaaatcctgattcacgaggcggcgctcgccgagcggctgcccgatgctcaggacgtgcctgctgtaatccaccgcatcgccgtcgatgacgatcccgccggatctcgcttcgccgtccttgccgacaatgcaccggcgcccgcgccggtcgaagtgaacgaagaggacaccgcgatgatcctctatacctcgggcaccacgggcaagccgaaaggcgcgatgctggcccattgcaacatcgttcattcctcgatggtcttcgtgtcatgcctgcaattgacgcaggccgatcgttcgatcgcggccgtgccgctcggccatgtcaccggtgtcgtcgccaacatcacgacgatggtccgctgcggcggcgctttgatcatcatgccggaattcaaggcttccgattacctcaagctcgccgcgcgtgaacgcgtcacctacacggtgatggtgccggcgatgtacaatctctgcctgctccacccggatttcgacggctacgacctctcgagctggcgcatcggcggcttcggcggcgcgccgatgccggtcgcgaccatcgagaagctcaaggcgaagatccccggcctcaagctgatgaactgctacggcgcgaccgagacgacgtcgccatccacgatcatgccgggcgaactgaccgagagccatatcgacagcgtcggtctgccgtgtcctggtgcacgcattgtcgcgatggggcctgatgggcgcgagctgccgcctggcgagatcggcgagctctggatccagagcgcctccgtcatcaagggctactggaacaatgcgaaggccactgtcgaaagcttcactggcggattctggcactcgggcgatctcggctcggtcgatgcggaggggtttgtccgcgtgttcgaccggcagaaggacatgatcaatcgcggcggcctgaagatctactctgccgaggtcgagtccgtgctggcgggccaccccgccgtggttgagagcgcgattgtggctaaggcctgcccggtcctcggcgagcgcgtccacgccgtggtcgtgacacgcatgccggtggctgacacggacttgcggacctggtgcgcggagcggctgtccgactacaaggttcccgaaaccctggcgatcacgaccgagccgctgccgcgcaacgccaatggcaaagtgctgaagcggcagctgcgggagctgctcggaagctgaggcggacggagttctccgggcctgcctcccggggggttaacgccttgatcgggctggctttgccttgccaccgccatatcgttagggtacctcgccgccacgtggggacgggattcctgacgcgaacgccttcgcgcacgcatccggacgggcatgggattagcataagtgtctgaattacttaatgaagtcgacgaggaactacgtcgcgaacagctcaagaagctgtgggacaagtattcgatctacttcatcgccctgatggtgctggtcgtggccgccgtcggtggctggcgcggctaccaatatctggaggccaagaaggccgcagaggccggcgccgccttcgagaaggccgtcgagctgtccgagcaggacaagcacgccgacgccgagaaggccttcaccgagctcgccgccaaggctccgtccggctatcgcaccctggcacggttgcgcgctgccgccgaggccgcgaaccgcgatccccaagccgccgcgaagatgtacgacgacattgccgctgaccgcagcatcggcggcgagtggcaggatctggcgaagatccgcgccgcgggtctcgtgctcgacagcgcgagctacgccgacatgcagcagcggctggagggctccgccgcgcccaaatcgactttccgccacagcgcccgcgagatgctggctctgtccgcctggcgcaacaatgacatgaccgcagcccgcaaatggctcgacgcgatcggcgaggacggcgaaacgccgccaggcctgcgctcgcgcgccgaggcgctgcaggccctgctgccgcccgttgccaagagctgacaagagctgacgacggacctccgattcgagacgggacacaagatgcgccgtacgccacgcttgatcgccgccgccgtcctgatcgccttcacgggcgtcctcggcggctgctccagcttcgatccaagcgatatgctcgacttcctcgacaccaagaagaagctgccgggcgaccgcaagccggtcttcccggagggcgtgccggggctcgagcagggcgtgccgagagagctgtacaagggcgcgcagcagcagccggatccgaacgcgcctgccgtcgccgctctgcccgcggagcccccgccggagccggcccaaggcgccaaggctgcgaaatcgcgacaaccggccgctgccgaagcgcccgccggcgaaatcgacggcgaggcccagccggaggccgcgccgcccacggccgctccgccgcccaagcacaagatcgtccgcaggcgcaccaccgcgccgccgccggaccagcccgtccagcaggcgcaacccgcccagcccccgcagcagcaaacgcagagcgtcttcccggcgccgctgccgagcggcagcttctcgcgctgatcttttcactgcattgacaggcgcagccccggcagcgcacgaatgaccgatgtccttcacgatcgccatcatcggccggcccaatgtcggcaagtcgacgctgttcaaccgcctggttgggcagaagctcgcgcttgtcgatgacctgcccggcgtcacccgcgaccgccgcgagggcgaggccaggctcggcgacctcgagttcaccatcatcgacaccgccggcctcgacgagggcgtcaagggttcgctcaccgcgcgcatgcaggagcagaccgagaccgcgatcgggcaggccgacgcgctgttcttcgtcatcgatgcccgcatcggtcttacgcccaccgatcgcgccttcgccgatttcgcgcgcaaggccaacaagccggtgctgctgatcgccaacaagagcgaaggcaagcatggcgatgccggtgcgatggaggcgttcgcgctcggcctcggcgatcccatccagatctctgccgagcacggcgagggcatgggcgaactctatgacgcgctggccaagcttatgcctgagccggtcgaagagaacgacgatgaagacgacgcgccgatctccgaggaagaggcggcgacgcgcccgatccgggtcgccatcgtcggccggcccaacgccggcaagtcgacgctgatcaatcacctgctcggcgaggagcgcctgctgacgagccctgaggccggcaccacgcgcgattccatcgcggtcgaggtcaactggaggggccgcgacttccgcgtgttcgacaccgcgggcctgcgccggcgctcgcggatcgaggagaagctggaaaagctctctgtcgcggacgcgctacgcgcggtgcgctttgccgaggtcgtcgtgctgatgatggacacgcagaaccgcttcgaggagcaggacctgcgcatcgccgatctgatcgagcgcgagggccgcgccgtggtgctcgccgtgaacaaatgggacctgatggagaccaagggcggcggcgcgatctcgagcctgcgccgtgatgccgaccattggctgccgcagctcaagggcgtgccgatcgttgccgtgtcgggcctgatgggcgagggcatcgaccgcctgatgcaggcgatccaggatgcctatgcggtctggaacagacgcgtgccgacggccgcgctcaatcgctggttcgagcaggcgatccaggccaatccgcctccggcggtgtccggccgcaggctgaagctgaactacatcacccagaacaaggcgcgcccgccgagcttcgtgctgttctgctcgcgtgccgatgcggtgccccagtcttacttgcgctacctcaccaactccatgcgcgagaccttcgatctgccgggcacgccggtgcgcatcaccctgcgcgagaaggccaatcctttcgcgcacaagcgcaagcggccgtcgtgagcgatggcgccggcgaggcggtggcggcaagtgctgcgccggcccggcgcggtgtggtcgccttcatcttcgtcaccatcctgctcgacatgctcgcgctgggcgtgatcatgccgatcctgccgaagctgatcgagagcttcgtcgacaacgataccgcgcacgcggcccgcctcttcggcttgttcggcaccgcctgggctttgatgcagttcgtgttctcgccgctgctcggcgcgctgtcggatcgcttcgggcgtcggccggtggtgctgctgtcgaatttcgggcttgcggccgactacgtgctgatggcgttcgccccttcgctggtctggctgttcatcggccgtgtgatctccggaattacttcggccagcatctccacggcatttgcttatatctcggacgtcactccgccggagcggcgcgcggcggtcttcggcaggattggtgcggccttcggcgccggcttcatcctggggccggcgctcggcggtctgcttggcgacgtcgatccgcgcctgccgttctgggcctcggcggccctgagcttcgccaatgcgctctatggactcttcgtcctgccggagtcgcttgcgcccgacaagcgcgcgccgtttcgctggcgaagtgccaatccggtcggggcgctgcatctgctgcgatccaacgcggcgctggcggcgttgtcgatcgtcaacttcattgctcaggtcgcccatgtcgtgctgccgtcgacctttgtcctctacgcgacctatcgctacggttgggattccaggacggttggattgacgctcgcgatggtcggcatctgcgccatggtggtgcaggggctcgcgatcggcccgatcgtgcgcgtgctcggcgagcgcaacgcgctcctgctcggcctgtgctgcggcgcgctcggtttcgtgatcctgggcgcagcaccgaccggaccgttgtcctggctcggcattcccgtgctgtcgctgtggggcatctccggcgcggcctcgcaatcgctgatgacgcggctggttgcgccccatcagcagggccagctgcagggcgcgacggcgagcgtgcagagcgtgtcgcagctggtcggcccgttcctgttcacgctgacgttttcctatttcatcggcgccggcgcgccgctgcatctgcccggcgcgccgttcctgcttgcagcggcgctgatggtggtgtgcgtggcgattgcggtgcggacgctgggtgcgacgaagaacgcttgaatgttcgccatggcgggcttgtcccggccatccacgttcttttctttggccccaacgtgaatgcccgggacgagcccgggcat

SEQ ID NO: 191 - DNA, 2419 bp, Bradyrhizobium colbertium
tcaaagccgtggcctgagaacgacgcttacgaatttgttgatcgtcaagccgaatcatgatcttcccatcgattggcgctagatcgcgatgcgggcgccctgctgatgtgcgcaagcaatcgaggtgtcgatcatccggactgcggcatcatgggctgcagcaagtgcgtctacgatcaggcccagacgccaccccgtcgtccgcggacgaaacggttgtagcaaggggtgtaacggtccaaacgccgcgggcagatcacgccagggtgccggatcgcaagaaccaaaagatgccattgaggacacgacggtcgttcactagagggacgccaagcggcttaatcggttgcatgggctggacggcaatccattcataatcggcgagtttgtagcgcatgattcgagccagtttggaagtttgaatcaactaaaggcgccagacgcaacgcttccggtcaggccccggtggacgcttaccgagtagaagcaaacatgagccagccgacaatctccgctgaaaccgttgaaaatgaccgtcattgcccctagcccaagaatagccccccgtgctttgattgtgtggtcgaatttgcggatcatctagggggcgtttctttgacgaccgagcgtgtggaccggcgactggcagcggtgctggcggcggatgtcgctgggtacagccgactgatgggggccaacgaggaagacacattggcccggctaaaggctgtcagaaacatcctggttgagccggctataacctcccatcgtggccggatcgttaagacgaccggcgacggtcgctggtggagtttgccagcgccgatgcggtgcgcggtgcgactgaagtccagcgcagcatggccgagcagaccgccgtgccgcaggatcaacggatcgaatttcgcatgggcattcacgttggtgacatcattttagataataacgacattttcggcgatggcgtcaacattgctgcccgcctagagagtcttgccgaacctggcggggtttgcatttcggatgacacctatcggcagatccggggcaaggtcgacatcgcatgtgacgacctcggaccacagaacctcaagaatattgccgatgcgatgcgggcttggcgccttcaattgaccaatcgagcttcgtccatggcacatccggttcgggcatagccgcgccagcggttctggctttacccgacaagccctccatcgcggtgctgccgttccagaatatgtccggcgatcccgagcaggagtatttcgccgacggcatggtggaagacatcatcactgcgctgtcacgcttcaattccctgttcgtgatcgcccgcaattcgagctttacctacaagggaaaggcggtcgacatcaaaagggtcggccgcgaactcggcgtgcgctacgtgctggaaggaagcgtccggaaggccggtggccgggtgcgcatcaccggtcagctgatcgatgcggcgagcggcgcccatctttgggcggacgggatcgacggcgaattgaccgacgtcttcgagcttcaggaccggataacgacgagcgtggtatcctcgatcgcgccgaagatagaacaggcggagatcgagcgggtccggcaaaatcctacgaacgtaccggacagctacgattcctatctgcagggactggcgctggctagtcgcgggcaaggcgccgaggccaggagcctgttcaagcgggcgatcgagcaggatccgctatacgccgctgctcacgcgatggcggcttacatctacctcgtggatcaagctcagtacggtgcgatagcggacgcgggcatgcgcgccgatgccgccgcgcttgccaatgccgccctgaaactcgctaaccaggacgccttcgtgctggcccgctccgcccaagccctcacctacctcggcctcgaatacgaccgcggggcctcgctggtagagcaggcgatcgccctgaatccaaacttgtccgtcgcatggctcgcaaggtgctgggtttcggtcatgcgggctgacgcggagcgggggatcgaaagcttcgagaaggtgatgcggctaagccctctcgatccgctcaagcctttcttcgtggccggcgttgcgcactgccattggtttcagggccgtttcgaggaggggtgcgagcttgccaaggaggccattcagattcgaccgcaccttcagccgttcgcatcctacatcgtgaacagcgtagcgctcggagatctgccggaggccaggaaggccgcccggcgtctgctggaattcgatccctccttccggatgtcgggcgctgccgcgatttttctgatccggtctgcggaatatcgcgaaaaatttctgggcgccctccggactgcggggctgccggactaggtggtgtggactgatcttcccccgataaagtggacg

SEQ ID NO: 192 - DNA, 94518 bp, Bradyrhizobium colbertium
  misc_feature (69233)..(69242): n is a, c, g, or t
  misc_feature (75190)..(75199): n is a, c, g, or t
ggtgtccactcattcggaggaagttcacgccccatttgcttgattggagagagcacaagctggagcactaacatggagaagacggaactgcctcctgaagattttcctctcatgctcgatggcaatgccttggtcacccaagatggaacgaaggtcgccgacgcgcagtcggtccggttggcagaagatatagcgcaacgcctcaacgagaacgcagcgcgcaaacgagaggatcgctgggccctctagaactgcctcgcgttggcctacttgagagaagacagttgcagcatttgcagcggcgaaaagcccgactgccaggcctcggctgacgaaatgcagcgagttgcaagaacgtgtgacgaaaacggcaacatcgcctgcgaaggagcacgagctcctctttgcgctgtgaccaaagctcgagccgggattccagcgccgctccgccaagctagatttccgccaagctactagataacgagcccgttgcggtggcgccggttcctcgggtcgggagagagacacgggtcgggaccgcaggagcggaaagggagatcgcggggccgagttcctgctaggctacggagagagcacggccactcgcccctcttcatcatcggcccgtctacaatgaccggcactcggatcgctgcttttcaacctctacgaacgggtttgcttgcccgcaaccctgactacattatcgagagtgggctgctagccgatcaaaaaacacccgtttgaaaaaccgttttagttctgccttctcaaacggtctctcgcgctaaggactttatatggtgggcgcaccagggctcgaacctgggacccgctgattaagagtcagctgctctaccaactgagctatgcgcccgaaaggcgatcgaagccttgcgaggccggtcgtttagcaaagcgatccggggatggcaagcgacgggacgcaagttttccaaggcttcgtccccaggggcggaaaagcggaaagccgctggattccagcggcttcgccaaggttaatcgtgcggaaacccggccgctcagagccggccctcgcggtcccggccctcgtcacggtcgaagcggtgatggtggaaatggtccatgccgtggcccatcatgcggtccatgccgcgctccatgaaatggcggtggcgcggaccgtcctcgccgcccccaaacgggccgcggtggcgggtcagcaccgcgaggcgccgcttctggccctcgtccagggtcttgtagagcggatcggcggcatcggcgatcttcttcagggcggcggagctggcgcccatgtcctcggcgcgctgacgcaggcgggcgatcggatcttcaggcttgtccgcatcattggggccggcattcatccgcgcattggcgcggtcgatgcgcagcttggcgaactcccgcacggcagtctcgaccggcggccacagcttctcctgatcggcgttgagcttcagcccggcatggacggcggcgatacgcgcgtcgaccaaggcggcgcggtcctcggggttcatgcgcatgtggcggacgtgctccgtccacgggcgatgatattgggcatagaccgcgcccgagccggcgatgctgagcacggcgatggctgcgatggtgaatttcttcatgcgaacctcctctggaaggatgcccggaggatgagcgcagcgcggcccacgcgcaacttacaacttggacagggagcgcgacgttacgaagatgtaacggccgattttacctctagccgcaattggacatcattcgcaacaaagaggcttccgtgccgacggcacggaagccttcgttcagcgttcgttatgatcagttcgtggtgcccttggcttccttcaggaactcgtcgatcagcggctggcccacgcggctcgccgcgtccttgtagaccggctccatcgccttgcgcatcgcctcgtcctgctccggggtgagcttgatgatctcgctcttgccgctcttcttgatctcggccagcgcgtcatcgttctccttctgagactgcgcgttgctgaaagcggtcgcttccttcatcgccttggagagctggtcgcggatgtcggccggcagatcgtcccagaacttcttgttcacgatcacgacgtagccgatgtagccgtgattggtctcggtgatgtacttctgcacctcgtgcatcttctgggtgtagatgttcgaccaggtattctcctggccgtcgaccacgccggtctggagtgcctgatagacttccgagaacgccatcacctgcggcagagagctgagcgccttgaactgggcctggatcacgcgcgacgactggatgcggaatttcaagccttgatagtcggcaggcgtgaccagcttcttgttcgcgctcatctgcttgaagccgttgtcccaataggcaaggccggtgatgcccttggcgtccagcagcttgagcaaccgcgtgccgagcggcccttccgtcaccttccgcagcgtcttcaggtcgggcaggatgtagggcagatcgaacacttcgaactcgcggatgccgaggggcccgaacttggagttggacggcgccagcatctgcacgctgccgagctgcagcgcctcgagctcttccttgtccttgtagagagtcgaattcgggtagacttcgaccttgaccttgccgccggtgtacttctcggccagctccttgaacttctccgcgcccttgcctttcggcgtgtcggtggcgacgacgtggctgaacttgatgatgatcggtgattgggccgacgccggcccggtcaagccaagtgccagagccgcgatggacgcggcgatcgcgaaggtgcgcattgtttctccctgtggttattgaggtcgcccggcgggggcgaccgatccttcatggccgtcacatcaatacaggccggcgcatcgtacggctattggccgttcgcagggctgccatctctccggccgtcattccggggcgatgcgaagcatcgaacccggaatctcgagattccgggctcgcctcgccgaggcgccccggaatggcaagcttcgcttgtcagctcgcagccgccgtcgtcaccgtgtcgcgctggcgcttcatgacgatcttgttgagcgcgcccagataggccttggccgacgcgaccaaggtatcggggtccgccgcgcgtgccgtcatcgatcgaccgtcctgcgccagccgcaccgagacttcggcctgcgcgtcggtgccttcggtcacggcgtgaacctgatacagctccagcttggcctcgtggggcacgaggcgcttgatgcagttgaacaccgcgtccaccgggccgttgccctcggcctcctcgatcttgatctggccgtcgacgtcgagcttcatggtcgcgcgctgcgggccatgcgtgcccgcgatcacggtcagcgaggtcagcttgatgcggtcgtgggaggccgccatttcctcgtcgaccagcgcctcgatgtcttcgtcgtagatgtccttcttgcggtcggccagcgccttcatccgcgtgaacgcgtcttccaactggttcgggccgagcttgtagcccatctcctccagcttgtgcacgaaggcatggcggccggaatgcttgccgagcaccagcgaggattgcttcagcccgaccatctcgggccgcatgatctcgtaggtggaggcgtccttcagcacgccatcctgatggatgccgctctcatgcgcgaaggcgttccggccgacgatggccttgttgtactggacgggaaacgaggttgccgccgacaccaccttcgaggcacgggtgagctgcgtagtgtcgatcttgttccagtacgggaatttgtcgttgcgcacgttgatcgccatcacgatctcttcgagcgcggcattgccggcgcgctcgccgatgccgttgatggtgcactcgacctggcgcgcaccgccgacgatgccggccagcgagttcgcaaccgccatgccgaggtcgttatggcagtgcacggagaataccgccttgtccgaattaggcacgcgttcgatcagcgtccgcatgaagtgagtgtattcctccggcaccgtgtagccgacggtgtcggggatgttcacggtggttgcgccggccttgatcacggcctcgacgatgcggcacagaaaatccatctcgctgcgggtgccgtcctcggccgaccattcgacgtcgtcgatctggttgcgggcgcgtgcgaccatggccactgaagtctcgatcacctgctccggggtcttgttcagcttcacccgcatgtgcagcggcgaggtcgcgatcacggtgtggacgcggccgcgcttggcgaacttcaccgcctcggcgcagcgatcgatgtcggccggatgtgcgcgcgacaggccggcaatgacggcgttcttggagcgacgcgcgatctcgctgaccgcctggaagtcgccttcggaggtgatcggaaagccggcctcgatcacgtcgacacccatatcgtccagcagttcggcgacctcgagcttctcctcgaaggtcatggtggcgccgggacactgctcgccgtcgcgcagcgtggtgtcgaaaatgatgacgcggtccttctcggacttgttctgggtggccattttctagaattccttttgagcttttgcgccgttcagactgtcttggtccctggcgcttgggtgtccggtgatctcgaccaacccctgagcgcccaggcgcatggcgcccagccggccctcaggggcaagtaagaaggaggccgccaataaggagggtgggcagcgaggcggccggaatcgtggcggcggccagagccacctccctcgaaatcccctcgatttggccgcgaatcagcattgccggaccctttgagccacaaatcctcggtcaaaaccgttgacggttggttgccgggaggctcagcgcggtccgtttctagacgagaaaaggccccaaccgcaacgccaaaagatggtcaggatagctgacctggctgatttcggttcgtgtcgaatggagcggaatgcgtcccgcattcgctcgatccgggcgacgggacgtcctgccaggcgatcgagtgcgagcgcgccacggcggctatcccgtgccggtgcggcgggcgcgggccctgctctcccaacggttcagcatctggccgagttcgccggtggccccgggcacagcggtgccggccttcgcgatctcgttggtgtttgccggcgcattcgcggagagccaatccggctccgcatattcgcgccagcggcgtgcctccgccctcctttccgagagacgtagtcacgcgtgaaatatccggccgcaaatgcgatcgcgagaacgatgaccaggacgacgacttgcaaaatgagctccggcttttttcccgttcagcgccttcaagtctaaacgcatttgaaggtgacgaaattgcgacccgcgatcgcgcagtggtttcgattccacctctcgcaaccggcggcggaccggactaacctccatcccgctcggccggatcaaccggccagcgagacatgaccgggaggacgcgaatgacacgccaagaggctcgtgaccaggagcagcgtgaccaggatgctgcgctttcgcgacgaacacttgtccgggggcttgcaatcagtgcggccacgatcgcgggagccggcgccgcactggcccagaccggacccgccgcaccgccgagcaccatcaccaacccgccgcgcgatttcggccctcgcggcgcaccgaccacttatttctgggacccggacatcatcgcggtggatccgtccttcaacgatctcgcgcagcccaacaccgcgatcaagcgtctctacaccggactgctatgggccgagggccctgcgtggagcgcgcaaggccgctatttgttgtggagcgacattcccaacaaccggcaaatgcgctggagcgaggacgatggccgcgtcagcgtattccgctcgccctccaacaactccaacggcaactcgttcgacttccagggtcgtcagctctcctgcgagcacctgacgcggcgcgtgacacggtacgagcatgacggcaccgccaccgtgctggcggattcctatcagggcaagcggctgaattcgccgaacgacatcgccgcgcatcccgacggcagctactggttcaccgacccgccctatggcggccaactctatgaaggcgagcccgacgtcgcgggtggtccgagcaatacggccggcaaactcaacccgcggatcggccagcccgccggcttcgtgccgggcaggcgcgagctgccgaccaattgctatcgcatcgatccgtcgggccgcgtcgacctcgtggtcactgaggaccaggtgccagacccgaacggcctgtgcttctcgccggactacaagaagctctacatcgcctccaccggcaaagggcctggcgacaccggtcccggcggcaagggcgagatcttcgtgttcgatgtcggcagcgacaacaagctgtccaacctgaaacgcttctccgactgcgtgatcgatggcgtgaaatgcgggcccgacggcctgcgctgcgacgtcaacggcaatctctgggcttccagcaatgccggccgcgcggtcggctacagcggcgtgacggtgtggtcgccggagggcaagctgctcggccgcatccgcctgccggaagtgtgtggcaacgtctgcttcggcggccccaagcgcaaccgcctgttcatggccgcgagccagtcgctctatgcggtgtacacggcgacgcaaggcgcggggccgggctgagccacataatccgtgaacaagagcgcgccggcgtctttcgccggcgcatcaccgatctctagggcaggaatattgtcgtctgaagcatctcgcatttgcgttccctgccagcgacgacgagcctcggctttcgtcatgttgactttccaccgtccccctccccatacttcgtaaaaacaagatcacacgacggttttgagggaggataggatgccgacttcacgcaggcagctgctgaagacctcggcggctgccgccgccgcactcagcctcgactggacacgcgcccaggcgcaagccgagacattgcgcatcgggctgatctacgacctcacgggccctttcgccgccggcggctcggtcgcctcctcgatcggcgcgcagatcgcgatcgatctcgtcaacgagcaaggcggcgtcagcggcaaatacaaggttgctccggtcgccgcggattcccagagcaagccggacgttgcgatcaacgaggccgaacgcctgatcaaccaggagaagatcgacatcctcaacggcgtctatgcgagctcgcatgcggtgccgctcgcagccaaggtcgagcaacagaagaagatcctctggatcacgacggcggtctcgaccgcagtgttcaaggacaagaacctgcaatacgtgtttcgcgcccagatccattcggatcaatacgggcaggcctttgcgagcttcatcaacgagcatgcgaaagccaagctcggcatggatccgaaagaggtcaaggtcgcgctgatccacgaggacggcccctatggtgtcggcgttgcctctgccgacgaggcctatgccaagcaggccggcatccccgtggtgctgcgcgaaggctattcagcctcggcgccagacctgtcggtgctggtgacaaaaatcaagcgcgccaaggccgacgtgatttcgcatgccggctataaccccgacatcaccctgttcctgcgtcaggcgcgcgaaagcggattgcgattcaagatgctgttcggcgccggcgccggctacagccagctcgacaagctgcgcgcgaccttcggcgccgacatcgacaatttctgcaacatcgacccggtgccggcgcaattgctcgatcctgccaagctcgcgcccggcatgggcgatctgatcaagaccatggtctcgcgctatcaggccaagaccggcgccaccgacgtgccgccgcactgctcgatgggcttcaatcagacctgggtgctgctcaacaacgtgctgccggtcgccaaggagaagtacggcagcttcgagccagaggcgatccgcaaggctgcgctcgacgtcgacatccccgccggcggcaccatccagggctatggcgtcaagttcttcccgccgggcacccccctgtccggccagaacgaacgctcgacgccggtcgtgatgcagaacgcgggcgagcacatttctgtggtgtggccgacgaatatccgcacacaggacccggtgttcccactgccgaagggatcgacctacgcggcgtgaggcaggccgggctgtcccctctccccttgtgggagagggtgtctcgccgcgaagcggcgagacgggtcaggggtatttctccgcgcgcgtatctctcacttcgaacccgccgagacaaacccctcatccggcgcttcgcgccaccttcttcacaagaggagaagggttcgcagtgtgcacatggtgatatctacaacaccacccttcgtccctcctccgccgcccaatagccggcgtagttcaccttgatcgtctcataggccagcgcgagatccgacagcggctggcgcccggtggcgacgcattccatgaaatcctggatctcctgcagatatccacgcgtccattcctcctcgaggcaaacatattgccagccggtcttgcggtcgactttttctgtgatgtagacgctcgcgagcttctcctcgctggtctgatagctcatcagatgtgtgttcggggtgatgttggcgaacagcgagccgccgctcgtataggtctcgatcagattgcgcacgccgcccatgatcatgtcgccggagaacacggtcgccttggtgccgtcggagaacgttgcggtgagcgtgccccaatcctcgacatcgacagggttcgccttgatgtaagtacgctcctcgggcttcaggcccgcggtgacgttcccgacatcgcaggtgacgctggcaacacggatgttctcgccgcgcgcttgggcttccacctgcttcagatagagcacggccgagagcgggtggcagcccatgcggatgagcgagccaccaccggtcatcgcccattgcgcggcatgggcagcgtgcgagccggaatggctttcctcgcccttcatgaacaggatcttgtccttggtggcgcggatgatctctgccgtcttggtcactgccggcgcatagatccagtcctcggcgtacatgaagagtcgtccggtgcgctcaattgcggcgcgcgtggcgtccatctcctccagcacgcgctcgtacatcagcgccttcggcacgtgcttgccgatcggctgcttgtcaccctcgcggccgaaatagccggcgaagggcttttcgcagatcacatgcttgccggcctgcatcgccccgacgatcatcccggtatggagatttggcggcgtgcagatatcgatgacgtcgagatcggcgtccgcgatcacatctgcgaagttgcgatagacgcgcgcgatgttgtgccgatcagcgaattggaggacgcggtcgccccgcgccgccaccgccgcgacttcgacgcgcacgccatagacgcgtcggaatgcatgcatgtgcagctccgacacgaagccacagccgacgagtcccaccctgatcctggccatggcgccccctttcttcgaggaggcagtatagcgtgacgaaaggcctattccaccgagaccccgcaccacgagcgcatagacgatgcggccatcgagagcggggccgatcgttcacgcagcaacggatcgtccgtccccgctgtggggcacccggagcgcgaacgggctcgcgcgatggcgccgctggttcgtccgttctcgccgcgcacggctagctacgcaccagtgcgagtcagatcggccatgacgacgagcaacgatatgcgcgggcagcacgagcgtgcccgctgcacctcgcggccatcgtgctcatgcatttcgcatgcatgagcctgatggtgtggctgtccttagccgcgtgccgctcaccaatggcgatagtggtgacggtggtagacacgatacgggcggtgataggcccggtaggggcgataatagccgtagctataatacggacgataaggccgatagtatcgcggataagcatagcccggcccgtagccatagccatagtaggctggcgcgtaaccatagccgtagccgggatatccatatccgccgtaatacgggccgccataatagccgtagggcgcaccgctggcgatggcgcccccgatgatcgcgccggctgcgagaccacctagggcaaagccccagccgccgccgcgccaatgcaccggtgtgacattatcgccggctgcagccttcatcgtcgcgacattggtcggcatcgggcccgccgtggcctgcccaatctgggccgccatgaccacgccggccaatgaacaggcaattgccgtcttccagatcctcatcgtcttgctccctgtctctgtctgctttcgatggaaaaggatcgcagtgtcatgatcggccatccttgcgccaagtcaaagctcggatttgcgtgcaccgcacaagacacatgccttccttctgatcaaccggctgcggacgggatcaatgacctcgtccctcccgcatgtgacaccggcacgacgacgattggggccggatcgcccgggcacgtattaagcttcccgtgcattcgcaaccatcaaccatcttcacgatttactattcgtgccactattatcggttccaatgtgcgcggccgggaggcttctcgcgagcgccagagttgtgggagaatgacatgagtgccgcgagacccgagccgcttgcccgtcaggcgctggcgttcgtcctggccggcggacggggcagccggctcctggagctgaccgaccggcgcgccaagcctgccgtgtatttcgggggcaagtcccgcatcatcgatttcgcgctgtcaaacgcggtgaattcaggcatccgccgcatcgcagtcgcaacccagtataaggcgcacagcctgatcaggcatcttcaaatgggttggaacttcttccgtcccgagcgcaacgagagcttcgacattctgccggcaagtcagcgcgtctccgagaacatgtggtatgtcggcacggccgacgcggtgtaccagaacatcgacatcattgaatctcacgcctgccgcttcatcgtggtgctggccggcgaccacatctacaagatggactacgaggtgatgctgcgccagcacgtcgagagcggcgccgatgtcaccgtcggctgcctcgagatgccgcggacggaatcctcgggtttcggcatcatgcatgtggacgagaacggctggattcacgagttcctggagaagccgaaagatccgccgccgatgcccggaaagcccgacgtctcgctcgccagcatgggcatctacgtgttcgatgcgaagttcctgttcgatcagctcaagcgcgacgccgaggacccgaactcgaaccacgatttcggtaaggacatcattccctacctcgtcaagaacggccgcgccatggcgcaccagtactcgacctcctgcgtccgcaccggcagcgacctccgcgcctattggcgcgacgtcggtacggtcgatgcctattgggccgcgaatatcgacctcaccgacgtcgtgcccgagctcgatctgttcgatcgcgcctggccgatctggtcctatgccgagatcacgccgcctgcgaagttcgttcacgacgaggagagccggcgcggccaggcggtgagctcgctggtctccggcggctgcatcatctccggtgcctcgctacgccgctcgctcctgttcaccggcgtgcgcgtcaactcctacgccaacgtcgagaacgccgtcatcatgccctacgtgaatgtcggccgcggcgcgcgcttgaagaacgtcgtgatcgaccgcggcgtcgagattccggaaggcctggtcgtcggcgaggatcccgagctggacgcaaagcgcttccgcgccaccgagcagggcatctcgctgatcacccaaccgatgctcgacaggctcaataaatgacgcctgttcgcgtcctcgcggtcgcttccgaagtctatcccatcgtcaagaccggcggcctcgcggatgtcgccggcgcgctgccggttgcgctcaaggcgcatggcgtcgagatgcgcaccttgatgccgggctatcccgacgtgatgcgcctgctcgccggcgcggaggaactgcggcggtggccggactatttcggcggtcccggacggctgctcgcaggctcgcacgacgggctcgatctcttcgttctggacgtgccgcatctctatgcgcggccgggtaatccctacgtcaccagcgagaacatcgactggccggacaacggcgtgcgcttcgcggcgctgtcgcgcatcgccgcggacatcggccacggcctcgtgccggccttcgtgcccgatgtggtccatgcccatgactggcaggccggcctcgcgccggcctatctgcactatgacaaccgcccgcggcccggcaccgtgatgaccattcacaacatggcgtaccagggcaagttcgcgcccgagctgatcggagcggttggtctgccctggtcctccttcaacgtcaatgagctcgaatatttcggcgggatcagcttcctgaaggccggactgcaattcgccgaccgcatcacgacggtgtcaccgacctacgcacgggaaatccagaccgacgaaggcggcatggggttcggcggcctcttgcgcgcacgcgccggcgtgctcagcggcatcctcaacggcatcgatgtttcggtgtggaatccgcaaaccgatccgcacatcgcctaccgcttcggcacggaggacctgacgttccgggctgcgaacaaggcggtgctgcagcagcagttcaatctcgattcctcggacgaagcgccgctgctcggcgtcatcagtcgattgtcctggcagaaggggctcgatctgctgctcgaggccatcccgaccattttgcgcgaaggcatgcagctcgcgctgctcggcagcggcgaccgcgacctgcaggatcgctatcaggctgcggcccgcgccaatcccggccggatcggcgtcgtgatcggctacgacgagattctggcgcatctcatccaggccggggcggacgcgctcgtcgttccatcgcggttcgagccgtgcggcctgacccagctttgcgcgctgcgctatggcgccgtgccgatcgtgtcccgcgtcggcggtctcgaagacaccatcgtcgatatcggcgaggccgatgcgtccggccacgacgccacggggttcaagttcggcccggtgacggcggatgccctcgccggcacgctgcgcaaggccaacatcgccttccacgacaagctgacctggcgccggctgcaacgaagcggccttgcgaccgacgtttcctggcgcaatcgcgccggcgactatgccgcgctctatcgcagcctcatggcggcgcgcgcgtgaggcatggccgaatccatgctatggagccggacatggaccccttcgcgatcaagctgctcggctttgccgctgcgacctgcaccaccgttgcctacgcgccgcagttcatcaaggtctggaagacccgctcggcgcgcgacatctcgctcggcatgttccttgtcatggtgctgggcctggcgctctggctcgtctacggcctgctctccggcgacgcgcctctggtcgccgccaacgccgtcaccatgctgctcgccggcggaattctcttcatgaagctgaaatacgggtaaggcccccttctccgacaaggcgagaaggaagatcacccgccgaacacgtacgacgccatcgccacatgcgcgacctcgtcgacgaagacgcggcggccggcgtcgttgccggcggcaccggctgcgaccatcagcgggagcagatggtcctcgcgcggatgggcgaggcgcgcacccggtgcgctctcccagtcggccaacatcgcgttgcggcgcgccgcatccgggttgccgatggcttcgttcagataagcttcgaagtcgtaggagacctgcgtggattccggccggttgaagccgcgcatgttgtgataggtgagcccgctgccgacgatcagaatgccttcatcgcgaagcgatgcaatcgcctgccctgccccgatgtgctcggccggatcatagctcgacttcagcgacagcagcacgatcggcatgtcggcgttcggatacatcaatccgagcgggacgaacgtgccgtggtcaaagccttggccgggatcctcgcggcaatcgaagccggcccgcgtcagcagcgccttcacctcggccgccagctcgggtttgccaggcgccggatatttgaggtggtaggtatgctcggggaagccgtaatagtcgtacaccatcggcggatgcgccgaggtcgatacggtgaacgcatcggcctcccaatgtccggtgatgacgagcacggcctttggccgcgcgggcagaagctgcggcagccgggcgaacgcctcggccgtcttcgcatattgcacccgccggtcctccatgaacggccaggggccgccaccatgcgacaggaagagagtcggagatcgcgtcatggggcttgtctcgtcagcaacgggcgcgtgcctactcacgcgaccggcggcgagcataggcaagccggcatggttagcaagccgttaacgatttggcgcccaaaatccgggcgtggccgaagcagtcggcctgaagacgagtgagacgtgagatgaggaagttcgcgctgggggacgtcgtcaacagtgacaaggggcgccgcggtgtggttcgcgccgccttcaagtccagggacggccagcaattctacgccgtcgagaaggatggcgcgatagactatctggaggaagaccggctgagcccggcgccgcgcgtcgagctcgcggcttaacgccagctcatttcctgctctcattcgcgagccgatcgagacgctccgccaagggatcgtctccgctcgcgatgcgatcgttcgtgatcagcagcaggcgatcgccgcccgccgtgtcccatcgtggcagatcgggcccattgggatcgccgctccgcgcgaaattgatccagtagccacgcatgcggctcgcgacttcgcgatcacgtcgcgacaggatgcccgcacctggcacgccctccgcgccgaagatgaactgcaattcccgaccgcggtcggcatccggataaccgcgcctcgcctccggcacataggcgaagcggtagcgaaaggtcggcgcgccgccagcggcatgcaggcgggccagcaatcgcaccggctctgagaaggccatgtcggtgtagagcctcgccgagagatccgatgctgtggcgagatcgggatagagcttgcgcagttcgccgctggcaatgccagacgatgcaagcgcttccttgatacctgactcactcccagaatccgcctcgacctcgttggagccgatgatcaggggaatgcggctctgatgtccggccgcaaagccgggggcaaggtcctcggtcaccagacgcccatcgatcgtcggcccgaagctccgcggcgatttctcgagcagacgtctttcggcggcaagcaggcgctgcggctcggcggcgcgcaaatccgtgtccggtccaagcgcggctgcgaactgccggcccaccgcctccgcctcgtgcgccgtgcgcagccgcgcgcggccgggcacggattgcagaatggctttctggaagaggtcacgcgattgcgcagacagcatcagcagcgcgatcgacgtcgcgcctgcatcgctgccgaacaaagtgacgttatcgggatcgccgccgaaggccgcgatattgtcgcgcacccaatgcagcgccgcgatctggtccatcagcccgtaatttccgccgctgtcggacaatccgggatgagcgagccagccgagcgcgccgagacggtaattcacggtgaccacgatgaggcccgcctgcgccagcttggcgccgtcgaacagcggctcgttcgcggtgcccgagacgaagtcgccgccatggatgaataccatcaccggaaatgggccgtcgagcccgaagggacgaaacacgttcagcgtcagacaatcctcgcgcgactccggcagcgcagcttgaagacacgacgcaccgtgatcataggcggtgtgcatttccgagctttcgctcgtcggctgcggcgggccccagcgcagggcgccgaccggcggcgctgcgtaggccagccccttgaacgaggccacctcgccttccacggccccgagcatctgcccttcgcgtgtcagcgcgaacggaaactgcccaaccggctgagccatggccgatcgtgcgcaacacaggactgcggaagccgcaacgagtgcaagcagacaccgcatcttcgatgagatctcgatcaaggtctcggcaggttaggtccagagccgtcggcgaggcaagcctcgcgcgcctagctgcccttgccaatgagttccgcgagggcgcgccgcgcgatgatgccgagctcgccgagcgtggtgtgtcccgcctgcgccgcctcgatcaggcgctcggcgatgaaccggcggctgtcgtgatcgccgccatgcggcagctgccggcacgtctcctcaaggacgacgtccatgttcgccttggttcgctcactcaactctgtcatgacgcccggccggtacgcgtggcttgtaggcgcaagcatacacggacgaatgcggtctgattaccccgggctatcacgggccattttgcatcgcggtgcatatggtgccgcaaacagcaacgcggtcacgatcgcgccgcaaacgaccaccgaggattgcacttgctctgatgacaagctgaacctgcggcgatagcctgccggcaaaacaaaacataagggaggaatgccatgcctgacgcaatggttgccacacgtgcctccgatgagcgcggaaccgctcagcaagtcgatgtcgccgtggtcggcgccggcttttccggcctctatctcctgcatcgcctgcgcaaggccggcttctcggcggtcggcctggacgaggccgacgatgtcggcggcacctggtattggaaccgctatccgggcgcgcgctgcgatatccagacgatcgactacagctacacgttcgatccggaactcgacagggcctggacctggtcggagaaatacgcgacccagccggagatcctgcgctatctcggcttcgtcgccgaccggtatgacctcaggcgcgacattcgcttcaagaccaaggtcaccgaggccagatgggacgatgcatccgagcgctggctcatcacgaccgacaacggcgcgccggtctcctgccgccactacgtcatggccaccggctgcctttcggcgccgaagccgccggagatcgacggcgtcaaggatttcaagggcgaggtctatttcacgggacgctggcctcatgacggcgtcaacctggcgggaaaacgcgtcgccgtgatcggcacgggctcctcggccatccagtcgatcccgctgatcgccgagcaggccgcgcatctgaccgtgttccagcgcacgccgaatttcgcattaccggcgcataacggtccggcgcctgcggaccgcatgagcctgctgcaaggcgaccgtgcggcctatcgcgagcaggcgcgccaatcgatggccggcgtgccctacccgcagcagaccgtcgtgagctggcaattgagcgatgccgagcgtcgcgagcggttcgaacgcgcctgggcagcgggcgacctcgtccacatcctgacgcagctgtgggccgaccaggcggttgacctcgacggcaacaagatcgttcaggacctcattcgcgagaaaatccgcgccgcggtcagggatcccgagactgccgctgcgctcatgccggatgatcatccgttcggcgcaaagcgtccctgcctcgagacgaactactacgcgacctacaaccggccgaacgtcacgctggtcaatctgcgccaggagccgatcaaggcgatcactgcaggcggcatcaccacggccaggcgcagcgtcgacctcgacgtcatcgtcttcgcgaccggcttcgacgccatgaccggcgcgatccgcgccgtgcatccgatcaccgggcgtggcggcaagtcgctctccgacgtctgggcgcaggggccgcagacctatctcggcctcacggtcgagggttttccgaacttcttcatgatcactggcccgggcagtccatcggtgctgtcgaacatggcggtgtcgatcgagcagcatgtcgactgggtggtcgatcgcctggcgtcgctgcgcgatgccggcttcaccacgatcgagccgaccgagacagcgcaggccggctggggccggcacatggccgactgctcgatgctgacgctgcaccggctcgccaacacctggtacacgggcgccaacgtgcccggcaaggtgcagggcctgatgccttataccggcggcgtcggtccctatcgcagcatctgcgacgaggtggtcagccgcggcatgctcggcttcaagctcaccggaccgggcggggccgtgcaatgcaacgacggcgaggtcgtgcgtctccagccggatgtgaggctggtgctgaacctgctcgcctcgctgaacctgccgccgatcgagtcgatgggcgcggaaggcgcccgtgccttcgtgaacgagttcaacaagagccgccccgccgggcgaccgatcggcgacatcgtcgacggcacgctgcctgttgccgacggcgcgctgccctatcgcgtctacaagccggcaacgcccgggccgcatccggtcgtggtctatttccatggcggcggctgggtgcttggggacgagcagtcggacgagccgttctgccgcgacatggtgcggcggaccggcatgatgttcgtcagcgtcggctatcgccacgcgccggagcatcgcttcccgaccgccgccgaggacggctacgcggcgacgcgctggatcgccgagcacgccgccgagctcggcggcagtacgtgcccggtgctggtcgccggctggagtgccggcggcaatatcgccgccgtcacctgccagctcgcgcgcgaccgcggcgggcccgcgatcgccggccagcttctggtctgcccggtcaccgactgcagcttcgaccggccgtcctacaacgacaatgcgaccggctacttcctgacgcgctccctgatgtactggttctgggacctgtactgctcgccggccgaccgcatcgatccgcgcgtctcgccgctacgaggcaaggtcgccggcctgcccccggccttcgtggttacctgcgagttcgatccgctgcgggacgagggcgtcgcctatgcggaggcgatggaagctgccagcgtcccggtcgaacagctcaaggctcggggtcatttccactcatcgttcgcgatggtggacgtggtgataacaggtgcgccgggccgggcacagatggccagggccctgcggcgcttcgccggtctgccgccggagctcagccaggacgagaacagcaagagccacaccagcccgggactgaggatcgcggcggccgccagctgacggcagacgattggccgggaaccttttcccggccgccgcgtttgatcgtggcatcgagatagagcgacaggtgcgtaggccccggcacgccaatcggtgtgctggggtcgtcgtttgcgtgaggcgaggcgatgggcggcgtggtcggggattccaaggtcgatttcggcgcgccagcaacgctgcataaatggccctcgctggccaaccagcggcggccggaccgggagccttacgaggtcatcgaaggcaccctcgacgattgcatctcggctttcatggcgaagccggcggcaacccgacacctctatgaaatccgcaccgtcgcgcagccaccgctcgtcaccgaaatcctcatgccagagcacatcatcgagctgtcgcgcctgagagaatttctctgacggcctttcacaagcacgcggacaggaactttcatccggattttcccgttgtcagggatcggaagccaagtcgcgagtgcctcaggatgcttgaagctggcgtgcccattccggtcgtgccctatggcgcagaccagaccttgttcgtggtaatcgatcgcctcgaccggtcgaccgaggtccgtgtcgagcgcagcgatctcgaggccacaatcggcgagctcgtggccggctgcttcaacgatcccatcaaggtaatttcgttcaacacgctcgagcattggatgaaggacatctcgagcgatgtggccggcgagatcaaggcacgctgcgacatcgatggcgtgacgctgcccgactatctcagcgacttcgtcgagaaccacagctgatttcgttgcgccgatcgcaccagcaaaaaacgccgcttccgcggcgcttttcgtgtaggcacgtcagttgttccagaacagcgccagcagcagcacgatcggcagcggcacgccaagcatccaaagcaaagcacctcgtccaagacccatgatgtcctcctcttcaaacactgtcatgacgccggagcaaaagagaagttccgcgctttggaacgagggcggatgcgatagccgcatggaacgcaggaaatagaaccagatcgaaaaacgcaaagcgcttccgagccggatgatgctcaaggtgcggtggcaattcgacgaggtcagttcgcgcttcaggcgctgcgatgcttgccggcgatggcctcgatctcgcggcggcgctcgcccgcgaaagtcaggagcttctcgatcgtcgacgtatccgtgatccgtttggcgagccgctcggcacgcgcggcctgatcttcgagatacttgatcgtgttcaaacgccggctccccagatccccaattaacgtgggcagccatggtgctcaatagccgctaacacccggttaaccgcgccctcatcggcctcgactggtcgcgcccaattgcacgacctcgagcctgacattggtgatgcccttgtcgaccatgccgagcgcctcggccgcggaaggcgaaacgtcgaccacgcgcccgcgcacatacggcccacgatcgttgactcgcacggtcacgaagcgcccggaagaggtatcggtgacgcgcagcttggtgccgaacggcaaggtgggatgcgcggcggtcagctcgttcctgtcgaacttttcgccgctcgcggtctgggtatccgaatagaagctggccacgccatgcgaggccgcctgctttgcatcatcggctggagcgcgcgcccggctgatcggccggggatgcagcgccgccaccctgtgcgggcgctccaccgcggcgtgtcggcccgtagcggcgagatcggccttctgacggccgaccggcgcttgcgcacaggctgcgagcgaggcggcgccggcgatggcgagcagcagccggcacgaggttgcgacggagatccgggcactttcggtacgtgcaatgcaagacatggtacgccctccgaacggccgggattttcggtgggcaatgagggcagaaccttgtcggaacaaaagcggctctagggccgccgccgtttcgcgcctgctgtgacgattccaccacactggcctgtgccgaaaagggacaggccacccggaggtgaccgcccgttgcggcatcctcagtaatgcggctcgtacatctgggattggaccagggccttgacgtcattgggggccggtccgtccgcaagcccgcgctgataggcgacgtctgcgacggctgcggcgatgcggatcgagacctcgcggatgcgcggcagtgccggatagaggctgccttgcgcgaggtcgtccttgccgacgcagtcagcaagcgcatgggccgccgccatgaacatttcgtcggtgacgaggcgcgagccactggcgatgacgccgagtccaacgccggggaagatgtaggagttgttgccctggcgcggcacgaagctgcggccattgagcttcaccgggtcgtacgggctgccgcaggcgaacaatgcgcggccctcggtgtagcgataggcatcctccgccgagcattcggccttcgacgtcgggttggagagagcgaacacgatcggctgctcgttgagctcggccatggtcttgagcacctcgggcgtgaaggcgccgccgacggcagcgacgccgatgatcgccgtgggcttcagcgtcttgatcgcggtgagaaagtcggcgatcggcgcctgcccggcatgggcatagcgcagcttgtggccggacaggccatcacggccgccgaccacgaggccgcgggaatccaccagccagttgcgccggagcgcgtccgcctcggaagccccctccgccatcatggccgagaccacgaggtcggcgatgccggtcgccgcctcgcccgcaccgaggaagaggatgcgctggtctttgagcttgcccccggagatgcgcaaggccgagaacagaccggcgagcgccaccgcagcggtgccctggatatcgtcgttgaagacgcaggcttcgtcgcgatatttgtgcagcagcttgaacgccgaatggttggcgaaatcctcgaactggatcagcacgcccggaaaggtcttgcgagcggcctgaatgaattcgtcgacgaagctgtcataggcctcgcccgtcaaccgccgctcacgcaggccgagataatagggatcgctcaggagctattcgttgttggtgccgacgtcgagcacgatcggcaggcatgcttccggatgcacgccggcgcaggccgaatagagcgaaagcttgccgaccggaatccccatgccgttggcacccaggtcgccgaggcccagaatgcgctcgccgtcggtaacgacgatgagcttggcctgatagggccagttcttcagaatgtccgcgatctggccgcgatcgcgcgaggagatgaacatccctcgcgggcgctggaagatcaggccgtatttctggcaggcaagcccgaccgtcggcgtgtagatgatcggctggatctcgtcgatatggtcgaccacgacgcggaagaacaacgcctcgttgcggtcatgcagcgcgttcaatgcgacgtatttttcgaggtcggtcggcagcgtgcgcagattggtgagcacgcgctgagcctgcgtctccatcgtcagcacgcacggcggcaggaggccgcgcaggccgagcctctcgcgttccgcttctgtgaaggcagtccccttgttgagcaagggatcgcgcagcagagtcatgccttgcggcggattggacgacgtcgagcgggcaacgacccgggcaggtctattcacgaattcccccaaggagcttctcattgaaccgcagacattgtcggccagcggtccatccagatcaaggacggagagacttggggtcgcctgtgatctcgcaccgcagcgaggctgtcgaaatcgactggccattgcgcgcgagagggttaacgcagggacgccgctatccggccgcccgccgcggcgtgagatgggccgcgctgtccatcgggggcacgacgtgcatcaggatggtctgggtggcggatgcgacctcgataccgttctgctggaaacgcagcttcatgcgccggttgaattcgcgctggaccggccagcgaccggcatcggtgcagcggatctggccgacgatcgacaccatcgcgccgtcgaccttgtcgacgccccacagctcgagatcgccacgaatcaaggcccggaaatccggttcacgccgcatctcgtcgacgatgtccttgaggatctgacccgcgcggtcggtatcctccttgtaggcgacgttgacgctgaccgaggcattgccggcaccccggctggcattggtgatggtcgtgaccgcgctgaacggtacgatgtggatggcgccgtcaccggcgcgcaggcgaatggtgcggatcgagacgttctcgaccacgcctgacaagcccgacacgctgacattgtcaccgacctgcacggtgttctccagcagcaggaaaaggccggtgatgagatcctgcaccagcttttgcgaaccgaagccgatcgctatgccgacgatgccggcgcccgccaggagcggcgcgacattgacgccgatctcgctcagcgctgtgaggccgacaaccgtggcaatcaggcagagcagcgcggtacgcagcatcggctggaaggtgcgtaggcgcgcggcacgggcataatgaccgtcccgggacagcgtattgatctgacgatccaggagcgcattgctggcttcccagatcgcggccgcaacgaacacggcgaggccgatcgtcaccacggccgagatcagccggctgccgatctgccgccgtagaaccagacgatggcgtccacgccccagacttcgagcacggcgacgaagccgatgaaggcgatcacgccagacatgatcttgcgcagcagcggcagatagcggttggcccggatctcgaggcccggaaagcgctggaggatatccggcgtgatgcggaagccacggtcgatcaggctcagcgtcaccatggtgacgacacgcgtgaccagcgccaccgcaatggtgccgacgaagtattgcagcagaagcgaatagccgttgcggatgttcagtgcccatactgcccacagcgcgatgtcgagcgcgatggcaaggtaatgccagccgccggcgacgcgattgcgcaagcgggctgcaatcccctgccgctcggcaggggcgcgaatggcttcggcgacctggcgacggcattgcaggatgatgatgacgacgaacagatgcacgaccagcatcgccatgcgcagcagcgcggcgtagccggcgcggtgcaagccgagcagcagcgccacattggcgaaggcgatgccggaaacgccgacaccgacgatgcggcgggcccctatctcgatgtaggcggcggtctccgcacgcaccggaagcaggccgaacggccctgccagcgcccggaccatgcagatcaacccacgcgagaacgcataggcgttaatgactgcgaggatgacgaggcggacagttgtgggctcgccaatctcggtcccgagcagcgccgtagcgacgcctgcaaaggtgaacacggggatcagttcgagcgcgagacgtcccagcaccaggggcagccgcaccacgacctgccacatgcgcgcgagattgtgacggcgcttctgcagttcgggcgcgggggtgacagcggtcactgaggacggaggatcggcgatgggcagcacctgcaccggcaagcgcgggctctgtggtacgcgtgcttccaggaacgcgaccggacgccggatcaggcggacgatcgcccattccgcgcagaaggcggagccgaacaccagtgccagcttccatgcgatctcgagcaggaggttgtgggccgcgggatcgttcgcggttcgcatgatccagtaatagaatgccgggaaatgcgtgagcgtccgcgccacgctggcgatctcgctcgagatcgcaccgatctcctccgacaccgtgagcaggagctgtgcgccgagcccgtcggccgcgagggggatcggcgatttcggctcgggcgcggagagctgcggaccggacgcattggcgatcgcgcggagcgtgtcgatcatctgcccgcgcttcttgtcgtcctgcagggtttcgagcgcgcgcttcgcctcgtcggccgacagtgtgacggtgctgttcgccgccgcaggcggctcggcacgcgcatcggagagagatggaatcgtgaggaagagagcggcgaagagcgccgcggccagcttgtgcgccacgaggattccttggaaaaacgaatgcgccggcggcggcgggaccgttaccgccgaagcgcatgcgtcatgtcggattgcggctattcgccccggccctgtgtcggaagttggccttcgagaggacattctctaggcatttgccgcagtgcaggtcggcagtggcggcgtcagctaagcgccaccggactctgcgcgtgagaatcctcgatgcaggaaacggatgaaggaaaagacaggacgtcaaacgatacgcccgccacagccatcgggcaccatcgatgcgcctataaaatacagcgccgggaaggtaggggctttgcctcactgatgcagcccgctaaacctgatcccggcgtgccgttcgcggttgctgccgctatgcgatagtccgaacgagctccatcgcaattaacgcggctggatttgcggaggtggcgtcatagacctccccttgctcatgaggtggacgttgcgcgtcgcttgtttgcgaccatcggcatggtcctcccgcgacacaaaactgtcaagcgggatcaaaggccttgagatcacatttgaagacgcgttccgtttcgttccgcgacggaacggcctcgccaatcatccctgaaggcagcgtttccaccgaagagaccgtctctgccgtcatcgttctttcccgggaagcaagaaatgataggaccgttttgcgtcgccatcttcggtgctctcgtcaccggatcagcgttcgctcagagtccgccgcacgtccaccaggagggtcgacggcaccgacaatgtcgatgtcttcgctacggcggccgaagtcgatgttcgtggtgatgccgcggtacgagcggggacaacgataacaccctacccctgttttgcccgacgacgcaaattctcttcgcaaaaccagcaattcctcgacgcgaccgtcaagccattgattttgctatcgcggtctactgtgcatggggttgttttcgaggtttttccatgttgcccttcctttcttccttctcgagtgccttgcgcacctgctcgaactcctccagcgaggccttgtcggcgcgaggaaaacgcaagtcgagtttttcgagcgccgcgttgatcacggagccgatcacgacacgcgcaaaccatttgtggtcggccggcacgacataccatggcgcatgctgtgtcgccgtgtggcggacgatatcctgatagacggcctggtagcgcggccacagcgcgcgctccctgatgtcgtccatggagaacttccactgcttggccgggttctccagccgttcgaggaagcgctcgcgctgctcttccttggagacgttgaggaagaacttcagcaccacggtgccgttgcggcagagatagcgctcgaaggcggagatgtcctcaaatcgttccttccagatgtttttggtgacgagcttcggcggcagcttctccttggcgagaatctccgggtgcacgcgcgtcaccaggcattcctcgtaatgcgagcggttgaagatgccgatacgcccacgctcgggcagcgcgatcatatggcgccagaggaagtcatgatcgagctccttgctgctcggcgccttgaaggcatggacctcgcagccttgcggattgatcccctcgaagattgccttgatcgcagagtccttgccgccggcgtccatggcctggaaaacgatcaggagcgaccagcggtcctgcgcgtagagcttttcctgaaattcgatgagccgctgcttgttggcgtcgaggatcgccagcgccttctccttgtcgagatcgcccttctcgtcggtcttgtggtccttgaggtgaaacttgcccgacccgtcgtagcggaacggggtgatgtagcggtcaagttcctgggcgagcgatctggacggcttcttgctcatgagcgcggggcaccttgcgttgcggcttcaatcggtcgagcaagctaccaaggatgcccttgggaaggaatatgatgaaaaggacgagcagaacgccgtagacgaggttgtcccagccgaccgccttggtgccgaagccgatacgcaagctctccgccagcagaattgtgatgatggcgccgacggtcgggccgagcgagacgaacaggccgccgacgatggccgcaaacaccatctgcagcgacaccgcgatgccgctgaccgtgtccggcgtgatgaacatctggtactggcagtagatcgcgccggcgagcgccgtcatcaacgcgctgagcagcgtgatcttcagcttctcggcggtgacgtcgacgccggccgcggcggcggcgtcctcgtcctccgagatcgcctccagcgcgtagcgggccatgctgcggtcgacccagtgccagaccacgatgccgaacagccagaccccgagcgcgatcaggtaccaggtggtcttgtcgtcgaactgcagcgccagcagcttgttgcctgaggtccggttcggcgtgtagcccagcgagccgccggtgtagtcacgggtcgcggtgatgacctggagcacgataccggagagcgccagggtcaccagcacgaaatagtgcccggtgatgcggaagcggaagcagggatatccgacgatcagcgccagcacgccggccgcgaccatgctgatgggaatgccgatccagggggacaggcccagatgattccacagcaaggcggtgacataggcgccgatccccatgaagccgccatgcccgagcgagacgaggccgaaccgccccatcatcgaccaggaggtgtaggcgaacgaccagatcaggatcagcaccaggatgtgcagatgatagggatcgcgatagacgaagggcagagcgaccagcgcggccagtcctatgccccatgctgcaagccgcccctgcccgatcatcggcgcctcgccaagaggcccgcgggccggatgaacatcatgacgatgaagaaggcaaaggcgagcacatagccccattcaaggtcggagaacaggccgccgagcgagatgatctcggcgaacacgaaagcggcgatgaagccgccgatgaaattgccaaggcccccgagcacgcagatcaggaaggtgatcggtccgaacgagaggccgacgaagggatgcacgtcgtattgcagcaccagcaggcacgcggcgagtccggcgagtgcgccaccgagggcggaggtgatgagatagatccgcctggtgtcgacgcccatcagcgccatgatctggcggtcctgcgagatggcgcggatggcggtgccggtgaaggtgcgcgtcatgaacagatagaccgcaaccatgccgaccagcgcggcggcaaaggacagcagccgtgcatagctgaaattcatgtcgccgaaggcgagcaccggcagacggatgccgagattgcggaagtcgatcccgaaggccacggtggcaaagctctggagcacgaacagcacgccgccggtggcaagcagctgattgatgggcggcgcggtcagcagcggcgcgatcacgagatagtgcagcgctgcgccaagcaccgcgacaagtaggatggtcagcggggcggcgacgaaatagctgacgccgtaatactgcaccatgaaatacatgccgtacatgccgatcatcaccagctcggcgtagcagatccaggtgacgtcgatgacgccaaagatcaggttgaggccgagcgcaagcagcgccagaacgccgccgaggagaatgccgttgatcacggcctccagcaggtagatgtcgaagacctccagaaatgcctgcatgcccttcacaccccgagatacgcttccttgaccgtgtcgctcgccagcatctcggccgcactgccggacgcgcggatcgtacccgcctcgatcagataggcgcggtcgacgaccttcagcacctgttgcacgttctgctcgacgatcagcacggtcagcccgctggcgcgaatccgcttcaccagttcgaacacctgctgcaccacgaccggcgccagccctgccgagggttcgtcgagcagcagcagcttcggattggacatcatcgcgcggccgatcgcgcacatctgctgctcgccgccggacatggtgccggccatctggtgtcgccgctccttcaggcgtggaaacaggtcgaacacggcctcgaggcgctcggcataatgcccacgtgcctccttcatgaaggcgcccatcttgagattgtcgtcgaccgagagctgcggaaacagccggcggttctccggtacatgcgcgatgccgaggctgacgatcttgtgcgacggtgtcgcgatgaggtcgatgccttccatcttgatcgagccgcgcgaaggccggatcaggccggagatcacgcgcatcaaggtcgtcttgccggcgccattggggccgatgacgccgaccgcctccccggccctgacgtcgagatcgacgtcgaacagcgcctggaaggtgccataaccggcattgacgccgcggagctccagcatcggctagcctcccgcccggcggcgcgcttcggccgccgcggcctgcgtggtctcggcatcggtgccgagatagacctcgatgacgcggggatcgcccgcaacggcactcggcagtccctccgagatcttctcgccgtggtcgagcaccatcacgcggtccacgacgcgcatcaacacacccatgatgtgctcgacccagatgatggtgatgccgagctcatcgcgtatgttgcgcagcatgtcggccgcttgatccatttcggcctcgtcgagcccgccgaggctctcgtcggcgagcaacaatttcggcgcggtggcgagcgctttcgcaagctcgagcttcttcaggccggccgcgccgagcccatcgacgctggcatggcggtcagtcggcaggccgaccatcgccagcgaccgctccgccgcctcctccgccttggcccggctatggcggccctggccgtagaagccggccagcgcgacattctcgaagatggtcaagcggcggaagggccgcgggatctggaaggtgcggccgatgccgctattgatgatccggtgcggcgcaaggccagcgatctcatgcccggcgaacaggatcgaacctgatgtcggagccagcgtgccggaaagcatgttgaagatcgtgctcttgcccgagccgttggggccgatcaggccgaggatctcgccctgctcgaccttgaacgacacgttgttcacggcggtgaagccgccgaaccgcttcaccagcccgttcacctccagcaccgccgctctccgccgctactggttactataggtggtgcccttcggcagcggcagcacggcctcgcgctgcgcctggctcttgggccacaccacataggacttgtcgtcgacgtactggatcacgacggggaacgagcgctcgttctggccggccattggcgagccctcgccgtgaaatttgacgccgaagcccagcatggtgccgccttcgggtatgtcggtgtcgagtgcggccttccgcagggagtcgggatctatcccgccatatttcttgatcgctcggggcaacacgtcggtcaggaacaagtaggtgttggatgcagccatgccgacatgggccgagcggatggcgatgcccggcttgcgcttgtcgaactcctcgccaaccgccttgatgatcggcggcagcttcggatccatactcttctggttggcgagccagatcgagatcgggtcggtgttgaagacgtagtttacatcggcgcccaggccctccttcagcttctcatagaccccgtagccggcgccatgccccaccaatgcgccgaacttcagcccctgttcgcgggcctgccggagcagcagggtgatgtccggattgtagccggtgtggaagatcacatccggcttggcccgcttcagcttggtgaccagcgcagacaaatccggggcggtcgccgaatagccttccctgagcacgatgttgaagccggccttcttggcaccggcctcattgcctttggcaacgtcgacgccgtaggcgccgtcctcatggatgatggcgatccgcaggtccttcggatccttgccgaacttttccttcgtgttctgcgcgatgaagtccatcgtcatcagcccgaactgatcgccggaggcctgcgggcgaaacacgtacttgtagttcttgttctccagcacggccgacgaaatgcaggtcgtgatccacatgaacttcttcagctgctcgacgcgcgcggccaccggcacgcactgcgccgaggaaaagaagccgagcagcatgtcgaccttttcctgctcgatcaggcggatcgcttcgttgatggcgacatccggcttgctctgagcatcggcatagatcgcctcgatcttgtagccctcgacgtccttcgcgctgtactgatccagcatgatcctggcgccggtatattgcagctccgagccaccgccggcgagcgggccggtcagatcatagatgacgccgatcttgagcttcttctcttgggcctcggcggacaccgccaagcccgtcgcggcaatcgcgacaaacagcccacgtaccaaacgggcagccatgcgcaggcgcatcaaaacctccctggacgattgtgcattgcattcttggtgcaaattcttttttgcccatcacatgggctgcgcgaggcgatgtcaagcctcacgcatcagcgcgcagcaaactgctgctcgacaaaggccgtgacaaatcgcggcatggacggcctgagatcactcgtcgcgcgcacgagatggatggccgacagctccggttcggcctcgcgcgcgagattggcttcgatccgggcgcgggcctcatcgcccggcatgtccagattgatgacctgtagcatcgcaatcgtcgggccggtcaccacacagtgccaccccggctcgatccgatagtcggtcgtggtcaggccggtttcctcgccgagttcgcggatgacgctgccggggatgtcgagcacgccgtccctgacgtcgtcgagatccggcgtgccggagggaaaatagatgcgacccgcattggcggtgtggggcgccatttcgcccatgatgaacgcaccatcggacgcgcgcagcgcgcccatgccaaaaccgttgaacacggcagggccgggaaagccccagtcgcgccaagcgaggaagctcgcgaaatcggtctcgaaataggtcgcagcgaaatggtcacccgcaaacacgggatcgcggccaagcaagacgcggccgttccagatcttcggccgctcacgctgcttctcggcgaaatgcgtcgcgatctcggtgcgacgctcctccgcgaacgaccacgcgatcggccgcacggcaagatcaagcgtcgcaacgcgatgaatgacaggtgacgtcatgacgcttggtttccaggccttcgcgtcggctacttggcattccccgtcgtcttcttggcctgatcgacgaatctgttggtgaaggtcttgctgaggtcgatcttggcgttcgcgacctcgggcgagccgacgctgaacaccgcgagcacggcctccgcgcccttcgggtccatcttcccggtctcggaatacatcgggatcgtgttcttcagcgcggcaagatagagatccttgttcttgccgaccgtttcctccggcatcttcgccatgatctcctcgggcgaatgtgaatggatccacgctagcgtggcgaggatcgcattggtgagcgcctgcgcctccttctcatgaccattgatccaggccgcggtcgaatagagcgcgccgcccggatattcgccgccgaaagtctcgatcgtatccttctgggtccgggtgtccgagagaatgcgcagatccttgtggttgccctgaagcacggtgacggagggatcgagcatcaccgccgcgtcgatctggccctgctgcatggcggcgaccgcggtggcaccgaggccgacgccgatcacggcgacgttggtgggatcgagcccattcttcttgagcatgtatttcaggaagaagtcggtggaggagccgggagcactcacaccgaccttcttgccggcgaggtccttgaccgacttgatctcgttggttcgcgagggcgcgaccaccagcacgaggccgggatagcggtcatagaccacgaaggactgcagttcctgcttcttggcggcgagattgacgcaatgatcgaaatagccggagaccacgtcggcactgccgccgagcacggccttcagtgcatccgagccgcccttgaggtccacgagctcgacgttgaggccggccttctcgtactcgccaagctgcttggccagcacggttggcaaatagcacagacaggagccgccgccgatcgcgatggtcaccttgctttgcgccgcggcaagcgcggtggtgagcgtcagcgcaagcagcacgccggcgagcctggcaatcgtcttcttcattggttcctccgttcggccggccgcaccatagagcagcgggacgggcttgagaagcgccgcccgcagcggcccggcccccagccggacgcacctcggatcgcagcggcgcaatcgaacagacttggcgcctaccctcgcccgtccgccgcggtcgggcgccacaccagcagtctccgctcgaccagcgtgacgccaaagtcgatcaggatgacgaacgccgacagcacgaacatgccggcaaagacaccggcaacgtcgaagatgccctcggcctgctgaatgagatagccgagcccggcagccgatcccagatactcgccgacgaccgcaccgaccacggcgaagccgaccgaggtgtgcagcgaggagaacatccaggacaacgccgaaggccaatagacgtgctgcatcaattgccgctcgctcatgccgagcatgcggccattgtcgagcacggtgcggctgacttccttgacgccttgatagacgttgaagaagacgatgaagaacaccaacgtcacaccgagcgcgaccttggaccagatgccgagaccgagccacagcgcgaagatcggcgccagcacgacgcgcggcagagcgttgaccatcttcacgtagggatcgaacacggccgcgaccagcggctgtcgcgcgaaccagaagccgaccagcacgccgccgaccgacccgattacgaaggcgaggatcgattccgccagggtgatgccgagatgtttccagatcacgccggtcgagaaccacttcacgatctgactgaacacgtcgaacgggttggagaaaaagaacggcggcaacaggatcttgccgaagaggggaacggtcgtcagcacctgccacagcacgatgccgatgacggcgacgagaatctgcaaagcaaggagcgtcgcgcgcgacatcagaccgcctccgccgcgttggtggactgggcgtagcccttcatgacctcgtccttgagcacgctccagatctcacgatggagagcgtggaactccttgtcgagccgcacctcgaagatgtcgcgcggacgcggcaggcttacgcgccagtcgccgatgatgcgcgaggacggcccggccgacatgattacgacgcgatcggcgagcgcgatcgcctcttccagatcatgagtcacgaacagcaccgccttgcggtcggcattccacaagtcgagcagcaggttgcccatgacctggcgcgtctgcgcatccagcggcccgaacggctcatccatcagcaggatctttggatcgcggatcagcacctgcgccagcgccacgcgcttgcgctgtccgccggaaagcatgtgcggatagcggcccccaaaggcgccgaggccgaccgaggtcagccatttttgggcccgcggcagcgcctctgcgcgcggcgtgcccttgatttcaagcccgatcgcgacattgtcgagcgccgtcttccaggggaacagcgcatcggcctggaatagatatccggcatcccggttcagtccggccagcggccggtcgaatatcctgacgctgccggcagcgggcttgaggagccccgcggcaacgttgagcaatgtcgatttgccacagcctgtcggaccgacgatagccacgaactcgccctggtcgaccgtgagatgggcctgctcgaccgccgtatagacccgcccgtccccgaggcggaatgcaaccttggcatcttccagcgccactgcggtgggcgtcatgtattccctccaagttcagcccgatgccatagccgcttgcgtcgccaagttcaatcaacgggccaagcgtgctacgcatggagcttgccgccccctcaccctttccccctccagggtcggataaaagcgagtctaaaatcgatgcccgccaagctggcgatcagctaccgacacgtcgttaaatgcttcggtcgacttaaggccgtcgatgacgtgtcgctcgacatcgcggagggcgagtttatggtgatcgttggcggctcggggtcgggcaagaccacgctgctgcgcctcgccaaccggctgatcgaagccgacggcggcaacatcaccgtcgaaggtcgcaacgtgagcaacgttgatccggtcgcgttgcggcgacggatcggctacgtgttccagagcggcgggctgtttccgcatttgagtgtcgcggacaatatcggcatcacgccaaagctgctgggcatgccgacggcgaacatctctgcacgcgtcgacgagctgctggagctggtgcagctcgaccgtgctgcgcatcgcgaccggttgccggaagcgctctcggggggccaacgccagcgcgtcggcgttgcgcgggcgcttgcggcaaggcctcgcatcgtcctcatggatgagcccttcggagcgctcgatcccctcacgcgtgacgccctcggcgacgactaccggtcgctgcatcgcaagctcggccttacaagcgtgatgatcacccatgacatgaccgaggcgattttgctcgccgaccgaatcgccgtgatgcgcgctggaaagcttctcgcgcagggcacgcccaaggagctgaccaagagcggcgatgcgtacgtgacggagctgctccgcacgccgcggcgccaggtcgagcggctgaatgccttgctgccggaaagcgggtgtgcatgagtcttctcgccgatccacgctggggcgaggcgctggcgcatctgcccgattatctcggcaatcatgtgcgggtgagcctcgccgccctggcgctcggccttgtggtcagcctgcccctggcgatcctgacgcgcaaccgcccggcgccgcgtggcatgctgctcgcgttcgccagcatcgtgcagaccgtgcccgggctggcgatgcttgcgctgttctatccgctattgctcgctgcggcgtccgtcacactggcgtggttcggtgtttcgttctccgcattcggtttcctgccgacgatgctggcgctggcgctctattcgatgctgcccgtgttgcgcaacggcatcaccgggctcaacggcatcgatcccgcgctgatcgaggccgcgaagggcgtcggcatgactgcacggcagtcgctcctcatggtcgagctgccgctggcgctgccggtgatgatggccggcatccgtaccgccgcagtctgggtgatcggcaccgcaacgctgtcgaccccgattgggcaaaccagcctcggcaattacatctttgcggggcttcagacccagaactgggtgttcgtgctgttcggctgctttgcctcggcactgctggcgctcgcggtcgatcagctgctcggtctgatcgagcgaggcctgcgtcatcgcaaccgtctgcgagcagcgctcggctgcgtcggcatcgctgccctcgtcgccgcaacgctggtgccggcgatggggcgctcctcgcagggttacgtcgtcggcgccaagaccttcgccgagcaatatgtgttgtcggcgctgctcaaggaccgcctccaggtcgccggcctgtccgcgacggtgcgatcgggtctcggctccagcgtgatctttgaggcgctgaaggccggcgacatcgatctctatgtcgactattccggcacgctttgggccaaccagctgcatcgcgccgacatcagaccgcgcacggagctgctcgcggagttgaagaccgctctcgcccgcgacaagatcactctgctcggcgaactcggtttcgagaatgcctatgcattggtgatgccgaggcagcgcgccgattcactcggcatccgcaccatcgctgatctcgccgcgcacgcaccgagcatgtcgattgccggcgactatgagttcttctcccggccggaatgggccgcgctgcaaaaggcctatggcctctcgttccgcgcgcagcgccagatgcaacccgatttcatgtatgccgcaattgccagtggcgaggtcgacgtcatcgcgggctacaccagcgacggactgatcgcgaaatacgatctcaccacgctcgatgatcccaggcaggcgatcccgccttacgacgcgatcctgctgctcgcaccgaaacgcgccggtgacgagcgattgcaagcggcgctcaagccgctgctcggcaagatcggcatcgccaccatgcgggaggcaaatttacgcgccagcggcaacgacgcaaactcgtctccggatgcggtggcgaaatggctatgggagacggtgaagcagcgttagggcacgacaattccggctggcggaaccgaccaagcatcgacaaggctttgatcggccgcctgatgcaccgcaagatcgagttcgcggccgaatggtcgcccgcggaccgaaggacgcctcgttgcgtagagctggtcgcgtactgggaggagtagccagcgatccttcgatatccatgtaagccggcagatacaattgtgtgccgaaatgtcacctcagcgaacgtcgcctgaatgagctcgccgtgatagcttttcaccgagctcggtggcgagttgagtgatgattgcgcttgctcgccccttgcggccgaccaaagaagaacatcagaaacgctatggggcaggaaaaatgaaaaagccgacacggcgactgttcatgactggtgcagcggcactgttgtgccctccattcggaatggcgcacgcgcaaactgcgtggccagcccgaccgcttcgtatcgtcgtgccatatccgcctggcggtcagacggacggcatcgcgcgagctttcggtgactacctggcgcggctggtgggaaagccggtcatcgtcgaaaacagggccggcgccggcggcgtcatcggcgtggctgaagcaaaacgcgcagagccggatggcaccaccatcctctgcacgatctcttcgtcactcatccagaaccgcattacggtgaaagaccttccctatgatcctgaacgggacttcatctatctgaccatggtcagcggcgccggtggtccggtggtcgcggcgaagaagacgggagcgaccaatcttcgtgagttcatcgaatatgcaaacaaggccggcagcctgaactgggggtcctacggcgtaggttcgacgccgcacgtcctcattgagacaatcgcgaagcaatacggcattcgattccaagtcatccagtaccgcggcgaggctccgatgtggaatgacattgcgggacagacgctggatggcgccgcaggaagttatgccgcagcagcacccgtcatccaagcgggaaccggaaacctgatcggcgtggtcggcagcaggctgccgccgtatcccgacacgcctaccatgaccgagcagggtgctatcggtgacttctatgagctgcgcgcgttcacgaccttcgccgtgccggtcggcacgccaaaggagatcgtggagcagctctctccgatgttgatccaggccggatccgatccgaaggtccagcagatgctgaacaactttctactgtcctctccagccgatttcgagacgaccaatcgcatcttcaagcgcgacagcgatgtgatgctccgcatcttgcgcgatctcggggtcaagccatcggagtgatcgatcaatgggcgctcgactatgccgcaacggcacggcttccttcgatgacaccccgcgtcattcagcgaaaggagatcgccccggcgtcaagttcgggagcgagcgatccgaatgatagctgacgatgctggccttctggtctgtaggcctcggcgcgggcaccacaccgacgcacagcatgcgtctttgcatcgcgaagtggtatgacttgcaaccgagccagcgctagagccccctgatcatccccgcgtcgatcagcagccggttcagccgtcgcgcctccgcgccgtccttgcagctatagaatattcccttgcagcggagcatgatctccttctgctcggcgaaggacggatcgagcgggatgccggcagcttcctggatcaccagcggcagataggggccgtcgatcgtgtccatcacgaccgggctctttaccggctcgaagttgacggaatcgatcgcatagtaggttgcgtagagacgcggatcataattgtccagcttcttgcctagagcgccgtcgccgagcccgggctcgaggatctgcggtgcgaattccggctggtgatcgccgtaacgcacgatcaggaaaggctcgcccggaaacttgttcttcagtcccgcaacgaacgccttgtactgctcggcgctcatcgcctgccggcgcaaatattcgtcgatggacggcacgttgcctggcgggcgccagttcggcagcagatcggggcggaagcgcatctcccaggggaaatggttggcgccgagatagatgaaggtgaacagcggcttgttcggcggctgctggcccatcagctggagcgccttgtcgtagaagaagctgtccggctcgacgtccttggcgccgagatccttcgagtcgaggaagcggtggatgcccgtcgtcatctggaagctgcgggcgcccatgaaaccgccatgggcaggatagagcgacagcgtgtcgtagccgcagcggcgcagcgccagcggcaggccgcgctcgacccggttcgaggcgatccgcgtcacgaaataggcgaagcggccgaacgagcgcgaggagagcccggcaagcacgttgtattcggtgaaccagctgggcccgccattggtctcggccaggaatgagcgttgcttgccgtcccaggatttgaagtggctgccatagccttgcggcaccttgatcccctgggcggcgcggatgtcaaagctcgattcatcatggatcatgatgatgttcggccggcgacccgctgggtggcaggcatcgaccaagggcatgttgagccgctcgctgttcgcggcagcggcttccataagaccgtattggacgaagtcggagaccgcggtgacgccggaacggaagaattttgagaggtagccgtcatcgtaatagccgcgccaggcctcgtccggatgatagagtgaatagccgacgagcgcggcaagacaggcgagcttgcaggcgagcgccggcaggcggcgaatgcggaatggatcgagccaccacaacgcgtacatcagcggcagggtgaccaacccggcgaggatcaccgaccagcgcaagttcggaaagatcgtgaacaggaaggcgacggagtcgcgatcgatcatcatcaggtcgatgaagttgaccgtcatctgcacgacgtcgtgcttgagccgcgacagcagcatgagcacgacgaccatggtcagcgacagcgcgcccgataatgccggccgccgcagcacagcgatccagaagaagttgaggatgccccaggccagcgcgaaggagagcctcgagccgaaatcggtctcggtctcgtacatcagcgcaagcgccgccagatgcggcgccgcgaccgcgagcagccgccagatgccgagtgcggcaacgctcgcgagcgcggcagtcgtggcggaaggacctggattgggcgcggacgccatcaaggacacgctaaacttcaagtccggcgcggtgatgccagccgtctggccgcgttgaacagccgaggcgtccggcgcaaccggaagcctgcaccgtgtcataaaactgtaacggaatggtcaaggacaggcaacgcgccgccgcgatgcgacccagcgagcgaccaagcgccgcaggtcggcggcctcagcgtcgtcgcgctaggtctttgcgatccctacgatgaacaggtcgagcaccgcttcggccatctgctcgatctcgtgcggcgcgatgccccaacgcggcaagtgaccatccagattcatccgggcgaaaccgtagaccaaggcccggccggcgatctggatgcgcttgatgtcggccgcgcgcactaagccctgcgcagccgcgtcagccagcatctgctccgtcagcgcgatcagctcggcattgtcgcgcgtcagctccggcgagctgccatgggcgaaatagcgccctgtcgagatgatctcgaaatgtgcgggattgcacatcgcccagcacaggtaagcaaggccaaaggctcggaaacgagcgagcggaccggcggtccgaacctccgccagcgccgcttcgatctcggcacgaaaacgccgctgcgcctcctccgccaccgccgccatcagcgcatcgcgggtcggaaagtgccggaacggcgctccgggcgacacagctgcccggcgcgcggcctcacggaccgagacctcggccccctcggctgcaagttgcagcgcagcttcgatcaggacgcggcggaggtcgccgtggtgatacggccgcgttgcggtgcgaccggcggacggcctcgacggttgacggacgggcatggccccgcttttagcctcactcgaacgtgaatgtaatcaatgatcacaccgttgacggtcctgcaaccgatatgtaatcgctgattacataaaaagaggaatcgtccatgtcgcaacgtcgaagctggattgaaggctggcggctgcttaccgccctctcattgagtctgatcgcgctgagcgtatggatcgcctcgatgcggcaattcgaggtcgagggtgtccgcacggtgatcagcttcacggcgcgaagctcgctgctgctgttctgcctcgcattcagcgccgccgcggttgcgcggctctggcccaatgtctgggcgcgctggcagcgccgcaaccgccgctatctcggtttgagctttgcggtctcccatggcatccatgcggtggcgatcgtcgtcttcgccaagatggatccggcgggctttgcggaagccacatcagccgtctcctacgttttcggcggcatcggctatgccttcatcattgccatgagcgtgacttcgttggaccgcaccgccgcgctgatcggcccgcgcgcctggcgcgcgctgcaccttgtgggcagctattatctctggttccaattcatggtgtcgttcggcaagcgcgtcccgacgatgccgctctatgccgcgttcctccttccactcctgatcgcgatgacgctgcgcatgatcgcgacggcccgccacccgagcggacgaaccgcggcggcgggctgaggctctggcgtcactgctcccgcaaaccgagccgcttggcgatgatgcggtcgagcgtccgcttcggcaacacggccgcgatcagatggcgcatcgggtccggcgtgatctggtaacgtaccttggggcttgccgcggtcagcgcttcgagcacgatttcggcgatgcgctcggccggcaggcccttcgcgccgagttccatcatgacggccatgaccttgttgagcgccggcaggtagggcgagtttttgtagatggagagatcgacctgttcggccttgctccagatcggcgtcttgaccgcgccgggggcgacgatgacgacgtcgatcccgaacagcatcagttcgcggcgcaggctctccgacaggccctcgatggcgtgcttggaggtgctgtagggcgccaacagcggattgccgttcttgcccgccaccgagttgatcatcacgatccgccccttcgatcccttcagcgacggatctgcgccgagcagcggcccgaacgcctgggtcgcgaggaccgggccgataacgttgacgtccatctggcgccggaaatcgtcggccgacaattcgaggacgggacccgcgacggcgatgccggcattgttgacgagaccggccagcgtctcgccgcccagcgcctcgcggacagttcgcgcggccgcgaggacagcagcctcctcggtgacgtcgaacagcagcggcgcgaagccggcgccgagctcatccctgaggcgatcggcgtcaacctgcttgcggacacttccgaacacgcgatagccgcgcccgatcagaagtttcgcaatggcccagccgatgccggtggatgccccggtcacgacgactgatcgcatggtcccctcccctcaagctcccacaatcatgccggagaaggccgcgccagcgcaatggaccacggttgtctggccgcgcaaggacgatgaaaccggcacgggcgacgcgtggcaagaaggcgtagctgatgtcggttcttggtatctgcgagacgtgaacgtcgtgcggagggctcgatctgacgatgagagtgcagatgaagagccgactcccggccgctgaagacgctgacgttttggtattcggaagctcgcaggcaaatcgccagaagcggcgcgcgatcaagaatgtggtttaagcgtcagttcttcgtgctcagaatacacgtcaacgcgcgaagaatgtggatgaagcagcaatgcttccgcgcgtgatgaaaagagcgagaccgctacttgcgacctcgctcgaatctagtcgtgaagatttaagatttggtgtggcgaccgaagcttggcgctctcgcattccggataagcgcagtgcggcgaagcgcagagaacagccgtatggaccccggatcagcagcgcaacattgaggtgctgcgctgcgtccggggcgcgacagctcagttcttggtcttgtcgaccaacgcgcccttcttgatccagggcatcatgtcgcgcagcttcgcaccgacttcctcgatcgggtgcgcggcgagcttggcgcgggtcgccttgaatgaggtctggttgaccttgttctcgagcatccagtcgcgagcgaacttaccgccctggatgtcggccagaaccttgcgcatctccttcttggtctcttcggtgatgatgcgcgggcctgtgacgtactcaccgtactcggccgtgttggagatcgagtagttcatgttggcgatgccgccttcatagatcaagtcgacgatcaacttcacttcgtgcaggcactcgaaataggccatctccggagcgtaaccggcttcgaccagcgtctcgtagccgcccttgatcaattcgacgaggccgccgcagagcacgacctgctcgccgaacaggtcggtctcgcactcttccttgaaggtggtctcgatgatgccagcgcggccgccgccgatcgccgaagcataggacagtccgaggtcatgggcgttgcccgagacgtccttggcgatcgcgatcaggcagggcacgccgccgccgcgctgatactccgagcgcaccgtgtggccggggcccttcggcgcgatcatcagcacgtcgagatcggcgcgcggatcgagcaggttgaaatgcacgttgaggccatgcgcgaacacgagggcggcgcccttcttcatgttgtcgtgaaggtgctcgcgatagatgtcgccctgaagctcgtcgggcgtgagcatcatgacgaggtcggcccatttggcggcttcggcgacttccatcaccttgaagccggcgttctccgctttcttggccgaggccgagcccttgcgcagcgcgatagcgacttccttgacgccggaatctttcaggttgagcgcatgggcgtggccctggctgccgtagccgacgatggcgaccttcttgcccttgatcaggttcaggtcggcgtcgcgatcgtagtaaacacgcatggtcgtttcctcgttcagggccgtaatcggccgatggtcagtgtccgaagggtgaaatttgcggatttcggaggctgtctagagcattttcagccttgagggaaacccgtttctgcatggaaatccgcgacatcatgcatccatgaaaacggggtagagagaagcgagcagcaggatcgccatcaggatattgaagccgcgcaccagccgctcggaggtcagcaccggccgtagtgcagtgccgaacagcgcccaaactacggtcgacaccgtgccgacgatgaggctgatcagggtctggatggcgatgttgagagggaattgggcaatcgcggcataggcggtggtggtgccgatcacgatcacccagcctttggcgttgatccactggaacatggccgcgccccgaaggtcatcgggccgcggccctcctcctcgcccggcctggccggaccggacatggcgatcacggcggccaggtagatcagataggcggctccggcatatttcagaacggtttggaggatcggataggccaggaaaacggtgccgagcccgaggccgactgcagcaaccatgaaggcaaagccgatgacgatcccgacgatatggggaatggtacggcggaagccgtaggtcaggcccgaggacagcagcatgatgttgttcgggccgggcgtgaaatacatcacgaccatgaagatgaggaaggcatagaacagcgattgggacatgctcagctcacgcggccttcgacaggacttgcggacgctgcgccagcaccatcaccgcaataccaccgatcacggtgagcatgccggcgagcctcagagggccgaagcgctcgccgaacacgatgctggaagccgctgatcccacgaacggcaccagcagcgcgaacggcacgacttgcgcggcgggatagtcgcgcagcagacggccccagagccagtatgcaatgctggtggagatggcgccgatcgccagcaggcaaatcaggccggtgagcgacatttgggtcagcgcccggacggtcggcatcggcccgtcgacgaccagcgttagcgcgaacagcggcaccgccgcagtgaggcaaagccaggcgaacaggtcgaacatcggcgcgccacgggcgccccgcagcagaagattgccgacggcaaagcagatcggcgcgatcatcagcaccgcgaacgcgccgacgctgaaatcatagccgaccgtggcgcaaatcatcaaaagtcccgccgccgcgatgacgatgcccagcgtctgcaccggcgtcggccgctcaccgaaagcgagcgcggcaaagccgatcgtgaacagcgcctggctctggacgaccacgctggtcagccccaccggtacgccgtgggcgatgccataggcttgactcaggaactgtccgagaaacagagtggagctgatggccagcagcagcgaccaggcgaccttcggcttgggaatgaaaagacacggtatggcggcgatggcgaagcgcatcgccgtcatcagctccggcgaaaattcgtcgagcgcgatccggctcgccacgaaggcaagtccccagatgatcgccaccaggatggcgatgaggatgtcggccggcttcattgtcgttcccggttctgcactgtcgtgcagccctgttgcttttctctagccttgctcgccggcctttggtttccgcagcagataggtaccgtgcatgggcgcgtggtaatcggccgagaccagcgtaaatccgacgtcgatcagcatccgctccatcacccagccgaaggtggaatattcatcgcgcatgtgcgccacgacgctctcgcgcgaaaaatcgtggttcttgatctgaaagtcggcccattgctcgacgtcacgttcgatcgcatcaggcatcgcggtgtagacgatgtcgcgtagatagaagctcgcgcccggtttcagtgcgcgatagatccgcgatatcgccaccgccttccagaaatcaggcagatggtgcagcgtgaactcgctgacgatcaggtcataggtttccgggcgataggcgaagctgagcaggccggccgattgagtgcgtacgggagccttgcggtcgcgcgcgtagatctcggcgagcgccagcatcgcgggcgagatgtcgatggcgtcgacctcggcacccatcagtgcggcttcggtggcgagcacgccgttgccgcagccgatgtcggcgatgcgccagccgcgctgcacaccgagcattttcagcgcggcgcgcgcccgcagatcggcatcctcgtgactgtcgtagatcgaggccacggcgggctcgattcccatccgattccgctcattatagtaccaatcgcgcgccagcatggctcacatcccttcgggcccgcgaccgatcgcggcaacgccggtgcgcgacacttcgaccaggccgagcgggcgcatcaggtcgataaattgattgatcttgtccgtattgcctgtgatctcgaacacaaagctctcggtcgtagcgtcgatcacgcgggcgcggaaagcgtccgccagcctcagcgcctcgacgcggtgctcgccctgcccgcgcaccttcaccatggcaagctcgcgctcgatcgaacgcttcgtcagagtcatgtcgacgacgcggtagaccgggatcatgcgatcgagctggtgcttgatctgctcgatcaccatcggcgtgcccgtggtgacgatggtaatgcgcgacagatgcttctgggcctcggtctcggagaccgtgaggctctcgatgttgtagccgcgaccggaaaacaagccgatgacgcgcgcgagcacgcccggctcgttctgcacgagcacggagagcgtatgcgtctcgttgggatcgtgacgctcctcgatgaagtaggcggatgcgggctggttcattgtcgtcccctcaaatgtctctcgtcacaccagcgccttgccgccggcgaatgccctcgcggtggcctcgtcattcgcctgctccggcagcagcatctcgttgtgcgccttgccggagggaatcatcgggaagcagttttccagcgcggcgacgcggcagtcgaacagcaccggacgcttgaccgagatcatttcgtggatggcgccgtcgagatcggcgggtttgtgcacctgaaggccgacacagccataggcatccgcgagcttgacgaaatccggcaacgcctccgagtaggaatgcgacagtcggttgccgtgcagcagctgctgccattgccgcaccatgcccatgtactggttgttgagaatgaagatcttgatgggcagctcatactgaacggccgtcgacatctcctgcatcgtcatctgcaccgaggcatcgcccgcgatgtcgatgacgagactgtcgggatgcgccacctgcacgccgaccgcggccggcaggccgtagcccatcgtgccgagaccgcccgacgtcatccagcgatgcggctcctcgaagccgtagaactgcgccgcccacatctggtgctggccgacctcggtcgtgatgtaggtatccttgccgcgcgttgcctcgaacaggctttggatcgcgtgctgcggcaggatgacgtcgttgctcttcttgtaatagagcgagttgcgggcgcgccattgtgcgatctgctgccaccacgacttgatgtcgggcttcttcgcctccgccttgaacacctgaagaatgtcgccaagaacgttgccgcaatcgccgatgatcggcacgtcgacccgaatgttcttgttgatcgaggacggatcgatgtcgatgtggatcttcttcgagccaggggaaaacgcatcgacgcggccggtgatgcgatcgtcgaagcgcgcgcccacgcacagcatgacgtcgcaatcatgcatcgtcatgttcgcttcgtaggtgccgtgcatgccgagcatgccaagccaattcttgcccgacgccggataggcgccgaggcccatcagcgtggaggtgatcgggaagccggtgacttcgacgagctcgcgcaggagcctggtcgcctccgggccggaattgatgacgccgccgccgctgtagatcaccgggcgcttggcgctcgcgagcagcgagaccgccttgcggatctgcgacgcatcgcccttcaggcgcggcgcataggagcgatgcacgtcggacttgcgcggcggatgataggtgccggtggcgaactgcacgtccttgggaacgtcgaccagcaccgggccgggacggccggaggtcgcgacatagaaggcctcatggagcacttttgcgagatcgttgacgtcacgcaccagccagttgtgcttggtgcaggggcgcgtgatgccgacggtgtcgcattcctggaacgcgtcgttgccgatcagatgcgtcggcacctggccggagatgcagaccagcgggatcgaatccatcaatgcatccgtcaacggcgtcaccatgttggtggcaccgggaccggaggtcaccagcgcgacgcccggcttgccggtcgagcgcgcatagccctcggcggcgtggcctgcgccctgctcgtggcggaccaggatgtgctggacctcgctctgctggaaaatctcgtcatagatcggaagtacggcgccgccgggatagccgaaaatgtcggtcacgccgtgatcgatgagcgcgcggacgatcatcgcggcgccggtcatctggttcggatcgtggctcttgtcgctcattggcttgctccggatgcgctgttgtcagcggcttcgttcgtgtcgggttcggcaaataaaaaaggccccgaagagggcccatgcacaccgcctgtcttctggatggcagctagccatccccggcggtgtgcctgggtacgacggcgataaggagtttggtaataatattacgcatggcaggcggtcagcttcccaaaggttgcgcgaaacatagcggccaaagcttggatgtcaaggcaatgcggccgttcccgcacgattttggcagtgtagcggtgttcccggggttcggcgagaggtaaattggggaacccgaccagaaaagcgagtcagccggtggcaccctcagccacggtcgcggcaagccatcctcgcgcctcctccggccgcacccattcgaactcgggcagttggtgccgaaaccaggtgaattgccgcttggcataatggcgggtgtcggcgcggccgatggcagctgcttctcccaggctgagctcgccgcgcagatgcctgatcaaagacggcacgccatgcgccttcatcgccggcagcagcgggtcgaggtgccgggcggcgagccgctcgacctcgccgagcgctccggctcccagcatggcatcgaagcgtgcgtcgatgcgggcataaagctcgttccgctcaggtgcgagaaacaccgcgcgaaagctatccttgggcagcagcggcggctgtccctcccgatgccagtcgagcagcgaccgtccggtcgcctcaatcacctccagcgcgcgcgcgatccgggtgcggtcgcgcagcttcaatcgctcggccgcaagcggatcgcggacagccagttccgcgtgcagcgcctccacgccgttccgttccagtcgcgcgcgcacgtcctcgcgcacctcggcaggaatcggaggtaccaccgagagccccgccgtcagcgccctgaagtacagcccggtgccgccgatgaagatcggcaggcggccttcgattctcgcctgttcgagcgcctgcgccgcatcggcaacccaggcgccagccgagaaattcacggccgcatcgacatgcccgtagagacggtgcggagcgcgggcttcctcatcctctgtcggccgcgccgtgatgatgcgcaggtcgcgatagacctgcatggaatcggcattgatgacgataccaccggtggcatgcgcgagctcgagggccagcgccgacttgccgctggcggtcgggcctgcgataagcacggccttgccagtaggccttctgccggctcgctcctcgctcacgaaaacctcaaatgtccctcgtcgccacgctgatctgcaaccctgacaatcccgcgctggactcgaccatcgtcgacggcgcacgcgccgtactgcctcaggccgctcccgcgcactggctgttcgacggggttgcggtcgacattcccttcggcgccgacagtaacctcggaggcgaccgtcacgccatcgagcagcggctccgcgaactccgcggcgacctgcccatcgacatcgtcctgcagccagtcggcgtccggcgcaagaagctttttctcgccgacatggattccaccatgatcggccaggaatgcatcgacgagctcgccgatttcgtcggggtgaaggcgcatgtcgccgccatcaccgagcgcgcgatgcgcggcgagatcgagttcgagccggcgctgcgcgagcgcgtcgcgcttttgaagggcctgcccgccggcgcggtcgacgaggtgctggccaagcgcatcacgctgacgccgggaggccgggaactggtcgcgaccatgcgcgcgaacggcgcctatacctgtctcgtctcgggcggtttcacgctattcaccagcgcggtcgccgccaagctcggcttccaggagaaccgcgccaacgagcttgtcgtgcgcgacggcaagttcaccggcgaggtgaaggagccgatcctagggcgcgctgcaaagctcgcgacgctggtggatctgatcgagtcgttcgatctcgacgacatcgactcggtcgtcgtcggcgacggcgccaacgatctcgcaatgattcaggcggcagggctcggtgtggcctatcacgccaagcccgcagtggccgcagccgcggccgcacggatcgaccacggagatctcaccgcgctgctctatgcgcaggggtatcggcgggacgagttcgtggaagcttagcttcctgtccgtcattccggggcgatgcgaagcatcgtacccggaatcccgacactcccagtgcgcattgcgcacctggggccttgtgcttgcgcactatcccggaatgacagtgagtgtgagcgcgaacagctcttcatctcactgcacgctcagcgcaacaaagcgcagctcgccctcgccgttcgagaccagcagcagcaccgacttcttgccgtccttcttgagctgatcgacccgcttctggatgtcggcaccgctggagacggcctcctgcgccacctcgacgatgacgtcgccggcggacaggcgcttctcggcggcgtccgaattggcgtcgacattggtgacgacgacacccttgacgctgtccttgatcttgtagcgcgtccgcagatccttgctcagcgctgcgagatccaggccgagcgccttctgcgtcaccggcttctccggcgccggcccctcggtcttcacggcggcctgcaccttgtcgggctcctggaggcggccgagcgtgaccttcttggtctcttcctgacccttgcggatgatgacgacgtcaacctccttgccgaccgccgtgtcggcgacgacgcgggagaggtccttcgggtccttgacgtccttgccgtcgaacttgacgacgacgtcgccgggctcgatgccggcgggcttggccgggcccttgtcgtcgacgccggcgaccaatgcaccacgcgccggcttgatgttgaggctctctgcgatctcgtccgtgacgctctggatgcgcacgccaagccagccacggcgcagctcgccgaactggcggagctgatcgacgacgcccaccaccgtcttcgacggcacggcgaaaccgatgccaatggagccgcccgagggcgagatgatcagcgtgttgacgccgacgacgtcgccgtcgaggttgaacagcggaccgccggaattgccgcggttgatggatgcgtcggtctggatgtagctgtcgtaagggcctgaggagatgtcgcggttcttggccgatacgatgccggcggtcaccgtgcctcccaggctgaagggattgccgattgcgaccacccagtcgccgaggcgcagcttgtcggaatcgccgaacttgaccgcgaccaacggcttcgtcggcttgatcttgagcacggcgagatcggtcttcttgtcgacgccgaccagctcggccttgatcttggtgccgtcgttgaggatgacgtggatctcgtcggcgtccgcaatgacgtggttgttggtgacgacgacgcccgaagtgtcgatgatgaaaccgcttccgagcgaattggtcttgcgcggcgcgctgttctcgccgcccttgctgccgccgccgggccctcggcgattcttgaagaaatcatcgaagaactcttcgaagggtgagccgggcggcagttgcggcatggagttgctgcccccgcccttggcctcgacgttctgcgaggtcgagatgttgacgaccgcatcgatcaccttctcggcgacgtcggcaatgccatccggtccgcgcgcatcggccggcgtgccgaacatgctgaaagcaccgacggcgagcgcggccagcccaattcgcacaccaagtcgcacgccacggcgcgagcgggacggggcagtggtggcagcggtcattgtgatctccaggcaaagggattcggcgccagactgcgctcgaacgggggcagggtgcaagcgcggccgttaacgggcctcaagacctggataatacggcgaaaaccagtctggcgccttcactttggcgttggcctgatgcctaaatcgggcgccgtataacccagatcagcaccagcccggccacggccgagccgatcccgacggccctcagtatgttgtccggcgtcgtgatgacgctcttcatcgctttgcgcatccagttgggactggccgcgaacatcaagccttccagcacgaaaaggatgcctaggccgatgaggaagtcggcgaacgcaatggacctcatcggaatggaacctcccgtagtgctgttcttgtctggacgaagggcggccagaccggccgcccttgtctatcttacggcttcgcgagcgtctcgggtgccatcctgccggacggattactgaagtaccggaagaaatccgattccggccgcagcaggaagcgggtgtcgttggaccgcagcccgttctcataggccgtcatagaccgatagaaggcgaagaaatcggcgtccttgctgtaggcttcggcgaacagcctgttgcgctcggcatcgcccgcgccccgggtctgctcggcctgcgagttggcctccgcgatgattaccgtcgcctcgcggtcggccttggacctgatctcctgggccttctggccgccctgcgcgcggaactcagccgcctctcgctcacgttcggtcttcatgcgctgatagaccgcctggctgttctgctccggcaggtcggcgcggcggatccggacgtccacaacctcgatgccgtagccctccgcctcgcggtcaagctggtcgcggatacgctgcatcagcttctcgcggtcgtcacgcaccacgttgatgaaggtgacctcgccgagcacacggcgcagcgccgcgttcaggagcgtggtgagctggacgttggcagcctggatcgagccgatgctctgatagaagcgcaacgcattctcgatccgatagcgcgcgaaggcgtcgaccacgagccgcttctggtcggacgcgatcgcttcctgcgacgggttctccaggtcgaggattcgcttgtcgatgttgatcaccgaattccaaggcgccttgaaatgcaggcccggcgcggtgacgacgtcgacgggccggccgaactggagcacgatggtctgctcggtctgctgcaccgtgaacagcgacatgtagccgacgatcacgacgagcaggagcccgagcaacgtgacgatacctgtgaccggagacctcatcggctgcctccgctcgactgcggaccggtggtaggcggccgcttggtcgtcaattcgccgaggggcagatagggcacgatgccctggcccgaggcgccgccgccgtcaaaaatgagctgtccgcgccaccgagcacgcgctccatggtctccagatagatccgttcacgcgtcacgtcgggcgccttcttgtattcctcgtaaacgttgaggaagcgcgcgctctggcccttggcctcggcgaccgcctgctccttgtaaccttcggcagcctgcaggatctgcgcggcacggccgcgcgcctgcgggataacctgattggcgtaggtctgcgcctcgttctgcaactgctcctggttggcgcgcgccgcctggacgtcgcggaaagcgtcgatcacctgcgccggcggatccaccttctgcatctgcacctgactgatctggatacccgcaccgtagctgtccagagtcttctggatcagttcgtgcacgttctgctcggtgacgtttcgcgcgccggtcaggatcggctggatctgcgagcggccaatcacctcgcgcatcgcgctctcggcgactgccttcacggtgccttcggggttctggatgttgaagaggaagtcgccgaccccgtccggcttgatgcgccagagcacggtgaagtcgacgtcgacgatgttctcgtcgccggtcagcatcagactctcttccggcacgtcacgaacggagcggccgcgccgcgccggatcttcgatcagcgtcatgccgatggagatggtgttgacgcgcagcgccttgggcagcagcacggtctcgatcggataaggcagatgatagttcaggcccggctgcacggtgcggacatgcttgccgaagcgcaacacgacgccgagttcttcggactggacgcggaagaagcccgagagcagccagaatgcggcgatcagcaggatgatcagcgtgatgccgatgccggagaaatagccgcccggcatgatctgctggaggcggtcctggccgcgccgcagaaggtcttccagatccggaggcctcggcccgaccggttgcgggcctgagccccacggtccctttggacccgagccccatgggccaccgccctgattcttccacggcattcgatgctctcctcggcagggtggaatgccccccgcccgctttatccggtccggctttataggggacaggcaagtcccttacaacgcaacccgggccgtcttccgagctatgctcgggcacgaaaaagtcaatgtaaacattggcgagtgcggttaatggcccgaccgccgacgatatgtcacataggagaaatcgacgctgtcgtcggggccggcaggatgacggatgcgcacgatctcgttccattttgccttgtcgatatcaaaatgcgtgtcgccgtcgggccgtgcatgcacttcggtgatctcaaggcgatcagcgcgatcgagccattgccggtagatttccgcgccgccgatcacagcgacctcagtgaccgaacgccgcagggcatcgcctcgcgcaaccgcgtccgcagccgcgaccgacgtcgtgacaatggcgcctgcggcgcgataggcggcatcgcgcgtgatcacgatgttggtacggcccggcagcggccggcgcagggattcgaaggtcttgcggcccatgatacccggcttgccgatcgtgagcgccttgaagtgggccatatcggatttcaaccgccatggaatggcgttgccggcgccgatgacgccgttctccgcgatcgcaacgacgaagacgatttccatcaggacgtgctcccggcaagccgcgtcagtgcgggcccggtgacgcggcacagcgtccaatcatccatcatgaccgcgccgagcgacttgtagaaggcgatcgacggtgcgttccagtcgagcacggcccattgcagacgcgaccagccgttctcgacgcattccctggccagatagaccagcagcgccttcccgaggcccctgccccgatgcgacggccgcacgtagagatcttcgagatagatgccgtggcggccgctgaaggtggagaaattcgcgaaccacaccgcgaagccgaccggctcaccgttccactccgcgatggcgcaatagagttgcggcctttcgccgaacagcgcatcggcgatgtcggcttcggtcgcctccacttcgtgggaaagcttttcgtactcggccagttcccggataaaagcgagaacaagtccggcttcgccttggcgcactcggcggatgttgagcgacatagggcgctagaccgcgacttccgccttgatgtgcgggtgcggatcgtagccgacgagttcgaaatcctcgaagcggaaggagaagatgtccttgacctcagggttgatgcgcatcaccggcaacgctcgcggcgcgcgggtgagctggagcttcgcctgctccaggtggttggaatagagatgcgcgtcgccgaacgaatgcacgaaatcgccgggcttcagaccggtgacctgcgccaccatcatggtgagcagcgagtacgaggcgatgttgaagggcacgccgaggaagacgtcggcggagcgctgatagagctgacaggacagcttgccgttggcgacgtagaactggaacaggcaatggcacggcggcagcgccatcttgtcgacctcggccggattccacgccgagacgatcaggcggcgcgagtccggattgcgcttgatcatgtccacgacgttggcgatctggtcgatgctgcggccgtccggggccggccatgagcgccactgatggccatagaccgggccgagatcgccattggcatccgcccactcgtcccagatggtgacgccgttgtcgcgcaggtatttgatgttggtgtcgcccttcaggaaccagagcagctcatgcacgatcgccttcaacggcagccgcttggtcgtcagcatcgggaagccggtcgacagattgaagcgcatttgatggccgaataccgagagcgtgccggtgccggtccgatcggtcttctcgacgccgtcggaaagaatccgctcgagcaggtcctgatattggtgcatgggcgaataagcctttggggaggcagcgatcttagcgacagcctccgcgctgcgacagcggcgattcgctgtcccggccgattatacccggaaaaagtgagtgttcccgccgcaaacgacaaggggcggaactcagcgtcccgcccctggcctatcggcctgatcgcctttgcttaatttgtcggcttgagcaccgggctccacttcgcgatctcgttcttgacgagggccgccagcgcctccggcgtacggtccttcggcccgggaatgacgctgccgagttcgagaagccgcttcttcacggtctcgtcgtcgagcgccttgacggcggcggcgttcaggctcgccacgatcgcaggcgaggtccccttgggcgcgaacatcgcgttccaagcctgagcctgaaatgccggcaagccggcctccgccgtggtcggcacgttcggcagcgacggattgcgctccgccgtcgcgatcgcataggccttgatggtgcccgcgttgatctgcgggacggcgttgacgatctggtcgcacatgtagtcgacctgtccggccaccagcgcgttcatcgctgggcccgtgccgttgaagggcacgccgacgggcttgatgtcgaggatggagtgcagaagctcgcacgagacgtgcgaaaccgagcccacgccggcatgggcggcattcaccttctcggcattcgccttcacgtaggtgacgaactccttgaggtccttcggcggaaaatccttgcgggccaggatcaggatcggcgtgcccgccagcagcgcgatcggctcgaagtctttctcgggatgataggcgagcttcggatagagcggcaccgatgcggcatgggtgcccatgtgaccggtgatcagcgtatagccgtcattggccgcgcgcgcggcgcgcgtcgtggcggtggtgccaccggcaccgaccacgttctcgatgatgatgctctgcccaagcggctgcgccatgtgcccgctaacgatgcgcgagatcacgtcggtaggcccgccggccgcgaacggcacgatcatggtgatgctgcgcgtcggaaaggtctgtgcctcagcggttgcggtgaatgtagcaagcgacgcaagcgctgcggcacatgcgcccgttagcgcgcgaacgaaggtcatggcgttcccccttggacagaaacaaaatgtcggcccaaaggccggcattttcatttcatgaagccgtcgcacaagtcgattcgacttccgaatgcggcgcgccgacgcaggtcgcgagcccatcctgagcgcggcgacctagttttcggactcggtgaatacctcgtcacgcttggcgcgcaatgccggtagcaccgtaaggacaagcaggctcgccgcgactgcaagcagcaccgccgacaacggacgggtcaggaacacgctccagtcgccgcgcgagatcagcagcgcccggcgcaggttctcttccatcagcgggccgagcaccatgccgagcagcagcggcgccggctcgaaatcgtgcttgatcagccagtagccgacgagaccgaatacgcctgccaggatgacgtcgaccggcgcgttgttcaccgaatagataccgatcgcgcaaaagatcacgatcgaggggaacatcagccggtacggcacgcgcaagagccgcacccagattccgaccagcggcaggttgatgatgatcagcatcagattgccgatccacatcgacgcgatcatgccccagacgagatccggctgcttctgcatcacctgcggtcccggcacgatgccgtgaatggtcatcgcacccaccatcagcgccatcaccgcgttcggcgggatgccaagcgtcagcagcgggatgaacgaggtctgcgccgcggcattgttggcgctctccggccccgccacaccctcgatcgcaccacgaccgaatcgcgacgggatcttggcgagcttcttctcgagcgtataagcgccgaacgatgcgatcgtcgcaccgccgcctggcaggatgccgaggatcgagccgagcacggtgccgcgcaggatggcgggcgtcgaatcgaccagatcttgcttcgtcggcatcaggccggtgatcttctgctgcacgagatcacggttcagctcggcgccagcgtcaagattgcgaatgatctccgcgaaaccgaatacgcccatcgcgacggtcgcgaagccgagtccgtcagcgagctccggaatgttgaacgccatgcgcgaggcgccggtctcgatgtccgaacccaccatcgagagcaacaggccgaggacgatcatcgcgatcgccttcagcaccgaccccttggccagcactacggcaaagatcaggcccagcaccatcagcgagaaatattcggccgggccgaacgccaatgcgagcttggtgagcggcgcgccaagcacagcgatcaagacggtcgcgacgcagccggcgaagaacgagccgatcgcggcgatcgccagcgccggaccggcgcggccctgctttgccatctggtgaccgtcgatggcggtgacgaccgatgtcgcctcgccaggtatgttgacgaggatcgacgtggtcgagccgccatactgggcgccataatagatgccagcaagcatgatcagcgcgccgaccggcggcagtccgaaggtaatcggcagcagcatcgcgaccgtcgcgatggtgccgatgcccggcaaaacgccgaccagcgtcccgaccagggcgccgatcaggcacatcagaaggttgatcggagagaacgcgacggcgaagccgtgagcgaggttggcaaagatatccatcacgccctcactggatcaggaaacgcgggtacatcggcatcggcagcccgagcacgtacggaaacaggatcgcgcaaccgaccgtcaggcaggcgccgacgatcaccgcttccagccaccgcgtctcttgcgagcccgtcgctgcgatcatgaagctggtgaaagccgtgaccacgaggccgagcgaccggatcgacagggcgaagaagaggatcgcggcgaccacgaacagcggcccccgccaggaataatgggccatcgccggcccatcggtcaaaaggccggtcaaggcgatgccggcggacaaggcgaccagcagtccgccgaacatgcgcggcgcggtccctgcgccgaaggagaagccccgcatgccctgcaaatcgctcgacgcgtacagagcgaacagggcaacggccatcaagacgacaccgccaacatagtcctgcgccgaccggatcgtcatgagaagcgtgaggatcgccaccgcaaacagtggataggaatagatcagcgccagcagcacctcggatgacatcttcttggtgccgccgccaaacgatccgaataaggcgctgggcgcgccgacgatcagtgctgtcgcgtggctggtgacaacggtcgcggggccccgccccgcgccccagccgaagatcgtcccgatcgaccagatcaattcgaaaatctgcggcgcaatcgccagcagacaaaagccgagcgccaccttggtgttccggatggcagtcgctgagtggcccatcgtgtcggccatgcatgtctcctccgcgacccgtaagtcacgagcactgttgttctaaatcggctggaactggatcccccgccggaacactgcctagcggattttcatcacacaatgccagcaaaacccaacagaccgccggcaagcaggagccagagtggattgatgcgcgagatggatgcgatcaccgcaaccatggtggtcagaagcagtgcagcaatcgtgcgctcggccgactgggccaggatcagcgcgctggccgccatcaatccgatcgacagcggaaccagtgcagcctgaatcacaccgggccatcgcgattcgcggggacggttcaggagccggctgacatagtaggcaagcagcgccgtcggcaggcacatcgccaacgtcgcggccagcgccccggggatgccagcgacggcatagccgattaacgtgacgataagcacgttcggaccgggcgagagctgcgcgatggcataggcgtcggtgaactgcctgtcggtcatccagtgattcacctcgactgcgatgcggtgcatctcgggcaccgccgccgcagccccgccgacggcgaacagcgacatcagaccgaaggtggagatcagcgaccagatcggactttggccgttcatgctgctactttccgccgcaggaaataagtgacgccgacactgacgggaatcgcgaccagcagcaccgcctgcagaggcagacggagcacgccgacggccaggaacacgccgagcatcaggatcaccgggaggggatccgtccgcttgagcagcggcgtcatcatgcgcaagaccaccgcgatcaagaggccgatcgcagcgcatgagatgccggcaaggattcggcgcagcacctcgagatcgccgaaatgggcataggcgatcgcaagcaccatcatgatcagcgttggcggcagcaacagcccggcgaaggcggcaacgccgccggcgatgccgcgcaggcgcgatccgaacaccatcgacagattgacgatgttggggccgggcaggaagtggcagagcgcaaaggtttcgttgaactcgtccgccgtcatccagcggtgctgctcgacgatcgcgcgtcgggcaaacaccaagacgccaccgaagcccgccaacgacatcccggcaaacgccaggaataatgcggccagacctggcggcgcggcggcgagatccggctgttgcggggccggtgctgaatccgaggacatgtcagaagcgtagaacgagggccgcgccatggccaagacggtccggaacctatccaaagggaaccgcatccaccccgctcgaaacccctgtttttcgaaagctttgcgtcctatattagggatgccggttcgccggctatggaaataaacggtcgtcgcaataaaccattcggacccgggggcggtacccggcgcctccaccaaagcccgctcggtgcttgcctcagcagcgggctttggcgggggcgaaataggatcgacgagggcgtaaagggcgtactttttcccggtattgttccgccgttatcgggctactgcaatagttgccaacgacaactttgctccggttgctcaggctgcgtaacgcagtttgaaagaccatcttaaagtcctaacgggttaagctccgttaggcggggttcggaggcacctggcaacagaagcctccactttactctttgatttcttcccggcggggactcctgctcatccgtcaggcgcggtactattgcggcttgacgagtcgggaccggcagggtccggcctcggggatgcaacaggaccaccatggcgaccgatcatatccgatacgatgtgctggcccgcgacgcccttcgcggcgtgctgcggaaggtgctgaccgatgccgcggcccatggcctgccgggagagcaccatttcttcatcaccttcgtgtcgaaagccgagggcgtgaagctgtcgccgcggctgctcgcgcaatatccagacgaaatgacgatcatcctccagcaccagttctgggacctgaccgtgctcgaagaccgcttcgaggtgggcctgtcctttggcggcattccggagcggctggtagtgcttttcagtgccatcaagagcttcctcgacccgtccgtgaagttcggccttcagttcgacacttccgatgtcgccgaggtcgcgccggacaatctgccggcggctcccgcaccatcggcggtcgcggtgccggcacctgccacggaaaaggcagaagctgccgacgaaccgaccccgccgaaccagggtggcgccgaagtcgtgcggctcgatcgtttccgcaagaaatgatctagattgggcttgagcccgtcgcgcgcggccgaactgcctatatagaggtgcacatgaagtccgtgcggcgtttcgcgcggcagaatggatgtgctcatggtcaaagcttcccgctcgagaaccgcccgctccgcgacccgcatcgagaccgacagctttggtcccgtcgaggtcccggtcgaccgctactggggggcgcagaccgaacgctcgcgccagaatttccgcatcggaaccgaccgcatgccgatctcgctgattcatgcgctcggcatcgtcaagcttgcggctgcgcagtccaatctcgagcttggcctgctcgaccggcgccgcgccaacgccatcatccgcgctgcgcgcgaagtgatcgagggcaggctggacgatcattttccgctggtggtgtggcagaccggctccggcacgcagagcaacatgaacctcaatgaggtgatcgccaaccgggccaacgagctcctgggcggcgaactcggggccaagaagccggtgcatcccaacgaccacgtcaacatgagccagtcgtccaacgactcgtttcccaccgcgatgcacatcgcggccgcaagccgcatcaatgccgatctcgttcctgccctcggcgaattgctccgcgccctgcgcaagaaggagaagcagttctcgaagatcgtcaagatcggccgcacccacacccaggatgcgacgccgctgacgctgggccaggaattttccggctatgccgcacaggtcgaaagcggcatcgcccggctgaaggtcgcggtgagggacctctatccgctggcgcagggcggcaccgctgtcggcaccggcctcaactcgaagccgcgcttcgcaagactgttcgcaaagcacgcggccgcaatcacgaagctgcccttcaccagcgccaccaacaaattcgaggcgctggcctcgaacgatgcttatgtgctggcacacggcgccatcaattcggtcgcgacgggcctgttcaagatcgccaacgacatccgcctgctcggctccggcccgcgttcgggtctcggcgagctgatcctgccggagaacgagccgggctcatcgatcatgccgggcaaggtcaatccgacccaatgcgaagcgatgaccatggtctgctgccaagtgttcggcaatcacaccgccatcaccgtcgccggcagccagggccatttcgagctcaacgtctacaagcccgtgctggcctacaactgctgcactcgatccgcctgctggcggatgccgcacgttccttcaccgaacattgcgtcagcggcatccgcgccgacgaaaagcgcatcaaggagctgatggagcgatcgctgatgctggtgacggcgctggccccgaagatcggctatgacaacgcggccaaggtggccaagaccgcgcacgccaacggcagcacgctgaaggaggaggcgcttcggctcggcttcgtctcggccgacgagttcgaccgtctggtacgccccgagaagatgaccagcccgggctaaattccagattccgatatccgtccgtaatgatacggacgctcggcgccgagaaatatgcggctttgagggcgggatttgattaccgtcaatgttgcggcggggcgccgtgctacgcagcccctctgccctccatgggcgaattcatcgtttaatggcccaagaggccgattgacgaggacgagcgaatgacgatcaagtcttgtggggcgcaacggagcgccctgtttctgaatgtttcatccggcaaaatgaggatcgggtgatggagacgcggcatggggaacgtcatcaacctgaatcgtttcaggaagcgcgccgagcgggaagcctcggcgaagcaggcggacgccaaccgggcgaagttcggtcgcacgaaggcgaagcggtccgcggaggagaaacgggcggaccaggccaaggagcatctggaccagcaccggatcgatcgcgaggagcagccatgaagtcgccggtcgtaaaacggtcgatcgtcgtcgccggccacaagaccagcgtcagcctggaagaggcgttctggaacggcatgaaggaaatctccggccttcgcaacatgacgttgtccgaactggtcggcgagatcgatagcaaccgccagcagggcaatctgtcgtcggcgatccgcctcttcgtcctggactacttcaagagccgcgccatggccgcccagccggacaaggtcccggcccaatagccgacgggggcgccgccgacggcgccccggccccagcactttaaaatcactctaaggtgcaggttcggcgagcatgtgcgcttgacctcaatgccctgcgttgaaaatacagggcatgaccgacaccgctgacacgcgttcgcacatgccgctgggtctggcccagcgcggctacaccggcgtcatccagcacctttccgccaaggaggcgggctcggcgctctcggacgtcgagctcgaaagccgcctgatcgagctcggcttcgtcgaaggcgcccgcgtcgaggtcctgcatgaggggctggtcgggcgcgatccaatcgccgtgcgggtcgacaacatcacgatcgcggtccgccgtcgcgaagccatggccatcatcgtcgcctagattgcgacgggacgccgtatcccgggcccttgatcacatggaattacccttgctgcatcttgccctggtgggcacgccgaacagcggcaagacctcgctgttcaacgccctgacaggcagccggcagaaggtcgcgaactatcccggcgtcaccgtcgagcgcaaggaaggcttcttcgtcaccccgctcggccgccaggtctcgttggtcgacctgcccggcacctattcgctgcgcggccgcagccccgacgaggagatcacccgcgacttcgtgctcggcaaggcctccggcgagaccatgccggatctcgtgctgtgcgtcgccgacagcaccaatctgcggctgacgatccgcctgctgctcgagctcaagcgcacgggacggccgatgatcctcgtgctcaacatgttcgacatcgcgagccgccgcggcatcaccgtcgacgtcgagcggctcgccaaggagctcggcgtgcccgtggtcacctcgatcgcggtgcgcaagggcggcacggccgacctgctcaagctgaccgacgagaccgcggccaagctcgccgctgagcctcgggagagcagctggcgcgcgctcagcgtctccgaattgcgcgcgacgcagcgcgaggccgaccgcatcatcgccgactgcgtcagcctaccggccagccccgacacctggaccgcgcggattgacgcgatcgtgctacatccggtcggcggcctgatcgtgctcgcactgatcctgttcgtgatgttccaggcggtgttcgcctgggcccagccgctgatggagctgctcaactccgggttcgaagcgctgggcgagctcgtccaggccaccctgcccgccggcctgctgcagagcttccttcagaacggcgtgatctcgggcgtcggcagcgtgatcgtgttcctgccgcagatcatcatcatcttcctgttcatcctgctgctggaagatttcggctacatggcgcgcgccgcgttcctgatggaccgcatcatgggcggcgcagggctgcacggccgcgccttcattccgctgctgtcgagctttgcttgcgccattcccggcatcatggcaacgcgcgtgatcgacaacaagcgcgaccgcctgaccacgatcctgatcgcgccgctgatgacctgctcggcgcgaattcccgtctacacgctgatcatctccgccttcattccggccagggacgtctggggcttcatcaacctgcaaggcctcgtgatgttcggcctctatgcggccggcatcatcagcgccctcgtcgtctccttcctgatcaagttcttcatgctgctcgactacgcgccggcacccttcatgctggagctgccggactacaagatgccgcggctgaaatcgatcgcgatcggcatctacacccgggccaagatgttcctggtgcgcgccggcaccacgatcttctcgatgatggtgctgatctggttcctggcctcgttcccgcagcccccggccggcagtaccgagcccgccatcgacttcagcttagctgcgatgatcggcaaggctctcgagccgctgctcgcacccgtcggcttcaactggcagatcgcggtcgcactgatccccggcatggcggcccgcgaggtcgctgtcgcagccctcggcaccgtctatgcgatcgagggcggcaaggaggcggccgaccagatcggccacgtgctggcgacgaaatggtcgctcgcgacggcgctgtcgatgctggcctggtacatcttcgccccgcaatgcgcttccacgctggccgtgatccggcgcgagaccggaagctggacctggatgggcgtgaccttcacctacatgctggtgctggcctatgcggcgagcctcgtcacctacaacgtcgcggtcgcgcttggcgcgggttagccccgtccaaagccaaactgcgaaaacaaccccatgcacagtnnnnnnnnnngccgcgaaatcaatgacttgcgtgcgggcaagcatgcgtgcggccacgagttgacctgtcgggcaaaacaggggcaggatgtcacgatcagcccgcatcgattgcagcatgaacgacgacacgccacggaaacggcgatccgtcgccatcaaccatttcgccaccagccgactgacggctgagcagctgcgcgaagatcacctagccgacctcgtcgcgttgcaccgcgatgccgaggtctcccgctatctcggcggcgtgcggacgcccgaggtcacgaaggcctatctcgcggccaacatggcccactggaaccagcacggcttcggactctggacgctccggacgaaagacggggcgttcgccggacgggccggtatcaggcacatcgtcatggagaacgtcgacgaggtcgagatcttctacgcgttcaagggcgaattctggggccggggattcgcaagcgagatcgcgaccgcgctgacgggcatagggctgtcacaactcgcgttgccgtccctcatcggaatcgtgaatgtcggcaacggcgcatcccgccgtgtgctggagaaatcgaactatctgctcgagcggatcacgagccatcacggcgaggaggtcgcgatttatcgcatcccgcagtgaatgccgcgcaggacggaccgcaggcgatcgcctgtgttcattttttaacagtcatatccagctgttgagcagcaacgacacggcgccctctcgcgctccaagggcgcttcgggtcgggaactcaagcccggcttgggagttccttagaccgcaccttctcagccaaatccggctcgaggcgtgcgcccggagcgcatggcgagctttcggaagatttccgcgtaaggggggttcatgaccggtcaatcagcggctgctccaggcagcgacctcaaggatttgccgagggtttcgaccggcagcgaagggctggacgacatcctcgggggcggtctcgatgccaaccggatgtatctctacgaggggcggccgggcacgggcaagaccacgattgccctccagtttcttctacgtggggtgcgcgacggcgaacgcgttctctacatctctctctccgagaccaagagcgagctcactgttgtggccgagcgccacggatggtcactggacggtgtcgacatcttcgagctcgttccgccggaaacaacgcttgatcccgagcgggagctcacggtttttcatcccgccgaaatggagctgagtgaaaccaccggtttgatcttcaaggaagtcgaacggatcaatccctcccgcgtggtgctcgacagcctgtccgaacttcgcctgctggcgcagaacccgctgcgatacaggcgccaggttctggccctcaagcacttcttcaccaatcgtaactgtaccatcgtgctgctcgacgatctctcgtcgtctcaggacgacttgcagctgcattcgatcgcgcacggcgtcgtgatgctcgaacagcttgccatagactacggtgccgagcggcgacggcttcgcgtgatcaagatgcgcggcatccggtttcgcggcggctaccacgactttaccatcatgcaagggggcctgcggatcttcccccggctcgtggcggccgagcatcacaggtcgttcgaaggtgacacggtatccagcggcaacgccgagctcgatcgtctcctgggcggcgggctcgagcgcggcaccaacgcgcttctcctcggctctgccggcgtcggcaagtcgtcggttgcgctgacctacgccatcgcggcagcggcacgtggcgagcacgcggtattcttcgccttcgatgaagggcgcggaacgattgaggcacgggcccggacgctcggcctgcctctggacaagcatctcgcctccgggaagatccggtttcagcaaatcgatcccgccgaattgtcgcccggtgagtttgcggcaggcctccgccgcagcgtcgaggtcgacaatgcacgcgtgatcatcatcgacagcctgaacggctatctgaacgcgatgccggatgaacgctttctcattctgcagatgcatgaactgctcagctatctggcccagcagggcgtgttcacaatcctcatccttgcccagcatgggcttgtcggtcccatggatacgccagtcgatctcagttatctgagcgatgcagtcgtcatgctacgctatttcgagttcgcgggaacggttcggcgcgccttgtcggtcgtcaagaagcgcagcggcagccatgagcatggcatccgcgaattccggctcggcagcagcgggatcaaagttggcccgccgcttcacgagttcagcggcatcttttccggcaatccgcgctataccggcacggtactcccggaagggccgggcgaatgaccgccgatcgcgatcaccgcgttctcgtattcgccccgatcggccgcgacggaccagcctcggccgaactcttgcgcagcgcgaatctcaacgcgatcaattgccgggacttgcccgagctcgtcagcgaaatggcggcaggcgtcggcaccgtgtttctggccgaggaaggattgttcggcaaagacaccgaaccgctggcgcaatggatcgccagccagccgccgtggtccgatctacccttcgtcgttctcaccagccaccgcgagcagccggcggtcgtcgcctggcggcgcagcatcgtcgaacttcttcgcaacgtttcattgctcgaacgtcctgttcagccgatcacgctgaccagcgcaattcaatcagcgacacgggcacgccggcgccaatatgaaattcgtgctcttctcgaagcgcgcgagcagaccgcacaagagctcgagaaactggttatcgagcggacgcgggcactggaggaagccaacgagcagctgcggctggaaatcaaggagcgcgctcgggtcgaggaaacccttcgccaggcccagaaaatcgaagccatcggccagctcaccggtggcgtggcgcatgacttcaacaacctcctgatggtgatctccggcggcctcgacatgatcgaccgccagacggatccgaaccggcgtcgccgcctgatggacgggatgatccaggccgcgcagcgcggtgccagcctgaccaagcagcttctggctttttcccggcggcagaagcttcggccgcagcccgtcgacgtcgccgcgcagatcggcggcatgcgcgagctgctcgaccgcagtctgaggggcgacgttcatgtcgagttcgactttccggagcagctttggcctgtggaggtcgaccccggcgagctcgagctggtcgttctcaacctggccgtcaatgcccgcgacgcgatgcccaatggcggcacgatcgtcgtgcgtggggagaatctgcctgatctgaacgaggatcagatctccggcgactacgtccggctatcggtgatcgacaccggcgtcggcatgcctccggagattctgtcgcgcgtgttcgaaccgttcttcacgaccaaggacgtgggaaaggggtcggggctcgggctcgcgcaggtccatggatttgcgaggcaatccaggggtacggtccgcattcggtcggaggttggccggggcacgagcatcgagctgtacctgccgcgatcgttcgatgctccttccagcgagcggcatctcatcgatctcaccagggtgcggccgaaaaagagcaatcaggggcaagtcctgctggtggaggacgatgatgaagttgccgcactcgtcagcgagatgctcggccagctcggttacgaggtcacgcgcgcctccagcgccgcggcagcgctcggtgccctggctgacgggcgtcgcatcgatctgatcttctccgacatcatgatgccgggtggcatgaacggggtcgagcttgcgcgcgagatcaagaacagacgaagtgacatcccgatattgctgaccagcggatacgccgaagcctcggtcagcgacgcggagagcgcgggtatcgagatattgcccaagccctatcacatcgacgagctcgctgcagccttggccgccgcgaagtcaaaccttcggcgcgatgcggaatccaaacgctcgagttcccgttgagagcagcccaggattcgccgcgctccatccaggctacgcgtgatctctacctgaagtaccccagcacgagatcgatatccgagctgcgggccgccgtgccgttcagctcggcgtcgatgacgcggcggcaggcgtccaccgcggcatggtcgccgaggtcgttggccgcttcgagcacgagccaggcggcgtcgaccgaggacttgtccggagccgcgccgccgagatcggcgttcacggcattgccgggattcttcttgcgaacggcggtgccgaattgaggcaacattgcagacactccctctcctcagtggacctgtagctcgggctgacggcccgcatcggcaccggcgccggtcttccgcgactggtagaacttcaagatgctgcgcgaggtctcgatcttgagccggccgaaatcgcgctcgttgtcctgcaggtcgcgcgccgtgatcaggtgatccttggcgccgagaaacaggagcgacatcgtcgtgtcccaggagaaatcgagcgccttgcacaggaccaggatcatctcgcggttgcggtccatcagcgcacgctcgatcacgtccacaggcagcgaggacagcagcgacaggccgatctgcacttcgtcgaaacgatgctggcgcgcatagttcgagatggagtcctgattgaggttgccctgccggtactgcgtcgtgaccacgcgcttggcgacgaaatagctgcgcgaggacgggccgaacttggactgaagatcgccggtcacctcggtcaccgagctctggatctgcgccatcatttcgggccgctcggtctcgaggcggcggcggacgtcttccgacgccttcgagatgagctgctggaagatgtggcgcggcacgtccttgcgcaggccaagctgttcggcgagaatcgagtcgccttcggcgcggcggaccatgtgcaacaggcctgatccggagaagcgcgcgccctcgttctttgcaacggatgtcacgacctcctggttgccgcgcttgaccagcacgtcggtcacggcctcgccgatcgacttgcgctgggagatcgcgagcagatgcgactggctcttggtcagggcactctccaccagcatcttctcgtcgatacgagtagagtcgcgcagcaccggacccgccacctcgatctcgtcgtcgagcgcgagcttctcgatgacgttgagaggcgcgtgatcgtaggccgacatcatctccgaaagctgcgcgcgcgcagcaacctcgatctcgtcggcgagccggccgatgacctcgccgaacgtggagatctcgtcgtcgctgtagcggccggtgatcaggatatcggttgcgtgccacagcgccttggcccggctttcgtcggtcccgcgcgcgatcgcgtcgtccagatcctgcagaagcgatttcgccccgtccatctcgatcaccccagttcttggtcgccttttggcgagccgtcccgccgctggggcgagacgccgaattcctcggggacggacgctagaggcgaaacgcgagaattcggtaaaatcggcaaatcagttttgccgggcaaaattcattcaaatgcgggagaatgggtcaatcggttgaaaaggtgccgcgcgggaggtgcgctccctcgcccgtttgcgggaggacgggagaggtgagcgagtccgcagctcaattcgcgcaaaccaacgggcttacggattctgcggcgtcagcaccagcggcggcttcggcctgggctttgcgggcgccggccccggggctggcttcacgtcgatcggcggcggcagcggcgcaacatgctggctcgcgagcggcgggctcggcgcggcgggggccgcctgcggcnnnnnnnnnnctcgccgcgctcgatggcatctagccgtcgcgtctcgcgatcgatggtgcggacggcaagccatgacgacagcggcgtgacgtcgatggtgcggctcaacctgtcgggcggcccagccgcgaacagctgaatctccggcggcgcgccggaaagcccggtcatgatcggcgtcaggctggcgcggatgtcggcctggtcggcgggaatgtcgtagccgccggaaatgatggcccgggcgttcttggcttcgagcggcgttgcgccgacgcgcaggcggccgtcgcggatggtgaacggaatctgcgccgagggtaccgcgatgcgacctgccgacagcacgggctcgacgagctgccgcaatcggttgtcgtcgctgacctgaccgccgtcgctggcgcggatcgcgatctcgaaggcacggggattgaggcccgcgatctcggcggactcgagcgtcaccgtgccgttgccggcgagcgcgccggcaagcgccgcgacgctgcggccctggctggtcagcgccatctgcaccgaagcgcgtcccttcggcagcccgaggtcgcgatagcgcagcgccgccgcgtcaacattgccgagctcgatgcgtgcgttcagcgcaagaccagccgcgccattgcgcgcgtcgaagcttgcggacatctcgccgccaccgacgctgcccttgagcgcatccagcgcgagcgactggccgtcgctgcggaccgtgccgccgaaagggcgcagctcgatgccacccggcaaggtcgcgcgcaacgcctggaaggcgatgcgaccgcgccagttgctgacgagcccggcactgagcggctcgctggagtcatgtccggccgcgccgatggcgattgcgaacgcaggcgcaagatcgagcgaatcgaggccaatctcgccctcgagggtcctgtcctgatcgagcgtcactgaaacacggccgcgcaaatgcgagcccgctgcggtgccgtcgagatcatcgagcgtcagacggtttgccgagagcgtgagacgagaggacaggctgacattctgcaccgatctgtcgcccgggctaatgccgagcagcggcgccagattgacgttgcgcaggcgcaggttcacgctgcctttcggttccgacagatcgacgctgccttgcgcatcggcgtccagcccgccgccgctgaactttgcgttcaactgcaccggacggcgccaggcgccgctcagccggccctcgatctgcccggcgccctcgcctgccgccaccatgcgatcgagcccgagcagcgccagcagcgcaccggcctgcggcgccgacactttcgagtccagcgtgaagtcgctgctccgcaggcggtcgaggtcgacgccgccaatggcggccgcctgcgtctgtgcggtcagcgtcgcactggccttgagctgaggtgcgtcgagatcgagcacggcgcggacattgctgcggtccgcatgctcggcgctgttgtcgaggctgagatcgagcttgagacgggtcgcgcctgacgatgacgggagggcatcgatgcgcgcgcgcagcgccggcgcaaacggctcggtcagcgcggtcagctcgcgcagcgaactggccgaggatttcagcgcgagcttgccggtgaccttggtgcggtcgaagctgccgctcgcctccgtggtcacgccgctggcctggccgaagcgcaactgctccagcgtcagcgatgcggggctgtaagcgagcttggctgcgaacggccgcagctcctgaccggcggagatcgcgcggccgatatcgagcgagagcttcgcctcttccggccactcgccttgcggccccgccagcgcgcgcacgaagcttgcggcggcatcgaggtcgagacggtcggccttcaggtccgcatcgatccgcgagccccggctcgcgccggtctgcacgaagacgatacgtccctccacggcgccgccgtcgatatcggccttcagcctgtcgatggcgagatgattggcggcgatcgtgacgtcgcccgcgagccgcagcggccggctgctgcggcgattgatttcgctgcggccctggagccaggccaccagcgcgtcggggtctgaggactccacgctgagccggccgctgaagctgtcggcgccgggagctgcgccattgagcgagagctgcgtcatcccgggcgcgcgcagttcgagccgccggaaggtccaggatcgtccgtcggtcgcaagctcggccgcgatgttctgaagcggacggccgccaagcatgatctggtcggcattgaactcgatctgagccgggatcggcgcctgcgggatcgccgccagccctgcgcgcagcgccggcatgacgcgctgcggatcggcatcggtcctgccggtcagcttgtcggcatcgacctgccgcgccgacagcaccgttcgcagcagcggcgaggcgccgaacctgagatcgccgacgcccccaaatttcagcgccgcgtcctcggtgccgaagctcgcatcgatctggtcgaatttggcgccggccggatcggctttgagcctggtcgcgagcttccagggcgtcggccccgcctcgccgggcttcttggtctccggcacggcgagcgtcagcgcgccgtcgaatttcggctgccggttgtcgaaggcgagcaccccttcgaggtcggcgagaatggcacgctcgccgggatcgatgttgagatgcagacgcgtggccttgccgtcggcgctgggaccggaggagatgcgaaacgggtagcgcaccccatcggcgctgaagctgccgtcgccccgcaccgagcccgcgagcgagcgcacgtcgccggagaaggcgatgtcgttcaattccagcgtcgagcgactggcggcatcgtgcagggcgatgcggccggtgagatggagccgctcgatggcgagcgaggccagattgaaggtgccgctcgcggtggaaggcaagtcgacccgcccgcgcgcgtccaagccgagatcgaccgccatgccgcccaccgaaagctcggtggcgcgccattccccgcgcatcagcgagcccaggctgaactcgacgtcaagcttgtcggcgcgcaggcgcccgagatcgttgttgccgccgaaggtgacgccgcgcagccgcagggtcggcgccggcaacagccgtgcgtcgagttcgcccgcgacccgcaccggcacgccgatgatcttggcagcctccgcctcgaactggggcctgaactggttccagtcgatgtagtaaggcccgatcagcgcggccagcagcgcaatgatgaaggcaatcgccaatccgagcagcgtcgtctgcacgggtctcccctcggccaaaccggcatccggaccaaaccctggccgcagcggacttcaggcgtgccggaacagcccttatatagagggaagtgtggcgaagtcacagcgactgttgcgcgcggcggttaacgggacgaccctcatggtgaggcgctgcgcccgcgatgtcggctcctaccggccagcgcctaccagctcgcgggcagccgcttcaggccgcgcagcacgaaggtcggccgccattccgggttttcgacatcgtcgatgcgcagatccggcagccgccgcagcagcgtggcgatggcgatttcggcctcgatgcgcgccaattgggcgcccaggcagaaatggatgccgccgccgaacgagagcggcctcacgttctggcgggtgacgtccagccggtcgggccggtcaggatagaccgcggggtcgcggttggccgagccgagcaggcagagcacggtctcgcccttgggtatcctcacgccgccgaggtcgtcgaaatcctccagcgcgacgcgaccggtcatctggaccgaggaatcgtagcgcaggaattcctcgatcgcgccctccatcaagtccggccgcgccttgagcagcgcaagctgatccggattgcggtgaagcgcgagcagcccgttgccgatcaggttgaccgtggtctcgtggcctgcgccgaacaacaggatgatgttggcggtcagctcctcgttagtgagcttgttgccgtcctcctcggcctgcacgagctgggtgatgaggtcgtcaccgggattcttgcggcgcagctcgaacagctgctggaaatacatctgcgccatcaggttgccggcgttgccttggctgatctcctccggagacaagggcacgggatcaagcagccgcccgccgtcgcgcgagctcttgtagaaggtctcgcgatgctcctcgggaatgccgagcatgtcgcagatgatggtgacgggcaggcggaaggcgaaatcctcgatcaggtccatatggccgcggtcgatcacggcgtcgatggtctggtcgacgatctgctggatccgcggccgcatgtcctcgacgcggcgggcggtgaaggccttgaccacgaggccgcgcaggcgggtatggtccggcggatcggcttgcagcatccagtagctcatgctgcgaaacaccggctccttcatgatctcggggccgtagcggcgcgtggtgcgatcgacgaaatccttgccgaagcgcttgtcgcgcagcacgagactgacctcggcatggcggctggcgacgaactggccgaacggcgtcacgtggatcggatcgagcgtgcgcagccggtcgtaatgcgggtagggatcgcggatgaaatccggcgagagcgggttgaacagcggtccgccggccggttgcacttgctcgttcatggtgacctcagatcggttgccgcatgacacgaagacgcaaggctgccccatgcgcccggcgtaaccatccctgaaaattatcaactcgatacattcttgtatcgagttgcattctgccctagccttgcgcgatgtcaagggtgaggacgagaccgaccagggacgacacgcgcgacaaactgttcgaggcggccgcccgcgtgttcgaggcggacggcatcggcggcgccagcatcgaggcgatcgcggcggcggcgggcttcacccggggcgcgttctattcgaattttggcagcaaggacgaattgatcatcgccatgctggaggaccatgtcgagcaatcgatccggcgcaacatggacatcctcgcccagcacgacaatctcgacgatttcatcgcggcgctgaagacgatggaccggagccggcaggatccgctcggccgctcgcccctcctccacatggagatgatcctgttcgtcgcgcgcgccgagaagcgccggcccgaactggcaaaacgcctgcgggcgcggcgcaagctggtcgccgacatcattgaggcgacattgaagagcaatggcaggaacagctcggtaaacccgccctggatggcctcgatcgtgctcgcgctggaagacggatttcgcctgcaccggctgatcgacccggaaacgaccccggccgacagtttcctgcgcgccatcacggatctcaggcgcaggacgggattggcctcggactagacggcaagctttccggcgatcccaccggcaaggccgtgaaaatcctcagatgcggccggccggctgctacttcttctttgcaggtccgaaatccggctgccaggcggcttccttgcgggacggtgccgcagcgatgaccttggccttgtccttcttcggcttcttggcttcgcggttgccgcgttgctggccctttgccatgtcgctctcccttgctggtttgagttcgtcgaattcattcggctgcaggacacggccacgcggggtgcagaccctgacgtccatgtagccctcgcgcagcagtttttccgcgagacgtagcgcgacggtcgcagttccacggccgagattggagctgccgtattcgttggttccgctcaccagatacggcacgcgtatcgtcctagccattgaagaccgcagcggcgcagacgagaagcagaagaaacagcggaacgatcaccggcggcacgatccattccgagatgcgtacacgcgacatcgaatgctcctgcgaagccttcggcgggagcacacgtgaccctcagtcaccggtcgatgccgttgagaagcgcggtgatgccgacgaccctacgcccgggccgaaccaatagcgagcgttaaatgggtcgcgggctgccgccgcgccgtgacattaccgcgccggtgcggagacgatagtgctggctattgccgtgccaaaggcgcgtgctcgcaggcagccggcaccggttggggcttcacttgcgaaaggcaggcgtgcatgaccatccgctcgcggcgagagaccgtgatcttcagacatccgtttcagatccgcggcatcgagcgcatcttgccggcgggcgcctatgaggtcgtcacggacgaggagacaatcgacggcttgaccttccccgcctatcgccggattgccacgatgatcaccgtgcccgccgagggtgcgcgcggtgcgatggagcgactgtcgatcggctctgtcgatcttgcgaatgcgcaagctgcagacgcgagcatgacccatgagtgatcagccggtcgatctcgataggcaccgtggcatggccgcgcaaaaggcaaccgacctgcgccgcgcgctggccgaggtcgaggcccatgtcagagagctgcgcgagcgcgaggccgatctcgaacaccgcatgatgacggtgcccgcggcgtcatggccggaggctgcggtgaaggcgcgccatctgctcaacctctatgctgcgagcctgcccgccgaggacacgcgccaccgcgcgcttgtgtcggcgctgttcgacgatttcgcccggctggccggcgagggctgagccgagcgacgtcgctcgcattctctatgcgcattctgaatgcgggccgggaagcgaagaggcacttacgcaacggagtgagccatgacgctgacgagcggccgctttattggccacgaatacgaccggatgatcgtccggttctcgatgcatgacggcgcacgggagatcccttgcgcgatctcgacgtccgcgatggacaatctcgagcgaggcccccaggtcaagcccgaacagcgggaagcccaattcacccgtctgcgggctcgcatcgaagcatgcgctgcgaacaagtatcgcgccacggagttcgaaggcacgccgccgggcatcgtgcttcgaggcatcgatttcaagccataactccataaggagacgaagacggcttctactccgactttgatttgatctccggcaagggcggcttgcgctcgaaaggcttcttcttcggcggtgcaggcagcaacccttccctgatcgcctgctttcgggcgagcttgcgggcacggcgaatggcctcggatttctcgcgggtcttgcgctcggacggcttttcgtaggaccggcgctgcttcatttcccggaagacgccctcgcgctgcatcttcttcttgagaacgcgaagtgcctgctcaacattgttgtctctgacgagtacgtgcattgatcctcctggcgcgcgggctgcgaaagcgacacgtcctgcagggcagccaattgcgcaggagcttcattctcgattcttggggatagtagcggcgacattcgtcgcggcttccgatgagccgatctgcctgttgcggggagcagcttggtagcatggacgtgaccaccgtcgtgcatcgctgtcaatcgataacgtccgggtggcaggtcgatggaggcacgcaaagcgccttgatcggagcagacgaacctgccctgccgtaaacaaaccggcttcgctccttgcaaatccgcgaaactcatatatattgagcttcgttcgattagccgctgtgccttgttgaatgcgcccgcgggctccttttccaaagacatcgacgaagttgaagataaacgcgtgattgtcacgcgggatgcgcttgcgcgctttggagaagaaaatgacgactggtacagtcaagtggttcaatggccaaaagggcttcggtttcatccagccaaacgacggcggcaacgatgtgttcgttcacatcagcgccgttgaaagggctgggcttgccgggctcggagagggccaacaggtcactttcgagatcaagaccgacaagatgcgcggcaaatccagcgccgagaacctctcgctggcttgagatcgtggcgccgtttcacggatgtactgaaacggccgctccgcccgctcaattctagggattgagcgggtttagtcgtttgcggagccgagtgaacgatgagcaccaagaaatcggcagagccgtcacccacaagcatcgcgcgttccgatcgcaagcgcctggccgctgaagaaggcgcgcgggcgttggctgacgtcgagaggcaaggcatcgaggttcgcaagaacatggcgcggcttcgcgaggcgcgccaggcgaaggaatcggccgatgaagctcttcggctggcgttgccgccgccgacgcccaagaagcgcttgaggaagccggcgcgatagtcgccttcagcgtcgccggcgaagatctgaaatgccgatcacatgccggagagcagatcgtgcctagactcaagccagaccacggaaccatcaccttctttctcgcctccggcgcaaatcgccagatgtgccggcttgccacgacgttcaacacacagaagcaggccttcagctatctgcagaagcaccgaacggagttcgagcgcatggcgcgggcgcgaatggcctcaggcgagctcgaagacgggattgtcgtgctttcgatgctctagccggagcacgcaagtgtgagcaccttgatcgatctcaattgaccaaccgaactctctcgcggacgaacgtcgcgctcaagacgggaccaccagcatcccgaacattgatggcaacgccatcgctgctggcgaacggctcgagctgtttggcgatgtcggcaagggacagcgccgcctcgatctctgcggcccgccggctggcaagatcgagaccttcctcgtctacggcgagcgcttcaccatcccagatatcgaagtagaattgcgacactagctcgtcctttcggactggcctcgtcgttcagcctcacgcgccagccgttcggccttcaagcgctctcgatttgcctggaaagcctgttccgccttttcgtaatcggtggcgggcttcgctgcggcctgcctgaagacattgttcgcctcgatcgctgcacgcgattgggaatgccgtttcattgcttgttctccatgtctttggtgattcgaagtccccgatgtcggcggcttcttcgagctcggcctattcccggacccgcttgttgcgcttcgaccgatcaattcgtacccggccgaactccttgggtccatcgagcagatcccgcttgcggaccgccctaccctccaccgtcgtggtcgtgtctcccatgccgtcgatcgcatcggcggccattttgcgggcgcgctgcttctggcgatccggctcggcgtggaacgccagccccagctccaccaggcggcttattgcctccgacaggccgggcttgtcgttctgacgagccacccaggccgtgatggccctaagctgcgcttgcgaaggtcgaaagcctgccgcgcggacggtggcgctgctttccggtcttttcatcgagcccacgcaaattgcaaacagggcatggcgcggtgcccctccggcggaagtcgaagaccaaatcgccggataccgatgcgttccaatctgcggggaatatcgcccaaaggcagctacgccgtccgcttcaccgcctcgtgtccgactgccgcgacatcgagccgtcccagcatcgtcctcgcctgctccgcgcagtgctcgatcagccaacgttcgaaggcgaccggaggcagcgccggtgcatagaggaagccctggacgatgtcgcagccgagctcggccagcgtcttgcgctgtccctcggtctcgacgccctcggcgaccacggtcatgccgaggccctgcccgacgcggaccacggcggtggcgatcgcaagcgcgcccgcatccgtctcgatgtcgcgcatgaagctgcggtcgatcttgagttcgcggatcggcagatgcgcgagccggctcaggctggaatagccggtgccgaagtcgtcgaccgagaggccgacgccgagctcgcggatcgcgttcatcgtctccagcgctgcggcgccgtcctgcatgaacgcgccttcggtgatctccagcaccagcgcgtccggcggcagatcgtattcggcgaggatgtccttgagccgcgcagccagcgtgacgttgcggaaattgatcggcgacaggttcaccgagacacagggaatgttgaggccggcgcgacgccagctcgccatctgccgacaggcttcgcgcaccgaccacatgccgatctgctcgatcagcccgcattcctccgcgagcgcgatgaattttgcgggggagacgtcgccgagcacggcatcacgccagcgcgccagtgcctcgacgccgtggatggcgccgtcgcaactgcggatctgcggctggtagctgaggctcagcgcgccctccgcagtggcgcggcgcagcgccgcgatcagcgccaaccgctgctcggccagcccgttcatctcggcattgaagatgcgatgggtcgagcggccggcctgtttggccatgtacatggcagcgtcggcctgttgcatcagcgtgtcgatatcggtggcgtgatcggggtagaggctgatgccgatactggccgacatcggcatcagcttcgatccgagacgcagcggccgggccagcgctcgggtgatttcggcagcgacgcgctcggcgctcgcggcgttgcgttgcggcagcagaatgacgaactcgtcgccgccgagccgccccagcatgtcgccggggtcgatatgctcgcgcaggcgctgcgcgagctgcaccaacagctcatcgccggcggcgtggccgagcgtgtcgttgacgtccttgaagtgatcgacgtcgaggaaggccagtgcgacatggccgccggtcggacaggcatcaatggccgtggtgatcaggtgccgcagctgagcgcggttcggcaacccggtgaggatgtcatgataggccagccgcgcgatctcggcgcgggcttccttgcgctcgatcgcgaaggcgccgagattgacgcaagcctcgacaatgcgccggtgccaattgctcggggcacgtgactcccgatagtagaaggcaaaggtcgcaatgacgcggccgtccttggccttgaccggagtcgaccagcaggcgcgcaggccgaccccgagcggcatcgccttgaaaggctgccagcgcggatcagtgtcgagatcggtcgccagcaccggctcgccatagaaggcggcggtgccacaagagcccacattgggaccgatggcgaggccgtccagcgcgcgggaataatcctcaggcgtgctgggaccgccgaggggatggatcaggccggcggcatcgatgtgaagcagcgagcagacgacgtcgggcgcgatctcctcgacgcggcggcacagccggtcggcgatctcgccgatcggcacctcgtccgcgagcgcggtcatgatgagctgctgaagtgagcgcagctgcttggtttctgtgatgtcttggagcagcgcgaagatgtgcttgacccggcccttcccgtcgcggaaggcatcgatccgggcagagacccagatttcctcgccgtccctggcataggtgaggatatcggcttcgccgcctggaccgcccttgatgagacgccttccgatcgtcatcatggccttccggtcggtgtggggaccagccagaagatcggtcactcgccggccttccgcctccgcggcggagtagccgaacaacgatgtgaacgccgcattggtgtagcggatgcccagctccgggtcggtgacgagcacggcgcggttggtctggtccgagacggcgtcgagcagcgcaatccgcgcgcgccgttcgacctcggcggtgacgtcgcgcgcgaacacgacgtgatgaacccctgtgccgctgtcgatgcaggaaaccgaaatggccacccggatcctgctgccgtcgcgccgggtgaggctgatctcgtcgcgcaactccgcgaccgcatccgcctgcaggcatctgagatcgagaattgcggcgccgagaccgagcgcctcagcgcgcgcgagcttccagattcgctctgcggctgcgttgaaatgcgtgatgcggcgcgcgccgtcgatgatgacgatgccgtcgtcggcgcgttcgagcgccgcccgcagcacgtccggcgcttcggtcacaagacaatctgaggcagtcatcatcggacccagaaggcatcgggaataaatggcattctcccgacgctagcgctccgatggtgtccaagacgtttttgcgatgccgtggcggtcccggcaagaggcggcatgcttaacgttctcccaaaaagaagaacggtaatgcagcgttcgagaacctaagtcccgacaccgccgcggagcttgtgcagccggccggcgacggcgcgcaccttgcgcggtgcggcctgccagatcgcgaatgccgacagtccgctcatggcgatggcgataccgaaggcgagcgtgtaatcgccggcgcgatcatggaggaggccggtcacccacggtccggccgcaccgccggccagcgccgccagcatgatcgtgccgaagatgctgccctgatgcttgccctggaatatctcgaacaccacggcgcccatgatcgaggtgaggccgtagccgagcgcgccctgcacgaacaccatgacgtaaacgagccagagtgctggcaggtacttcagcgcgatcagcgctgcgaagcagatgacgaaacctgcgcagctggtcgcccagacccattcgcgtccgatgcggtccgagacgtggccgagcaggatctggccgggaatgccgagcaggctgacaatgccaagtgcccacaccgcaacgcccgggctgaagccgatgtcgagcaggaatttagtctggtgcacctgcactgcgtaccagatgtagagaccacagaaatagcccagagcaatccaccagaaccgcgcggtcgcgacggcccgcttgagcgtccaatcggtgccgacccaggcgggatcgacgatattggagatcggctgggccgcgcccgccgccggagcggcatcgccatccggcgaaagaccgatgtcctccggccgcttgtgcagcagcaaattgatcggcgccagcacgaccagaatgagcaggcccatcgcggtgcaggcggtacgccaaccggtctgctcgatcatgtgctgaacccatggcagcagcgtcaccgagccgatgccgacgccggcgaaagcgatcccgatcgcgaagccgcgcttgcggatgaaccagttcggcagaaacagcgactggccggaatagcccagacaaaccgagccggccccgaccatgacgccgatggtgacgtagagatgccaaggcgcgctcgtcagcggagccagcagcagcccgccgcccatcaacacgacaccgagctccatcaccgcgcgcggaccggcgcgatccatcaggcggccgatcagcggactgaccacgcccgagaccacgaagccgaacgagaaggcgcccgcggtgacaccgcgctcccagccgaactcggagatgatgggcggaaagaacagcgaaaaggccgtgcgcgcgttgacgccgatggccatggtaacgaaggtcacggccaccacgacccagccgtagaagaacggaagccgcatgatcagattgtttcacccctagacggttctaccgaacatccggggccgtccgggtcaagcgaattccgcgtgtgaggtcttcacggaggaataccggacatgacgctgcggacgcttcagcgtaccggggtcaactcatacgttgccgtttggacagcgtgctcaggcggcgtcgaggcgtgagcgtttgaccggcgcgtcgatcgcgatccgctcgatgggctgcggtcggccgaacagatagccttgcgcgaaattgacgccgagcgccttcagccgctcgaattcctcgcgggtctccacgccctcggcggtgacggacatgccgagcccgcgcgccagcgtcacgatcgcggagatgatcgcggagctgcgcggttgctgcgtcagattgcggatgaacgacttgtcgatcttgatcttggcgaacgggaacgcggtgagatagctgagggacgaatagccggtgccgaaatcgtcgagcgcgagttcgatgccgatgcccttcagccgctccatgaaggcatggttctcggcgccgcgctccagcaacaccgattcagtgatctcgatctcaagccgctgcggcggcaggccggaatcggcgagcgccgcacagatcatcccgaacagctcggcctccttgaactggatcggtgacaggttgacggcgaccctgagatcggagggccatccggcggcatcttcgcaggcgcgccgcagcacgaactcgccgagcggcacgatcaacccggtctcctccgcgagcgcgatgaactggtccggcggaatcagtccgcgcatcgggtgccgccagcgcaccagcgcctcgaagccgcgccgggcgccgctgagcgcgtcgacgaacggctggtaatgcacctcaagctggcactgcgcgatggcgtcgcgcagatccccctccagcgtgttgcgagcctccagctcggccgacatcgcctcgtcgtagatggtgaagcagttgcggcccgccgatttcgaacgatagagcgcgaggtctgccttcttcaggagctgctcctggtcgctgccgtgatccggcgcgatcgcgatgccgatactggtgccgatctcgacgcgatgcccgggcagcaggaacggctcgctcacgagcctggcgatccgggccgccagctcggtcgagcaggtgcgctgatcctcgcccgtttcctgaatgatggcgaattcgtcgccgccgagccgcgccagcacgtctttgggacgcagggcggatttcagccgctgcccgacctggcgcagcagcgcatcaccggctgcgtggccgagggagtcgttgacgttcttgaagcggtcgaggtcgagcatcaggatcgagaagggcaggcccctcacgctcagctgcatgttgatctcctctagccgggcgaggaaaaaagcgcggttcggcagcccggtgaggatgtcggtctgggcaagctcgagcacgcgccggttggcaagcgacagccgtcgcgaattgcggctcgcgagcatcagataggtcgacagcgacagcgtcagcagcatgccgacgatgaggacggcaacggcgcgatcgtaactggtcgccagcggaccgccggcgcttggaaccgcccgcacctgccactcgctatcgccgatacggagagtgcccgaccagtggcggatccgcgcgacgtccggcatcgactggggcgccgtggcgtccgacgaataatccggcagcgtttgctccaggctcacgatctggggcgtgaagggcggataaacgttcatgctgacggcagagctcgctccggtggtcgtgcgaatggactggatcagcaaaggcaggtcgaagatgccgacgacgaagccggcgagattgcggcgccggtccgcgatctcatcgcgcgacgtacccttggcgtagactggaatcgcgacgaggacgtcgggcagccggctcccctcccgcggcacgaacaggcgcgtgcgcatgccggcgacgcgatcgttgtcgcgcgcacgctccagcacggcccgccgttcgggaacggtcgtgtagtccatgccgtagaccggggaggtcttcggctgcgtcgagtagaacaccggaaaatattcgtcgctctgcggcgcggtggcgaaactctcgccctggagcgatctgatgcgatagccggacacgccttccctgatcgctgcagcctcgtaatctgcgcgctccttgcggctgacgcgcggcaaccaggcaatgcgcagcatgccgggatggcgctcgaacaggcgcgcgctgaaggtctcgaactcgctgcgagtgacttcgtcactggtcgattcgaacagcgtgcgcagtgcgagaagcctcgagatgtactcgttcatgccgttctgcatgacgatcgcttgggtctcggccgcgttgccgaactcgatcctgttgacgcgatcctcccatcgcgccacggcggcagcaccggcaaccgagaatagcaggccgacgccgatcgcaacgagcgcggggcgatagagcccgagcagcggcgcggcgcgccaccatccgctcgaacgtctccgatcctgatcattctgatcgcgatcgcccatgttgaaaccgccgtcccctctctcgacgaaccgaacctctggttgaggtgccggccccgctatcggaacaagaccgcggttaagaaaatgcacaatgtcggaacccggccgttccgcggtgcacgaattagttaatgaagtgtgcagacaacccgccagagtggaaacaaattgccggtttagcccggagtagtacggacctccgacagagcggcgcttagtgagcgattcaggctcgcaggaatatgttgcggcaggcatgtacctcacattcggcaaaaccatacgatgcatcgattccgatccgcgagatccgtcgtcctgacagtcgtgttcctggccgcgaccacgttggccgccagcggcgacgaggccggcgtcagcgaggatgcgatcctgttcggacaggccgctgcgctcgagggtccctcctcggcgctcggacagcgcatgcggcaaggcatcgtcgcagcgttcaccgaagtcaacgccaagggtggcgtccacggccgcaagctccagctcatcagccgcgacgacggctacgaccctgatcgttctgtggcgcagacgctgcgcctgatcgaggacgacaaggtgttcgcgctgatcggcgcggtgggcacgccgacagcgatggcgacgataccgatcacaagtgcgaggaacattccgttcatcggccccttcagcggcgccgagttcctgcgcgacctcgagcttcccaacgtcgtcaacatccgcgcgagctatggcgcggaggcggaggcatggatcaagcacctcaccgaggatcgccatttcacccgcatcggcatcttctaccaggacgattccttcggccgcgacggtctcctcggcgtgaagcgcgcgctcgcgaagcgcggcctcgagctcgccgccgaaggcactttcgaacgcaacacccgcgcggtcagcggggcctggcggatgatcaagcgtgccgaaccggaggccatcgtgatggtcgggacctacgggccctgcgcggatttcatcaagctcgcacaccgcagcggcttctatccgaccttcgtcaacatctccttcgtcggcgccaatgcgctcgcgacggagctcggccctgagggcgaaggcgtcatcgtctcgcaggtcgtgccgtctccctgggaccgttcgctcaagctggtcgccgactaccaggcggcgcagcgggcgttcgatccgacgctgacaccggacttcgtgtccctggaaggctatctctccggccgtctcgtggccgcggcgttggagaaggccggaccgcaaccgacgcgcgcaagcctgctgcgcgccatcaacgatgtcgggcgcttcgacatcagcggcagcaccgtcaccgtgggcattcgcatgatcgatgcgccgccgaaggtgtacttgacggtgattcagaaggacgggacgttcagggcggtggatcggctgtagggccgttcacggtcgccgcctgtcgcctcgacgtgtcgaaacaccacctgaccgtttgtcgcggctatgagcgtgatccagcgcacagactgcctcatggcgccgacctagaaaaagtgacatcatcgcgcgcattgccgatggaggtgacaccatgcgccgccctacgttatccaactttctgcttgcttccggtcttctcgcgctcacgcaattgatgattccggccgatgccgcggccgaagcgcggctcgcgctggtgatcggccaatccgcctatcggacggtgccggagctgcccaacgccgccaacgacgccaagggcatgacggagctgctcggcaacgccggctttaccgtcacgaccgccgccaatctggcgcagaacgagatgcgggcggcgatctcggacttcgccggcaaggtcagtgccagcggccccgatacggtcgccttggtgttctatgccggccacggcctgcagatcgacggcgagaactatctcgttcccgtggatctcgatcccaagcgcgaggccgacattccgctgcagggcgtgcggctgaacgacatgctcaacacgctcggcgctctgccgacgcgggcgcgcatcttcatgctggatgcctgccgcaacaatccgttccccgcgctccgcggcgccggccacgggcttgcgatcgtcgacaccaaggccggcgcccccggctccttcatctcctattcgacctcgcccggcgccgaagccgaggacggcaacggcatcgacagcccttacaccgcggctgtgctgacgatcgcgaaacagcccaatctgccgatcgaggagatgttcaagcgcatccgcgtcgccgtggcgcaatcgaccgacggccggcagattccctgggaaagctcgtcgctgaccaccgacttcaggttcttcggcgagagcagcggcaacacgcccgcccttcccggcgcatccgcgatggcgctcgccggcggcacgcgcagcctcgaggactggcgcaaggaattgcgcggcaagccagccatgaccgcctatgagctcgtgatcaccgaggacaccgtcgaggcgtatcaggcctacatcgaactctacgcgcaggacacccgcacgccgcgcctgcgcaccgtgctggagcgacggcgccagatgctggcgtgggagcgtgcaacggcgatcaacacgcgcgcctcgttcgaggcctatcttgcgaactgggacaatagcgacctcgcggcaactgcgcgccggctgctgctccgcgtccagaaccgcaattatggcgtgcctaccgctgcggcggcgaccccggtcgccgtcgcgacggcaccgacctgcccgtgctcgacgccggcgacgcctgtcaatccgagtgttccgcccaccctcaagaagcgcgtcgacgataccccgccaaagcgcaaggtggtcgagacgccgccgaagccgcgccggccgcccccgcccgacgaagtggtcgtctacgagctgtctcttatacacatctg

SEQ ID NO: 193 - DNA, 61588 bp, Bradyrhizobium colbertium
  misc_feature (21202)..(21211): n is a, c, g, or t
  misc_feature (41382)..(41457): n is a, c, g, or t
ccactgtcaccctgattgccgcgcggcagccgatgcagagcgccaacggcgagctcagcgtcaccttcaatggcgagatctttaactacatcgaattgcgccaggcgatgatccgccgcggtcatcgcttccggaccgattccgacaccgaagtcatcctgaagctctaccaggaaagggggggcaactgcgtcacggaactcaacggcgattttgccttcgcgatctgggacaagcgccaacagcggctgatgttggcacgggatcggatgggcgttcggccgctctactatgcgcgccggcccgatggcctgttctttgcgtccgaggtgaaggcgctgttgatggtgcccggcgttcgagccgagcttgatccgtttgcgctcgaccagatcttcaccttctggttcccgctctgtccacgtacgccgttcaagggtatctttgagcttccgcccgcccatgtgctcgttgcggagagcgctagcatctcgatccgtcgttactggcagatgcattttgccgacgagatgatggatcgtcgtagcgaagctgcgattgccgccgagctgcgcgaacttttgaccgacgcgacccggatccggctgcgctccgatgttccggtaggcgcctatctgtccggcggccttgattcctcgatcatcgcagcggtgacgcggcaaatcaagcaggacaagcttcgcactttctccgtcacgttcgatgcggctgagtacgacgagagcgccttccagggcgagatggcggatgcgctcggcaccgagcatgtgtcggtcgcctgccgcaccgacgatataggcaagattttccccgatgtgatccgtacgaccgaacggccgatcctgcgcacggcgccagcgccgctgttccatctgtccggcctagtacgcgcgcagggctacaaggtggttctgaccggcgaaggcgccgacgaggtgtttgccggctacgacatcatgaaagaggcgaagatccgcaggttttgcgcgagccagccgcagtcacggcgtcgcccgctgctgctgcagcggctctatccctacctgccgggcctgaaaggccagtcgcagaaatatctcgaggcgttctttcgcgcccgcgccgaggaggtcggcgatcccctattttcgcatcttccgcgcttccgcaacaccgcgggcgcaaaggtcttcttctcggacgagctgcgccgcgagctcggcaactacgatgcactcgatgaattgcgcgcggggctgccgccggagttcagcgactggcatccgctagcgcagtcgcagtaccttgagacggcatacctgctgccgggctatatcctgtcgtcgcagggcgatcgcgtggcgatggcacatgccgtcgaaggccgcttcccgttcctcgatccccgcgttgtggagttcgccgcgcgaatcccgccgcgcctcaagatgaagggcttgcgcgagaaacacatcctgcgtgaagcgatggggcatctcttgccgcccgcgatcggcaaccggccaaagcagccgtaccgggcgccggatgcccattcctttgtcggcgcgaacgctcaggagtacgtaaaatcgataatgtcggagcacgcgctggctaacgcaggggccttcaatccgcgcgcggtggcgaaacttcaacagaagtgcgtggctgccgccaatctcggcttccgtgacaacgtagcctttgtcggcattctttcaacccagctttggcacgacgctttcgtcgagcaaaacctctcgcatcaaaatctcaacgcagcctaatcaatggagttcttagatgcctgccgatgtgaccaccaagatccgcgatttcatcaaggacaactttatgctccgggacgatcgcgcggagcttgcggatgccgagtcgcttctggacacgggactgatcgattccaccggcgttcttgagctcgtcgctttcatcgagaccgagttcagcatccagatggctgactcggacatcgttccggaaaacctggattcagtggagacgattgtccgctacgtcgatggcaggctggggacaacggtttagatagccgacaaagggggccgcgggtgacgccatgagcatccatcggatcgaagagtacctgtcggccagcgctcgcaagttcggcgacaaggttgcgctcgtcgcaagcgggcgccgcctgacatttgcggagctcgaggtgttgtccgaccggattgcggcggcgctcaacgacggcggtatcaagcggggcgaccgtgttctcattttcatggacaattgctgggaggctgtcgtctcgatcttcgcggtgctgaaggccggcgcagtctttagtccggtgaacccgtcgacgaagtccgaaaagctggcgtacgttgcccgcaactgccgtgccgcggcgatcctgacccagggccgtcttttgcccgtcgttatcgaagccgtcaaaagctgcgaggcggtaccgctaatgatggtcgcaaatgccggcaagggcgggttgccggacggctatgcctcgttcgaagcggcgtgtgagacgccgcgcgccccgccgcgttcgggtatcaacctcgatctcgcaatgctcatctacacctcgggatcgaccggcttcccgaaaggcgtgatgatgacgcatcagaatatcgaggcggccgcgacctcgatcaccacctacctcggcaacacctccgatgacgtgattctggcggtgctgccgatctcgttcgattacggcctctatcaggtgctgatggcggctaaactcggcgcgacactggtgctcgagaagtcgtttgccttcccccaggcgatcctgaaccggatcgcggaggagaaggtcacgggtttcccgctggtgccaaccatggccgcgctcctcttgcagatgaaggatctgcggcccggggaatacgcgacgcttcgttacatcaccaacacggcagcagccctgccgccggcacacatcgcccggctacaggaattattcccgaccacgaccttgttctcgatgtacggtctcacggagtgcaagcgctgcacctatttgccgcccgcggagttgacgagaaggcccgaatcagtcggcatcgccatccttggcaccgaagcctatatcgtgggcgacgacggctttccgcttccattcggctcaaccggcgaactcatcattcgcggaccgcatgtgatgaagggttactgggaaaatccttccgccacggcaaaggcgctacgccccgggccgctgccgcacgagatggtcctttataccggcgatctgttccgctccgatgaggagggatttctctatttcgtcggccgcaaggacgacatcatcaagacgcgcggcgaaaaggtcagcccgaaggaagtcgagaacgtgctctacgcgctttccggggtgcgggaggccgccgtcgtcggcgttccggatccggtgctcgggctcgccatcaaggcggttgtggcgctcgacaccttcgcggccctctcggcggccgacgtgatccgccactgcgcacggcatctggaagatttcatggtgccgaagctcgtcgaatttcgcgaccagcttccaaaaagtgaaaacggaaagatcgcccggcggcagatcgaggccgagtctctggagactacatcatgaacgaacatgtgcagacggtcgaggctggcacacctttttcgcgggaggccctcaagctcgaccccgcccgggaaatcgagcagattagcgtcggcattcgcgaacaggtgctgaagacgttgcgcaagcgtggcgccatcgtcggcctgtccggcggcatcgactccagcgtcacagcggcgttgtgcgcccgcgcactgggcgccaagaacgtgctggccgtccttatgccggagaaggattcggaatccgacagcctgcagcttggccgcaaagtggccgaaacgctgggcatccactgggttgtcgaggatatcgcgccccagcttgccgccgccggctgctacagccggcgcgacgaattcatcagaaaggtcgtgcctgagttcggggacgggtggggatgcaaggtcgtcctcggcggagcgctggcggcgacgggttacaacatcacctcgctggttgtgcggtcgccgagcggagagatgcgcaagctgcgcatgccgctggacgtctatcttggcatcattgctgcgaccaacatgaagcagcgcacccgcaaacagatcgaatattatcacgccgaccggttgaactacgcagtttccgggacgccgaaccggctcgaatacgatcagggcttcttcgtcaagaacggcgacggcgcggccgatttcaagccggtcgcgcatctctacaagagccaagtctatcagcttgccgaggccctcgacattccgccggacatctgcagtcggccgccgaccaccgacacctggtcgctgtcgcagacgcaggacgaattctacttcgcgctgccgtatcaggaaatggatctctgcttgttcggcctgaatcacggcattgcaatggatgcagttgccgcggccgcggaattgtcgatcgagcaggtcaagctcgttttcagggacatcgagcacaagcggcgggcgacccgctatctccatgtcccgcctttgctcattggggacgacaaataaatagcgcgaatagattccgtcggccaaagaagttcgtcagccggagcacgctgccgagaatacttgcgtcgagaccgaaggctccgttgcaggtaattcctctgtctgattgtcgactcgcacagcacgtctccgcagctgggcgccagaggtcttttccgagcaactcctccagcgtcgctccagcgagcaggtcttacccggcgctttgcgctgtcggggcgatgccggccctctggttaccaaagcaaaacaaagcccgtactgtccgcttgaaggccgggagcagggctgcgactgcacatctcaattacctgcagcgcgacggcaccactcgggatggcgggcacggtcagctctacggagcggatgacgaccggacggatggggcgagccttcgtcgagcgcggccacggggatcgccaccagttccgctttattgtcgcgcccgaagatggcgatcggctcttggtcttcgcggcttcaccagcgacttcatgcggcagatggaagaggatctcggcacccggctcgattgggtcgcggtcgatcacttcaacaccggccacgcgcacagccacgtcgctattcgaggcaaggacgattccggcaaggacctgatcatccgcaggactacgccgaaggggtgaacgggcgaccctggaactcggccccgagacggatgtcctcgcggccagtcgccaagtccagccacaagagttgttgcaattctgtcacaatgggggtgagcgtcgcttagagcttcttgcaattaagaattattcgcaataaatcttttgcgagctcagagctttggggcaaatctccggcagtggacatctggacctgcagcgaccagccggccatggccgttcgctgcatcggctgtggcggcgaacctgcaaggatgggcgacggccagtgtttttgtgtttggacccatttaacgatgaaccgccgatccctgcgaacctccgctggcctcgggctcggcatgctcgtcctgcccggcgcaagctttgccgccgacctgccgctgaaggcccctgcgctgaaggccgtctatgattggaccggtttatatatcggtgcgcacgcaggctacagccgtggctcttccagcttcgtcctgagcgatcccgcagcaaccgtgggcagtggtcaattcagcggcatgatcggcggtgtgcaggccagctataattatcggctagcttccggattgctgttcggcgtggaaggtgatctttccttcccgaattacatcacgtcgaactcgatcgtctctttcctcgcgacaccgcgcgccgcggcgacccagcaatgggattattccgcaagtgtccgtggccgtgtcggttacgcctcgggcttgtggctgttctatgcgaccggcggattggcatggatgggcgagcgctttttcagcacgcctgccgctggcgacggcgagaagatcctccacacgaggcttggctggattgcgggggccggcgtggaatacggcttcgcgccgcattggagcgctcggctcgaatatctctacagccggttcgagaacgccagcgttacctttccttccgcgacccactacacgtcatccctggatcttcagtccgtccgcgtcggtctcaaccgcaagatcgacttgccggggtctccgaattaccgccccagcgcatccttagacgacaccgagtccaaccgttgggaaatccacggccagactacctatctgccgcaaggctacccgtcattccgcgcgctctatagcgggccaaacagcctctcaccggcagcacaggccaaggcgacctggagcaacagcctgttcctgaacgcgcgcctctgggaaggcggcgaggtctactacaatccggaattgctgcagggcttcggattgaacgatacggtgggcgctgccggctttcccaatggcgaggcgcagaagtcgaacttcccctacccgcactacaacacgtcgcggctgttcctgcgccagaccttcggtttcggcggcgagcaggaggagctgccaagcggaccaggccagcttgccggaaaggtcgacgtctcgaggctgacgctgcaggcgggcaaatttccagtcgtcgacgtgttcgacggcaacgcctacgccaaggatacgcgcaaggatttcatgaactggtcgctgtgggcgcccggcgcgttcgactattcggccgacaaggtcggtttgacctatggcgtcagcgccgaactcaaccagaagcattgggcattgcgcggcggctatttcctgatggtcgccgagtcgaattcgaaccatttcgacacccgtgcgccagagcgtggccagtatgtgatcgagctcgaaacgcgctattccctgttctcccaacccggaaagctgcgaaccctgggctggctcaccagcgcctacatgggcagcttccgcgaaacgctggacaatcccgcgctcaacctcgacatcacgcagacgcgcaaaggccgcaccaaatacggctacgtcatcaatctcgagcaggcgatcaccgacgacctcggcttgttcgcgcgctggagctggaatgacggccggaccgagaccatgacattcagtgacatcaacggcagcctttccggcggcctctcgatcaaggggacgaaatggggacgcccagacgacgtgatcggtatcggcggcgcggtcaatgcgatctcgcgagactttcgcgactttctcgccgttggcggcctaggtgtgcttgtcggcgatggtgcgctcaactaccggcgcgagcgggtgcttgaaacctattactccctggcgctcagcaaggctttcactttgaccgccgactaccagctcattgtcaatcccgcctacaatgccgatcgtggcccgatctcgatcttctcggggcgcctgcacggggagttttgatgcctgtccggcggcaaagtccgacgctttccgtgcgcagtaataatttggtcgaacaacccgggagttgaccatcagtgcatatgttgggcgcgggtttgcggctatccggcgcggctccaggaagccggggaagtagctgcccttgcgcagcttagggatacgcagctcgacggcgccggcgcaggtctccgagtcacgatcgcgatagccgttgcgttgggccagccgttcggcgctcttctcgccgtagccggcgccggaactgttccgttacccgatccccctgattcatcgtccgtgaagaacgcggatttcaacctgggttgaactgaagtcgagcggtgaactggacgaggatttggcgcagcaagagcgccagccagcggatgagacgccggaagttgtagccggcggcggcgaggaccgcattggtgacgtcgccctggcggtgccagagatagttgcggcccatccggtgttcggatttgagatggccgatgaccggttcggcgaccgagcggcggcgcagctcgcgtttgatctttggcgttacccgtcgcttccggccagagatgaacaccctgaacttgtgttcgggcggcgcattgtggccgcgtgtcggtaagttaaggtgggcgtccactgggacggactgtctatcgttgtgaccgtccaagtctgaccctcggtgctgtgcggattgagcccgcggttgcaagggagcttctccgggcggttgaaccgatggcgattgacgtcgcactcgaagccgagcggatggagcgcaaaaccgaacaccgacgcatcatcgagctggaacttcagcaagcccaatatgaggcttcgctcgcggagcgacgctatgccccctgcgatccaggtaatcggctcatcgccgtacagctggagaagagctgggaagcagtgcttcgtcgcgtcgagtcgtgccagacccgattggctgccgcacaggctgccgatcacgacgttattctgcccgactttgtcggccttgccgatgatctgaatgctgcttggaacgcccccggcgtcaccacgcgcgcccgtcagcagctcttgcgtgccctcatttccgatatcatcgctgatgttgacgagacaacgcgcgaagtcattctgacgatccattggcgcggcggtcagcattcacagctccgcgtccgcaagccgaaggcaggcgagcacggatgccgcacatccgaggaagcgcttgctgtgatgcgagccatggcgacccgatggttggactagaatatcgtcgccttgctaaatcggatggggatgccgaccggccagggcaagacacggaccgcgcaccgcgtcagctcggtgaagagtgaacggcattcatgcgtaccgctcggctgggaagaacggcgaatggctgaccatgtcggaagccgcggcataacttggggtgtcgcatcatcggattcgccgcctgatcaaggatcgcattctgcctgctgagcaagtggtacctggcgcgcctcatcaaattcgatcgtccgatctcgagaccgatgctgtggctaccgcgatctcgcgaacaggtcgcccgtgtcgcacggattccgagaatcaacttccaatgtttccaaacacttgacgaaggggggtacaatgagcatgtcgtcgcaaatccgcgcagcgcgcgttcggccgcattgttggtgaggcagatccggccgtcgtcgatgaatcacgctcggagaccggagccggcgctaccttgcgaaagcgaccgctgcgatcagaccgctgcggtcgctgcggtttcgatgcgagagcgtgatcccctcgcgttcggcggtcgacttggcgatcacgagaccgagacccgttccttcgatccccggagcggccgccctgaagaagcggtcgtagataaacggaatcgcatcctcgacgatgccgggaccttcatcgactgcatcgatcgcgcaatcgccatccgtcttgacgatcctcacctccaccgagtcgtcggacttcgaatagatgatcgcgttatccagcagggtcgcgaggatcttgcggatcgcttcggggttgccctcgacggaggaggggccgtttgcggtcatggccagttggatatttccgctcttcggccaagggatagaagtccgccagcaatgatgtggccaaggcctgcaggtcgaccttctgccggtaacgaagcgaggcgccctccgttctcgccacctcgagaagttggctcgccaggtgcgaggcccttcgtatcccgccgcgcaattcgtcggcgagctctctggtctggtcgggcaggtctccagagatgaggttatccgtctggatctgaagtgcggcgagcgggcgtgcggggctcatgtgccgcgtcggcgacgaagcgtcgctgggcctccagcgcttcctgatatcgagcgacgaacccatctgtcgcgacgatcaggggcgccgcttcctccggaacgccgacgggccgcagcggctcgcgcgcgtcgacgctgcgccggacgatatcaatcgaaagaagccgaagcccgcgcatcgtgcgattgatcgaccagccgatgaccagccaggcgaacggaacggcgaacagaagggagagggcggcaccggtcgccgcatgaagcgcgatctcatggcgggcgcttcaggtctgtgcgacctggacgtcctggcgcgcgtggctccagcgatagacgcgccagtccccgccggcggcggcgacgtcggaaagacctggctgggcctcccatgggatgtcgatctcgggtccggagcggtgaacgaccttgccggatcgatcccagatccggacgacaagatgatcttcgtcttcgctgtccagcaacgggccggcctcgcttcgatcgcccggaccgacgttcaccgcgatttcctgcaactgggcgtcgaggaacttgttcatttcgtagctgacaagcgcgagcgtcgacgccgcggcggcgaggcccacgatcgcgagcatggctgtcccccggacggtgatggtcctgcggagcgaaatcatgacgcggctcttgtgaccatccagccagcgccccgaatgttgcggatgatatccttgccgtacttcttgcgcagaccgtggattgccaagtcgaccgcgttgctctgcacctcttcgctccagccgtagatgcggttttcgatctggctgcgcgaaaggatcgtgcccggcctctccatgagcgcgtacaggaccgcgaactcccgggtggaaagcgtggactcgatcccacggaacgtcacgacataggtggacggatcgagcgtgatctccttgctgcttaccagcaagttcgatcggtcgctgactcggcgcgtgctggcgcgaatgcgggcgagaaggattcggagctcgaacagcttgatgatgtagtcgtccgcgcccaagtcgagcccagcgaccatgtcctcgacctggtcccgcgcggtgatgacgagaatcggaggaacgctgctcgcgcgcgcggccttcaagacttcgtctgatgcccgacgtggcgacgccacaagcgcgagacagaagcaatccttcgcgttggagataaactggcgcccggtgctggctctctccgccacgtctctgcggccggcccgagcgcgggtggaggagccatggtttctggaagagttggaccgcatgcgctccaacggcagacctctgctgcgaccccgcgaccagcgattggtgcgctcggcgagacctgaggagatcgccgagcttgagctgcggcgtggtctggatgaggcgaggggcgaagacctcaagtattgttttgcctttctggtgccgatcgacgccgaactgaactgacaccgccgagtgctggtgccacatgcttgtcgagacgaaggcgacgaggcgcaggatgagaactgtccgagcactgaatcactcccgtagaagtaggccctgtttccttgaaccctgtgcgtagttcatatgatggcagcttaccgatggcgagaagaaagactgtgcagatgggagcgcctcgtttaggcgcggcgagccgtatctccgatcgtgtgcggccgattagcgacgattaccgaaagaccggagggacgctcctgaggtcctgccgctggctggaaatttctttgctcatcctaacagcggcgacttcgggcgcggaggcacagccagcgaccgcgaagatcgtcggactcggcgcaacgcgatgttcgcaattctccagcgacgtgcaatccaatccggcggtccggcgcgattacctcgcctgggctcagggctacatgagcggaatcctggtcggccggccggcaggtacggacaccggactggatctcaatcctccgaccttcggtcttctcacccagctgaagtttctcgaggatcactgcgccggcaatccaagtcaggatttttccgatgcagtcgaagcgctctacgggcggctgcgtaaggaaggtcgcacgtaaagaccgctctgataaccgccatcatcctagcggcactcaaattggtggacttacacgacaatcgaacactggcagcccctccgacgggcagttttgctcgtcgcgttgctcaatctcggctatttcgaagccgagttcgcggtcgcggccgcgatcgggtcggtgtcgcgctctttgctgactcggtcgactttctcgaggatgccttctgattgcgattgccgtcggctggcggccgcgggcgcgtgctccgctaggcatggcgctcgccggtatcctgctcgcccctggcatcgccacaatctggacagtttgggacaaactgactctccccgtcgctcccgctcccacgccgttgacgctaaccggaacgggagccctcgtggtaatccggcgagacagcggctccaaactcgatgtgcttgagaatgcggcccacttcccgcgctgccttgatcggtgctggaaacttctgatcgaactgcgttgtgttccagttcacctctcgggttggatttccttcagccccaggagttgaatttcggcatgccgaacatcggcttccttgcctcgaggacagccgttggtcgtcaagcacgttctgagggcgctttgctttgacgcaggcgcggaaaatgctgtcccatgctcgttcagcagcaattcatatggggcgtttcatgttaaatgcctcaacatctaacggaggacagatgcaatgacacgactttattcccggctcggtgcagcggcgcttggttttggcctcgtggtgggcggcctggagcttcaggcttcgccactttcgaccgtcccgatttcggacggcgacgcaaagctgctgaaggtgcagcatcatgatcctcattacgatcgccggcacgtccgtcggcagcgccaccacagcgatcgtcctcttcatcaggtggttccgccgccggtgatcgacgtgatcccgcaccataaccagccgcggcctcaccaccgccgccgtcatcatgagcatcactagcgaccttgcactttagacccgtaccagtcgcacccacgcggccttggccgcccggtgcggctaaggcaaactaatcacgcgttactccggcactaatttcgagctcgtcgctacctcctctgtggcgtctacctgaagaagcgctaatccaagtcgaaagcggaactgtaatcctgcttgagatcgggattctgctcgctcttgcgcagcacgcagttgccaaccacgagcaaatccagttcgttgcccatgaagcagcggaaagcatcttccggcgcgcagacgatcggctcgccgcgcacgttaaagctggtgttgaccagcaccggacacccggtccgcgccttgaatcgcgtcagcagccgatgaaagcagggattggtctcggcgctgaccgtctggatgcgggcggaataatcgacatgggttaccgcgggaatttccgagcgcgcgatattgagcttgtcgatgccgaacagcgcctgctcctcggcgctcatggcgcgccgcttgtccttcgtcacgtcggcgacgatcagcatgtagggactgtctgaatcgagctcgaaccagtcggcgacgtcctcgcgcagcacggctggcgcgaagggacgaaaactctcgcggtacttcaccttgagattgaggttcttctgcatggtcggcgaacggggatcgccgaggatcgagcgcgcccccagcgagcgggggccgaattccatgcggccctgaaaccaccccaccgcgagctgatcggatagcgcctttgctgttgcctcgatcatgtcgccctcgtccagcacggcaaagcgcgcgccgcaagcggtgagcctccgttcgatctcgctttgcgaaaattccggcccgagaaacgcgccggacattccgtcggtcgcagcgatgttgcgtggcccgctcttgaactgatggaaggccgcaagcgccgcgccgactgcgccgcctgcatcgcccgcagcgggctgaatccagaggcggtcaaatctgccgtcgcgcagcaccttcccattggccacgcaattgagcgccacgccgccggcaaggcagagattgcgcgcaccggtccggctcgcgaggctgcgcgtcagtcgcagcaccgcctcctccagcacggcctgaatcgaggctgcggcatccatatggaacggcgtcagcaattgatccggcgaccgctcgggttgaccgaacagcttcgcgaaccgctcgttggtcatggtgagaccggtgcaataatcgaaataggacatgtcgagccgaaatgatccatccggcttcaggtcgatcaaatgatccagaacgagctgcgcgtatttgggttcaccgtaaggcgccagtcccatcaccttgtgctcaccggaattgaccttgaagccgatgtaactggttacggctgaatagagcaggccgagcgaatggggaaaatgaatctcctggaaaatttcgaggcggttgccatcgcctatcgccgccgaggtcgtcgcccactcgccgacaccgtccatggtcaggaccgcggccttctcgaacggcgacgggtagaaggcggacgcggcgtggctcagatgatgctcggcgaacaacagcttttccgaagcgaaatcctcgtcgagctcccggagcttactccgcaacaggcttttttggaacagcttctccctgagccatagggggattgcgatctggaaggagcggaagccgcgcggcgcgaatgcgatataggtttccagcaggcgttcaaacttcaggaacggcttgtcgtagaacacgacatgatcgatctctgaaagttttgcgccggctgcttccaggcagtagcgaaccgcatggcgcggaaacgaggcatcgtgcttcctacgggtgaaacgctcttcctgcgctgcagcaatgatgtgaccgtcctcgaccagcgccgcggcgctgtcgtggtagaacgcagagataccgagaatgcgcattaccctagaacagcgtgtagatgaacggcgcgaccgcggagcccttcgtcaacaccccaagaccgccgaacaccaccatcatgatcaggatcggcagcagccagaacttcttccgcacgcgcatgaagcgccaaagctcggccagaaaatccatcatcagaactggtctctcattgtttccggcgcaggccccggtacgcgcgtgatccaatagctctccgcgtcgggctcgcgtttcagtcgcagaagatcctcgccgcgcagtcgcacgacaaggccggtcggcaagatcgtaccgtaaaagagaacacccatgacgatcgggttgatgatcttgtgcagaagcaggccgaacttcatccacagccgattgagcgggtgcagcaaggacggacgaatccaggcggcgacgaggagcagaaccgcgacggatagggtccacggccacagctggccgagatgccagcggtttaaaaggctcagaagcgcgagcccacccgccaccacccaaccgaaggtccggtctgatcccggaagcgatgtctcgtcgcgggtgaagctttcatgggttgactgcggcatcagaactggccaatcgccctttttggatatttcaaggtaccttatcaggtgtccgcgacacggtcgcttttttgcctcttcccccggggggcagttgaaagaaatcacggtcctgcaatgttaagccgctcgaagttcatttcggagatattcgatgaagcgctggtgtcgcctcctcggacagggggcgctgctgttcatcacctgggtcgcgatctttgagatcgggttacggttgcagcagtatttcggtccgctggtcgatctcgaaatggcgagcgtcaacctgaattgggaatccgacgtcttgaaccataagccggaaccgaaaaaccagaacctgtgcatttacggcgatctgaccggcttcagctaccagagatcctatgacgcgaacggtgtcaggatcatcgacgatagggcactgctggccgggtgtcgaaaagcagtctcggtcttgttccttggcgattcctttatggaaggctacgacgacgagaacacactgccgtatcacgtcgcaaaatatttcaagaaagagctgggggtttgcctaaagacccacaatgccggttatacctcatattcgccggccatcttcgtgccgcaggcgaagctgctgctgccgattgtgcgtcccgactatatcgtggtggacgtggacgagaccgatctatacgacgacttcgctcgataccgtaagctgattgtccgcaatgggcgcggacaaaatgtcggcgtcaaggcttcacccatcggacacgaatgtagtttcggcttgatggaggctcgcgagcatcccttgtatctgatgcggtttgtggccaaggcctggatgtccctcgtccacatgccagcggtgattaagaaataccgatcggacgagctcgttcttttttcctattcacaggaccatggcgctgatctcgaacagaaatattcagaagcactttcgagtttcaggcagaatctgcaggagctggctgacgtgctaagggactacgccggggacgggagccgggtgctgttcatctttcacccgcatcttgagcacttgaagcccgacgctgagggccgcgtgtggaacaatctcgtaagctctacggtgcacaaaatctgcatcgccaacaactttcttttcttcaatgccaccgcaacattgaagcagcggttcggatcgcaccccgagaatttctattggaggcaaggtgatatgcattttagtcttaacggattggaagaatattccgctgcggtcgcagcgttcatggcctcctctatgatcaaaccgaaggactgaccgtaccatcccatagtttccaactggtcggcgatctcaagaccgcagttggcagcgtctcggttggctggcggctaggctggcgggcgcaatttcgattaataccgactgcactcatgccccggtggtgcgaggcacggtctggcggaggacattatcacggaggtgtctcgctttcgggaatttgccgtcatcgctcgcaactcatcttcttctacaaaggcaagccgctcgacgtggcgcaggtcgccccagacctccgggtacgacgtaggttcgtcgtttcgcgcgaagagcgagcgatctcggcaaggccgatctgcgtgcgctgcagggccttagcctcatcccaaggcgcacgcatccaggccgccaccgcgctgagctcgacggcgaacttcctcaaggcgcatggccggcgcgcagcagggcgaacccaacttcgcagcgatcgaggcattgaatgccgcagggggtttatcagaaggtgatcgcgatcatgggccggcagatcgacggcgaaggcacggcggcggcgcgatggggctgtagctgatccggcccggctccgctctgcgagctacgccagggcgctggctcgccacgcgtagccgatgacgactcgccacgcgtagccgaagacgaagagtggtgcgtcatttcgaataaaattgcgaattccgccgcctggaagaagcggcgcaatgccgaccgcgcccacgtcaaatgaatgttcacaccgaacaggctcgcgccaaaatggcgcgcgcctatccaaagccctcagccaaatcaggccaatttcaaccagtcaaacgtctgctgtcgagggtactgggagtatcaggcggaactattcatccagaagcgcgttctccaacgggattctcttagcgaacacggactttactcatgacaaagaccagaaaatgcgtgcaatgggccgccgttgcagctcttttggtgagcgccggcatgtttagcgacgtccgaccggcgaccgcgcaacacggtggcggcggtgggcacgggggcggtgggcacggcggcggcttcggaggccacggcgggttcgggggccatggcggtttcggcggtcacctcggtcacgggggttttggctttggcctatatggcttgggctatggtggctacggctacccctattatggtggttacgcctactatggaggtggcgactgttatctcgtgcggcggcgcgttgtgggaccacatggacgggtctatttccggcgcgtagaggtgtgccgttgagatcaggcgttgcgcagccaccaaaactcattcccggtgacgttcaccgacggggtagaagtccacgggatccgtcagcccaaatcgccgccgcctgacggccctggccgtcaccaaaacttggccataactcggagaaaggaaagatagttcggaaaaggtgatcaccggcaccgactgagcaagaccacgccatcgctgccggccccatgggcatcgcttcgttacggatcagatcatagcgatgccgatggcacagatgccaactggcggacgaggccactccttacatcttgtgaccgggcggcatgcctttcatatctcccatattcccggacgatggcttactttttttggctttcttgcctttcttttgcgcgacggagatcaccaagggttcccctcggctgagccatgggtcggctgaagcgggggaggccggggcggccgaagcgaagtcgccgcccgcaagcatcacaccggtcgcaacaagaagagctaatttgcgcatgagatcctctcgatgttgtcgcagggtagtccgaccaaataagtcgcggcccttgaacaagttcccgtgccggtgatccgaactccgaagcgcgggtcaggaaacggagacgcgctcccaagatctcttcgttagtcgaacatatgaatgatgcgtcggctggacggatcgcggagcggaagggggtagtgtcgcgccgactggcgcctggaagcccggttcttggtgcgactgatggtgctgaccataaacaaataggcgcgatggatcttcgcaatcgtccccaccaccagcatctcaacttcggcttccatggcttgatgtaagccattgtggaccttgtcccgggggtgccgattgggctctgcacccgcataacctgcaaggcctcggtccatgccggacgtttccttcctgtccgagatcgaaacgacgggtgccggtgcgcaaccgcggttaccctctcaccatcgacgtagctctcggcgacagggacgaccctgattcacctgtcgcgactgatccgctgcagcggaagctcgatgtcacggcgcagaacgtggcaaacctcgatacggctggatttcgggcgcgggaactgtcgtttcgtgaatacctcaagccggaaaaaggtttgaacgaagcggggcagcgagagcggccgctgtcgctgtccgacccacgatttcaattcaccgacaattcccaaggcgccactgaattaactggcaacccgctcgatgttgccatcaatggccagaggtatttcgtcgtacagaccgagcgaggcgagcgcttcacgcgaaacggcgcattcacgattgatggcggtggccgtctggttacgctggaaggacaacctatcctcggccaaaacggcccactgcaggtcccacctaaccagcgggagttggagatctcgcctactggaattctcagcacgaagcaaggcttcctcctcggtcagctccgcgtggttcgcttcgaacggccgcagttacttcaacccatcggcgggactctattcaggtccgacgacccaccttctgacatcgctccgccggctatcaccctcacgagcggcgccttggagaaatccaatgtgcagagcacgcgcgaaatgagccgcctcgcggagattacccgaacctacgagatggtcggcagattgctcaagagctcgcaagatgccgacgacatcaacaagttggcaaatgttcccgaatagctcaagcggagccgtgaatcatcgcgctgtgagcagtatggtgcatgccgcgtcggtcggcaccggagcacagctgcgctgatcgtcacgctgttatcggccagattacctgcctggatgatttcctcgcacagcaatgaagcagctcccgtaacggggtattgccgcggctcgcgcttgcgaaccgctcaaaacatcttcaggtctagtcctatcgccaaagacctgaattctatgggttcgtggcgatagagccgagcattaaagtggcgttttcaatcattctgacgatgcggatggcgacgcgcctgcgacaaggcgcggaggcagccggcctcgtcacccacctcgtcagctttccgcgcgcgatccaacgcggcccgatcgtgggccgcatcgatctttgcctgcgcgtcggcctcggtcgcggacctgatcgtgggctggcgatgcatctgcgcacgcactgactggtgtacggaccaaccccgcgccgcaaggtcggcaaccgcgccttcgtaggccgcgatctcctgggcgcactggccggcgtgcgccgatccggaaactggaagcgcgagcgcaattgcaccaaatagatgggcgagtcgcattgtcatccaacacctcgcattcagcggttaagtcaagcaaacgctttctcaacggtcctcagcagcacagccggcgacttgtcgtggcgggtcacgcccgggatcgggcgatcgatcttcatgagctgatagaccgccatctgcgccgcgcgcaccgaatattcgacggtgaacacgacgtcgtcgggaatctccacgaactggctgacgaaggcgagattgaccgaattcttcggcaccggtagcggccggtcggtcttcgcacgcggcatgaacatgctggtgatgtagggcatgcggcaggggatgcagatcgcgtcctcgaacaccgtgcgatcgaaattcagatgcccgcagagctcgttcaggatttcggcgccgctgcaatccgacatcggcttggcgacgaaattgccgacgcggtcgggatgcagcgcgtagccccagaacacctggacgttcttcggctgtcctgcaaaatgcggctgatgatagagcaccaccgacatcagccagttggaatccttgaaggtgacgaggccgccggtgcccgccttgttaccggagaacgcctccatctgatcgaagaagcggctgtcgcggcaggtgacggtgaaggacagccaannnnnnnnnnaatcgaggtattgaacgcggccgggttaccgaactcgggacggcccttggcgatcttctcccacagcgcccagccctggctgtcaaccttggtcagatgcgtcggcggctcggtcatcgagccgaggctcgaggcgtccgtcatcgaggcattctggaagaagacgaggtcgccatcctcgaggcggacgttggaggtacggccgtcgcggtcgagcaccagctgacgcacgcgcaggcgctcgccttctgcctcgaacgccatgtcggtgacacgtgtgtcctgtacgaactgcaccccgtgccgcttcagccagtcgatcaagggccgcacgatcgcgtcgtattgattgtagaccgtgcgcttgacgccggcgagcgtctcgatgcgcggaaactcgttcatgaagcggtgcaggtagcgcttcagctcgaccgcgctgtgccagggctggaaggcgaaggtggtctgccacatgtaccagaagttcgactcaaggaatggcggcgacagccagtcggtaatgcggctggagccgagcttctcttccgacgtctccaccagccgcaagagctcgagccggtcgcgcgcggaaaagcccatatgggagacgtcgaccttgaagcggttgcgatcgacgagacgtgcgcgggaatgcgccttgttctcctcgttgaaggcgaccgtctcgtcacgcacgctcacgcccgggcgctcgaccgacgggatcgacgacaagaggtcccaggtgcattcgtagtgatcagtggtcagcatgcggccgccgcgcagcgaataggcgccgttcggcaattgggcaccgtcaaggctgccgccgaacactcccagcgcgtcgtagatgatgatgtcgcgcccgggaacggcagcatcgcgaatcaggaatgctgcacccgcgagcgacccgatgccaccaccaatgaaatataccttcaccgcttgcctcgatcgccgttcagagttttgtcttgaaatactgtatccgaatgtggtgtcggagcttgcgttggatcaaggttcgtcggttattcggaatatcggggcgaactcgaagctcccaccacgtgcaaattgcggggtatcgtggggctcctctcgatcgtgcgcgcctcgttgccgttccactcgcccaggtgcgcggatgacgaggtgccaactcgatcaccgaactgccggtttgcaaagcaacaatcacaggagagcgagcgaggttcgaatctattgatcaagcgctcgctgtattggccacatcaggaacgttttgcgccggcggttgaaacaggctcgggtagagaaagggccgcgacctccatctgggccggaaccgtcgcgctccagccaagctcgcgctcaatgcgcgagcgcaatgcgtccgacgcagcgggctcgccatgggtgatgaatgtcatgctcggggcggacttgccggtcctcagccacgccatgatttcctcggcatccgcgtgagccgacagcgcgctgatattcctgacctcggctcggaccggaatgtcctcaccgtggatccggatggctctcgcacccgccatcatcgccggcccgcgcgtccctttggcctgatagccggcaaacagaaccgtgcttttcggatcggccacaaagcgcttgaggtggtgcaggacgcgtccgccggtcgccatcccgctcgcggatatgatgaccttgggtatcgtcatggcgctcaatcgcttcgaatcttccacgctgcggatgtaggtcgccaccgcacacgaactgcggcaatcgggttctgacagtttatggtcccttcgatgatgacaaaagatctcactggcattaaccgccatcgggctgtcgagaaaaatagggacgtgtgcgagctttccggccgccttcaggcgttcgaagtagaacaacaggctctgcacccgcccgaccgcaaaggctggtacgacgaccgttccgccccgccgaaccgtacgattgacaatgtcgtcgagttcgctctgcgggtcggcttgcggatgccggcgatcgccataggttgattcgacgacgacatattgcgaatcgggacgcgcctcagggtcgaccatcaaggggtcattgaaccgcccgagatcgccagaaaacaggacacttaccccgcctcattcgatttggagcgatgccgcacccaaaatgtgtccggcgcgcaagagacgcagctgcgcgccgccgggcaacgtttgagtctgatgaaagggaatggtccacagctgccgcagcgcagcttcggcatcctcaaccgtgtagaggggaagagctggcttgtggcgagaaaatccgtggcgattggcaaaatgcgcatcgctctcctggaggtgcccagcatcgcgcaacaggatctcgcagaggtcggcggttgcttcactgcacaggacatcccctcgaaagccgcccttgaccagcacgggaagatagccgcagtgatcgagatgggcgtgggtcagcattacggctgaaatgcttgccggatcgaccggaaattgcgcccagtttgcctcgcggcgttctcgttcgccttggaataacccgcagtcgatcagtagtcgttgcgatccgttttccaaaagatatttggatcccgtgaccgtaccagcggcgccgagaaagctcaatttgatggtcacgtaacggtctccttcagaactccgaaccttcttggatcgtgatcgggctgtttttgtcggcgcgccaagtcttgcgctgccatcgaaacaaattcagcctgcattaaagcgcccgtcccgcacaagtcgtcaggcgcaccggttgcgtgcaccgacattggcatgagtcgtcgaacgcgcagggcagcgtcaggaccaagcgatccaaatgaggatacggtggacaagctgcgattcctcctgctctcaatcttgcttgaggcgaaatgtatccggcttgcccttcgtatttgttgagctggatcaagcggaaagccatctggtcgcctaatctgcccgacaacggccgtcctccttcagcacggccccgtcgcattcaagcttggcaccaaaatgtcagagaagccgtccgtttcgcctgctcttcagacgatctcctcaccgcagcaggccgtcgtcgcggacgcgctatctcggggctatgatcgtctgagagcttaccttgtccgtcggcttggaaatgcggccgacgccgaggatgttctgcatggagtcattcttcgcgcgatggagaaagccgaggcgcttcgcgatgaaggcgccgtccaaggctggctcagccgcatcgtcgcgtctgctgttgctgatcaccagcgccgccaggcattgcggcgccgcaatgagaacgagcttctgctgcaacagggttcgccggaaccgattggcgatgaaagcgaggccgcggcgtgcgagtgcgttcacctgattttgcctgcgctcaacacggaatatgcgcaagtgatccgccggattgacctggaggccgaggacaggcttgcggcagcagccgcccttgggctgacagtcaatgcgctgacggtgcggctgcatcgcgcacgcggccagctcaggcagcgattgctcgagatgtgccgctcctgccgcgaggactctttcctgcggtgcggttgctagaagatcagctttcgacgaactctcgaatgtgcaggcacttcgctgcgacttaaccccactccctgtggggcgtcggattggtggccgcgatgtgccaagcgttgaaagaacccaggaaaccgcagggcgagataggcatacaagatgtacttgatgagcttgcccgagaaaattgccagggagacgtggagaaccggcaggcggtagattccagcgaccgccaacagggcaagtttgggcacaggcagcggaagcgccatcacggcgaatatcgccaccgtcccatattgcgagagaaagacagttgcctgtcgccaagcctgggtgagcgcaaggtccggatagcttttggccaggagactccacccgagatgatggaatgcaaaataaaggccggtggccgcaagggcgctgcccgccgcagcccagacggcaattccgacccacgcgcgtcgtgaggccagcgtgcccgcaacgacgataagctcgaccggcaggctcatcgtgactgtcgcggcaaacgagaccgcaccaaggagcggtgcgaacgagctgcggtgagcctgcttcacgacgtaggtgagggcgcgatttgaaatggcccgacctatcacgatgcaaaatatccttcagatttcgtcgctgaccgcatcagttcagagcagttttcgatgctcgcattcgaacgctcttcgccaatccaagcgtggaacttgttacagatttgtcacgatcccttgttgagttagatcaacctgggtgggcgcgagccgctctaaccttcaattcgctccagggccgtcggccccctcaattcatgaatagggaaatcaccatgtcaaaccacttctcgaagatcgcaatccctgcagccatcgccgcaacgatcgctctctcctttggcgccgcactggctcagtcccaacagaccggcacccaaccgacccaagcccaacccggccagtcctcgggggcagcgaccgaccaaccgaacactgggaccaattccatgccgatgcagggcatggagcacggtcgcatgatgcgcgaccagggtcagaaaatgatgcacaacggccagtcccagactggcaatcagccgtcgaccacgcaagctcagcccggccagccagggacagcaaccgatcaacagacgaccggaaccacttccacgccgcaaggcatggagcacggccgcatgatgcgggaccagggccagaagatgatgcagaatgagaagaacatggagcatggccagatggggactcccccctgcggaccggggcagacccaaacccagacgacccagaactccggctgcaaatagcgcatcggctccggcctgtctcggcgaaacccgagacgggccggggcgaaagcagccacaatgaccgacgataatttctcgcaaaggctcctgtccgaccacggttcgcaccgcgaggctgcggcagccggcgcagcgcagagctcagcatcgtacatcctgcccgccctcgaccaagacttcttgttgggcgattcgatgcgcggcgtgcggtttctgctcgaatacgcgaaggccgaagaagcgttgcgcaactggggcgtacgatcgaccatcgtggtctttggatcagcgcgcgttcgacagaacgggcagggaagacacgccgactggtatgaacaagctcgccaattcgggttgatagcgtcgcaacgtggcggcgcgctgaccgacaatggcggcgtgcgcgacaacgtgattgcgaccggcggcggtcccggcttgatggaagcggccaatcgcggcgcgcacgacgctggcgccccctcgatcggcttcaatatcagacttccgcgggagcaagcgccaaacggttactcgactcccgaactgaccttccaattccactattttgcgatgcgcaagatgcatttggcaatgcgcgccaacgccttggtcgcctttcccggcggctttggcacgttcgacgaactctttgaaattctcacgctccgtcagaccggaaagtcgccgccaatcccgatcgtcctgtttgacgagaagtactggcgcgcggcggtcaacttcgatgcgctgatcgccagtggcaccgtcgacaagtcggactgcacgctgtttcgttttgccgaaaatgccgaggagatttggaataagttgctgtcttgcgggttggacgtgcctggactgtcgtgcgcggcgtcgcgttaccgtcacctgctcgatggccaatcgccaacttcggccgcgacagtcgcccgcccctcacctaggtccgagtaggcgttaggcatcccattagccgctcttacgattaggacaggagatttagtcatgtggaatcgacgtaaagttctgggatcgtgcttggtgttggccgcatccagcggcatcgctcgggctcaggcgcctggcatgtcgggaatgggcatgccgggcatgggacaggggccaatgacccgagagagctgcatcgatatttgcatcaagtcgcaccaaatgtgccttgagaccgcgcgatattgtttcgaaaagggcggcgaccacgttgcgcccacgcatttggcgctgctgctcgactgcgccgagatgtgccagatgacggccaactcgctaatgcgcagatcgccgcagcacggagcgatttgcggcgcctgtgcgcaactgtgcgacgcctgtgccaaggattgcgaggctatcactggagacgatcaaatggcgcactgcgcctcgctctgtcgtgactgtgctcgtgattgtagaggcatggtgaacatgccgatctgattttggagacggcgaagcccgggtggatgggatagtgctccccggcctgggccttcccgaccggctcgccgcgaacgctcgatcgagaatcccggcgatgaaaggcgctgttcctcttccgcaatcgagtcggccgatgatggcgtgttcggccatcgcgatttgctcggactcgtcgtgagcagcgagcaaacagcaccagcagcctatcgttgcgcactgtaataactagcgacccttagcgtctttgtcagcgagttggctcgcctaattgcctcactcgagaaacagtttcgtgtcgctttggctcttgcggggcatttagcgcaaaggtagcatttgcggggaggcaacgcggcaatggaagcacggaacaaccatacaacgctgctggaccatcttcgccgtcaaggcgtgtcgcggcgcgattttttgaactggtgcgcctacacggcttcgattcttgccctcccgccgagtgcaagccaggcgatcgcacaagcgcttgcgaccaagcctcgccccagcgtcatctggctctccgtccaggaatgcaccggctgcagcgagtcgattctgcgatcgttcgagccgacgctcgaaagcctgatgttcgatcagttctctctcgactatcatcatgtgctgcaggcggccgcaggaaacgccgccgaacaggcgcgcgacagggcgattgagcaaaacttcggcaaatacgtgcttgtggttgacggcggaattccgcttgatcgggatggatattactcgacaaccggcggaaagagcggacgcgatctcgtgcggggtgcagcaaaaggagcggcgctcatcattgcggtcggcacttgcgccacttatggggggatccctgcagcctcgcccaacccgaccggagcaggcggagttcacgatgccctgcgcgagctcatcgacgccaaggacgtcgcggctcccatcatcaacgttccggggtgtccgccgatcccggaggtgatgaccggagttgtggtttattttctcacgtatgggaaaccgcctgatctcgacaatctgggacgcccccttccgtttttcgggcggaccgttcacgacgattgtccgagactgcccttcttcaatcaggggctgttcgccaagagctttgatgatgaaggcgcgcagaagggcttttgcctgaaagatcttggttgcaagggaccgacgacgttcaacgcatgcacgacggtgaagtggaaccagaagaccagcttcccgatgttctcgggccacggctgcctcggctgtgcccaaccgaaattctgggatcgcgagggcggcttctatggcaagctcttctaagaaggccggcgaaaagtccacggctgcggccaagaccgcgcccggctcgcagcctcggcggctcatcgtcgaccccgttacgcgaatcgaggggcaccttcggatcgaagcggagacggatgctcagggcgtgatcacccgcgcatccagctcaggcacgatggtgcgcggcatcgaattgatcctgaagggacgtgatcccagggatgcgtgggcgtttacacagcgtttctgcggcgtctgcacggtcgtccacagcatcgcctcgatccgggctgtcgaatacgcactcggctatgtgatcccggagaatgcgcagctcatccgcaatctgatgattgccgcgcaatatgtgcatgaccacgtcatgcatttctaccatctgcatgcgctcgattgggtcgacgtggtttccgctctcaaggcagatccggccgcgacttccagactgcagatgagcttgagcccttggccgaacaactcgccggcgtatttcggcggagttcagcagaagttgaaaggttttgtggagggtggccagcttggaatcttcgcgaatgggtactggggtcatcccgagtacaaacttccgccggaggtgaatctgctcgcggtcgcgcactatctggaggcgttggcctggcagcgcgacgtggtcaagattcacgccatcttcggcgggaaaaacccccaccccaattttgtcgtcggcggtgtcccctgtgcgatttctgaaacctcgcatgcaaccgcggtgaatgcagaaaatctgcgtctcgtcggccaggtcatcagcaagatgcgggagttcgtcgaccaggtctacttgcccgacacgctcgcgatcgccggattctacaaggactggacaacgcgaggcgaaggcgtcggcaatttcctgtcctatggtgaatttccgaccggggtaggtgccgccgagcgagcgacattgcagtttcccgccggggtcatcatcaacagggacctttcgaagatacagccggtcgactttgaggatccgaccgagattcaggaattcgtcgcccattcctggtacagctattcggcaggcaagcaggtcggtttgcacccctacgacggcgaaacgaagctcgattatacgggaccgaagcccccttacgagcagctcgatattgaccagtcctattcatggatcaagtcgcctcgatggaagggtctgccggtcgaagtcgggccgcttgcgcgtgttctgattctctatgcaagcggagaggtgcggacgcgaggcctcgtcgaccacagcctcggacggttgggacttccgatctccgccctgttctctacgctcggccgcgtcgctgcccgcaccatcgagaccaaattgatcgccgacatgatgccgggcatgtacgatgcgctgatggccaacatcacgcgtggcgatcttcgcaccttcgatgatgtgctgttcgatcccacgacctggccgaagaaaacccgcggcgtgggcatgatggaagcgcctcgcggcgcactggctcattggctcacgatcgaggagggacggatcggcaactatcaggccgtcgtccccagcacttggaatgccggcccccgcgatgccgcagggcgagaggggccctacgaggcggcgttacgcggccacaagttacaggatgcttcccgtcccttggagatcttgcgcacgatccacagtttcgatccgtgtctggcctgcgccgttcatgtcgtcgaccctaacggcgaagaactggttcgcgtgaaggtgctctaatgctgaactcgaacaagaccgcgaggaaagaccggcagcggcgacggagcgtcttctcatcggtcgccatattcgtcctgactctgcttggttggcaaatgtcccctgtcctcgcccgccctgggaatggctatggcgacttgatcgacaactattgcatcgaacgtggccgcttgcgggtccgcgcgcaccagccgcattgcgcgatgtgccaccaccttggcaccttcgacacgtctcccgaacatcgaatcgaaccgaactggaacgagttcatcagaggacgaacaaccggcgatttcggcttcttctgtcctgggggggccgatagcacccaaacggcgcgcgtgcccggagagaagttgcctccggggcctaaaagcgcaacggcagaagcctctgagaactcgacaagcccaatgggtatgccgccgggcccaagtccatctctgccgacgccggagggcgcgcaacccaatactgcgccctccgagagtcaaccgaaggcggatgcgcagccagcgccgtcagacgaggagctgtctcggaagatggcggccttacatgatgcggtcggaatcacgacggcacaggagccggcttggctcgaccttctcgacgcagccgctcgcgcgctgcagcgtccttccggtcctgccgaagctgccaccaaggatccggtgacgttgctcaaggttcatgagctgcaatcatccaaacacgtggcgagcatgcgcgccgttgggctcgcgcttgcgcgcctcaatgcgaacctgtcggatcaacagcgccagaggcttgtcgaggggctcagaccgatcctggcctccatcccaccgtagatcgtcggagaactatcatgtgcctcgccatccccatgcgggtggatagaatcgacggattcctcgcgcaatgctccgtcaagggcgtttctcgcgaggtgaacctgttcctgctacaggaccaggacgtctcggtcggtgaccacgtcctggttcacctgggctatgcgatccagctcatcgacgagcgggaggccaagtccacctgggaagtcttcgacgccatgctggccgcaggggacagccactcgcatgcatgagctttcggtgtgctgggctctgatttccgaagtcgagcgcctcgcgcaggaggcgggcgaggacagcattgcgcatatcgcgatccgggtcggtgagctctcgggtacggacccgggcctgcttcttcgcgcgttcgaggtcgcgcgctcgggcacgaaggcggaacatgcgtatctcacgatcgagctctgcgatccgcgtgtcaaatgcacggagtgcggcctggaaaatgtgacacgtcccaatcgcttgctttgcgcgttctgcggttcatttcgggtaaaggtcatcggcggcgacgaattgtcgagcgcggcggtcgaatttgccgcaaccggcttccccggcacctcggatccaccagtagccggcggaccagggaaactgaacacggagagggaggcgccgcatgtgtagccattgcggctgcgccgccaataacaagcaccggcttcatctgccacataggggttcggaagatggcgcaattgcgtcggtacacgggcttgcccacgaggaaggcgtgatccgcaatattctcgccgccaacgatcggatcgccagccacaaccggcagcatttcgatgagagcggtctgcttgcgatcaatttgatgtcctcgcccggatccggcaaaacctcgcttctcgaagcaacaattgatgctctcggccccgaactcggtttcgccgtcatcgagggcgaccttgaaaccgagaacgatgctgcccggatccgagcaaagggggtccccgccctccagattacgaccggcggcgcctgtcatctcgatgcgaccatggtgcatcacgggctccatgagctcgatctgaacggcgtcgacgttttgttcattgagaatgtgggcaatctggtatgccccgcttcattcgatcttggagcgcactgcaatgttacgctcttgtcggccacggaaggtgacgacaagccggccaaatatccgatcatcttccgcaagagcgatctcgtgatgctcacgaaatcggatcttttgccgtacctggacaactttcaggtggatcgagcagcagcaacgctcaaggcatcaggttacgacggtccgcttctgagaacgtcggctgccaagtcggccgatgtgggcgaatggctggcgtggctccgccagcggcttgccgatcatcgcgccgggctattcctcaacccaaccacctcggttgaagcaggagaggcttgatgagctcgcctgctcgcatttggctggaccggatcaaggacctcccgctcgatcggccggttcgaatcctcaacgtctgcggtggccacgagcggacgattgcgacctcaggcatcagaagcctgcttccacccgcggtgcagctgattccgggacccggatgcccggtttgcgtctgcccggaagaggatgtcttccatgctatccaactgtcgctgacaaattccgtcatcctggttgcgttcggcgatatgctgcgcgtccccgtcaatggaccgaaggcccagccgcgctcccttgagcaggcaatcgcgctcggcgcggatgttcgccccatcgcgagtccgagcgaagctgccgctattgccagggagaatccgcgcaagacggtggttttcttcgtcgccggctttgaaaccacgcttgctcccgtcgcggcgctgatcgcgatgggccttccgccgaatcttaagctcctgatttccgggcggctgacatggccagcggtcgccatgctccttcagtccgaagagccgggatttgatgctttgatcgcgccggggcacgtcgcaaccgtcatgggccccgaggaatgggagtttgtggttcgcggtcaccacatgcccaccgcgatcgcgggcttcacggctgacgccttgctggcagccacctattcgacgcttcggcaacggctcgaaggccggtactttcttgacaactgctatcccaagagcgtcaggcccggcggcaacgccgtcgcacgccgctatcttaccgaaaccctggaggtgacggacgccgcctggcgcggcatcggcgtcatcccccggtccggtttccgcctcaggcccgaatatgccgaccacgatgcaaggatagaatttccgttggacgaagcaacagaacgccctcgtcgcggcgaaatgccaccaggttgcgattgcgcgcgggtcattctcggcaaagtcctgccaaccgattgccgattgtacggttctggctgcgcgcccgaatcgccgataggtccttgcatggtgtcggacgaaggggcctgccaggtgtggtggactgccggctaccgcagcggccgccatgcctttgggggcggcggcgcggtccgcgcagcaaggtgagcgccgatgccttccgcaccgcatgccgctggtccaccagtcactgtcttaggcatcggtaacgtgctcctcggtgatgagggggtaggcgttcatgtgatccggtacctgcgcgactggccgcaaccgagcgcaaacctggcgatcgtcgacggcgggacgctgagcttcaatctgctgccgatcattgagaccgccggtcgtctcatcgtcatcgatgctgcgatgatcggagatgaggccggggcggttcgctgcctggttggtgacgagctcgacgcgttcctcggcacctcgaagcataccgcgcacgagatcgggctaaaggaactgttcgatatggcccggatggaggaccttctgccgcgccggcgcgcgctgatcggtattcatcctcaatgcatcgattggggcgaaggcctgagcgaccgagtcgcgacagcggtgccgttggctgccggattggtgctgcgcctggctcgcaaatggatctgcgccgatcaggtctcggtgcccggatgaacaggaatgagaccatcgaaacgcgcagcgagacacggctgttcgaaatcgtcggtcgtgtccagggtgtcggatttcgaccgttcgtgaagcgtctcgcggacgctcacgagatcgtgggctgggtgaagaacgaggcaagccacgtgtccgtgcttgccagcggcgagcctgacgcgctcgaccgctttgcggccggcctgatcgcccaaaggccaccgttggcgcggccgatgattaggtcggtcagcccgcgaccaccagccgattgttgcgaattttcgatcctcgaaagcaaacctggttcgacccgcgatgcggagcttccgcccgatttgttcctctgcgacgactgtctcgccgagatagatgatccatcagagcgcaggtaccgctatcctttcaccaattgcacccaatgcggcccgcgatacaccattatcaccgccctgccctacgaccgccccaacacctcgatggcgggcttcgaactgtgccgaaactgccggcacgagtttgagaaccagcaggaccgccggtttcacgcgcagcctttggcgtgtcccgaatgcggcccgaaattggtcttcaggaaagcgaatggcgaggagatctccggcagcggacaagcgcttgccgccgctgtcgaggccttgagctacggcctgacgctggccgttcgcggtatcggcgggtaccacctgatatgtgatgcgacgaatgagaccgcggtgctcaggcttcgcaacaggaagggacggcctgacaagccgcttgccgtgatggtgccgggcggcaacaaccggcatcgatttgccagaacgatcgctgatcttgatgaaatcgaagaagcggccctgtgcgaccccgttcggcccatcgtgctggtgcggcggcgcgcggacgcgccgatcgcggccgccgttgcgcctggccttggcgaggtcgggttgatgttgccctatagccccttgcaccacctgatcttgagcgaatttgctggtgtgctggtcgcaacgagcggcaacatcagcggcgaacccgtgatcaccgatccggacgaagccgagaagcggctcgctcgctgctgcgacgccttcctgcaccatgatcgtcctatccagcgccctgccgacgatccggtctggcgggtgatgggcgggcgggccagatcgatcaggcttggccgcggctcggcacccatcaccctgcacaactcttatagggcggctgacgccgtgctcgcctgcggagggcaactcaaggccacggtggcgctcgggctaggcgaccgggtcgtcgtgtctccacacattggggacatgggatccttgcgctcacagacaacgctggaacaggttgccgacgatcttcaaagactttatgcgaccgatgcaacatgcatccttcacgacgcgcatccggatttcacgacgacacggtgggccctgcggcaagacgtgcccacaaccgggatccagcaccatgtagcccatgcttctgcgctggccggggagcatggttgcagggagaaaatgctggtcttcacctgggacggtctggggcttgggtccgacggcaccttgtggggcggcgagaccttgttcggctcgcccggacattggcagagggtcggcagcctgcgtccgtttcggctcatcggcggcgaccgcgttgcactcgagccgtggcgcagcgcgtacacgctggcgctggaggcccatcatcactgggaatgcgttcatacggatgcagccgcctaccgccgcgcatgggctgccggggccggcatgatgtccagctcggtcggtcgattgttcgatgccgccgcagcaatggtgggcctcatcgagcactgcagttacgatggccaggcgccggcgctggttgagagcatgtcagatgaagtcagcatcgagcccgctctcccggtccgccccgaaggcaagatccggcggatcgactggactccacttgttccaatgctcgtggattcgtccttgtccgttcgcgagcggcttggacgcttccacggttcgttgtctgcaaccctggttcgcgaggccctgcatcatggcgcggccaatcgcaccaatatcatcggactgacaggcggcgtgttccagaacaagctgctcaccgagcatgcggcggccgctctgaccagccacggcttccaggttctcttgcatgaacgcataccgatgaatgacggtggactgagttatggccaggtcgttgaattttctgcgcggaaagccccatgaaacctggtgacgacaagcactgctcgcgcgacctgagccgcatttcgctggcgcacggcaatggcggcagaaggatgcgtgagctgattgaaggggtcttccgccgacatctccacaacgacctgttcgatacaaatgccgatgcagcgatcttaccgatgctgcccgccggcagttttccggccctgacctcggacggttttacggtggatccgctggagtttccaggtggcgacatcggaagtctggccatcaatggcaccgtcaatgacctcgcagtgtcgggggcagagccgctttacatcgcgctgaactgcttcatcgaagagggcttcgaacgggagcgcctcgagcgcctggtcgcatccatggccgccgcggcgcgggcctcctcggtcaaggtggtgacgggcgacaccaaagtcctccgcaacggcgagggtggcgggctttacctggcgacgaccggactggggtttcgcaaccctgccgtcgcccttggcctcgatcagatcctccccggcgaccgcatcattgtcagcggctcgatcggcgatcatggaacggccgtcctgctggcccgcaagcaatttggtctttcggggacgctgcagtcggactgcgccagtgttcttccgcttgctagatgcgccctaatgcagccgggtatccgattcatgcgcgacccgacccgcggcggactggcaagcgtcgcccacgagatcgttcgatcaacggccaaaagcgtgcgcctgctcgagcgcaagattccgctgcgcggtgaggtgcaggccgtctgcgatatgctcggctataatccgctctatctggcttgtgagggcaggatcgtggctgtcgctgacccgccttcagccgaacggctggtgcaggcttggcgcgacctgccgggcggagaagacgcagcagaaatcggcgtcgtgggcgaagacgggccttacgtcgtgttggaaacggagctcggcggcgaacggttggtcgaggagctcgattccgacccgctgccacgaatctgctgagcgtcgcgaatcttgagccaaagctctttcatggcctgttcaatctcggcggtctcgcacttcagtagttcagggacataggcaatttcgataaattcgccgacaagatcaccgtcggtgttgtactgctgaccccaccacacgccggccacggccgtttccgaaaagatgcatgatcccacgcctctaaaacttgcctccacctgcccgttgccaagaaagtcgcgcagcgcagcggtagcgcctgcaggcaatggaagccgtcggagatcgatgcgaaaagtcgtccccgatttgacgatctccgccaactttgcgctcacttccgagagcagcgcagcgatgattggatcagaaacaaaattgctgttgccagtcattatcaacgacctcaaggactcgcccgacccgcatggatcggtagcgcgtccggcttggccaatgccccctttgcgcgcgtttgaccccacgcttcgttgcttgcgcattccattcaaacttggccgtcggcggtgacgcccaacatggccatagccattcaccgaaggcaggggcgcgacacgacaacgacaaaaactcccccacggcgcgcccaacgctaagagcgcgagctttgcacatctcctgtccagacgctattgtcgcattcgggggctgggtaatctcgcaggatgacgccggagggcggggagcagacctggctcggtatcgcgatccgggggcttcaatgagcattgcgcgtacgtcaattcggttgctggccgtggctgtcgtggcggtttgctctgttcacgccggagcggcgcagacactcgaccaggcgctggctcaggcctaccgcaacaacgagacgctcaatgcagaacgcgccaatttgcgcgccacggacgaagaggtgccccaggcgctttccggttaccgcccgcgcatcgaagcgactgcggacggtggttctcgctacctcaacgaaaagggggccgatggcgcgcagcaaagctcgaccaccacgccgcgcggcgtcggggtgacggcgacacagtcgatcttcaacggattccagacagcaaaccggctgcgtgccgccgagaaccaggtgcttgccggccgcgaggcgctccgcgttatggagcagaccgtgctggtggatgccgccaccgcctatatggatgtgctgcgcgatgccgcgatccttgaactgcagaaacgcaatctcgacttgctaggtgagcaactgaatctggtccgtaaccggcaagcgagcggtgacttaaccactgccgacgtggcgcaagtggaagctcgccttgccgcggcgcggacggccgtgctcgcggcacaggcgacgtacaactcgtcgcgcgccacattcacgcgcataatcggcagcgagcccggcaaattgacgcccggccaacctgtggaccgctttgctcctgcgacgctcgaggccgccatcgcacttgcgcgcacccaacacccggccgttcttgccgccatgtacggcgtcgacatcgcccttcttcagaccaaaattgccgaaggggcgctgtacccgatggtgacgctggaaggcagtgtgaaacgccgctgggatgtcatgcccgaccagaatctgatatttccggcgacgagcaccgatgcgtcgatcatcagccgggtggtcattcccctctatcaggggggtagcgagtacgccaagatccgccaatcgaaggaaatgaccggtcagaaacgactgtcgcttgaagccgtacgcaagctcgcacgggccaccgtcgtgcaggcgtggagcacagtggctgccacgagggcgcaggtggattcggcgcaagctcaggtgaaggccgccgagttcgcactggaatccgttcggcgcgagttcggcgccggccagcgcagcacactcgaactgctcacggttcagcaagagctgctgaatgcgcggatcgctctcgtcctaactcagcgagagcgggtgacgtcctcctacgcgctgctcgcagccattggccggctcgctcccgacgttctcggattgccgacagaatcctatgatccgtccgtgcactatcaccaagtcagggattcctggttcggggtacgcacgcccgatggccgctgatgccgtttccgactgcacatcgctacggacccgtgagagaagttatttgttccggacccaattcggcgcgctcgagtgataccggctcggcggagctgccgatttccgcggaaagccagctgatcccgatgttgggctatgccaaccgttttgccaaccacgcggcgatgatcatcccagcgagtgccagcgcgctcgcgatgccgaacatggcttcatcgccccctttctccggcttaaggtattcccgaaaagcaagctcccgggcgcgaaacccggtcgtgtttgcgttcgcctacattttgtggccgtcacatccagtttgcgctgacgcgcaatcaagcgcgacaggtgaatcagcgtcgtctcaccctccgcgatcgcgaatcaacggaagaatagttaagctcaggccggttattgagtgggagctgtcgcccctctggcggagacggccaatgtcctctctccatgacgcgaacgattaaccaagtgttaaccaaatgttggctatgcacagaatctcaatattttcttaaggaattcggatgacgggagctgaagtcatcgacgctgcgagggatgcgcttatgaccgttgcgttggtatcagcgccattgatgatcatcgggacaatcgttggcgttctcgtgtctttgctccaagcgctcacgcagatccaggaacagacgctgatctacgttcccaaaatcatcgcgaccttcctaactttgctgatagccctgccgtttatgtcggaccaaagccatcgccagtttctgcgcatgatggcccaaatcatggcgtcggcaaactgacgcgccatcgcgaaggaaatgaccggctgtcgcttgaagccgtgcgcaagctcgcacgcgccaccatcgtacaggcctggagcacggtgactgcaacgagggcggcagttggattcggcgcaagttcaggtgaaggcggccgagttcgcactcaaatccgtccgacgcaagttcggcgcctgccagcgcagtacgctcgagctgctcacggttcagcaggagctgctgaatgcgcggatcgctcttgtcatgactcagcgggagcgggtgacgtcctcctacgtgctgctcgcggcccttggccggctcgctcctggcgttcttggattggcgacagaatcctatgatctgtcagtacactatcaccaggtcagggattcctggttcggggtacgcacgnnnnnnnnnnnnnnnnnnnnnnnnnnnnnnnnnnnnnnnnnnnnnnnnnnnnnnnnnnnnnnnnnnnnnnnnnnnngcctgaccaaggctggtcaccgcaatccatcggcccaaatcctcgccctggtgctcgcctgcaatcagagaggtccagtaggtgataatcggggcggctacacccgcagccatcgcaatcgcgccgacgccaagcgcgagtgctggcgcagttgtcgcggccgacgcgagcgcaagcgccagactaagcatgcccagcgcgggcgcgatcaaccagcgcgtcgccttcgacggcacaagcggcgagaacacgagtatttgggcgagcagcatcacggcgctgcactcggcgagcatcaatccgatggtcaacccggaggtgcttgagccaagattgccgcgcaaggccaggtgaacgtcaaacgcagcgaccgaacccgcaacaatcgccgccagcacaagcaggctttgggacgtccgcggttcatcggtaccgcggagcccgattgtattggcaggtgaactgggttcgctcctcgtgacgggaacagtcctcgcgatcacgcaagcgctaaccagcgcaagcacgattggccaaaacagcggagctccggcctcaagttgtgcttgcttcgaactcaggatggacaaggtgctgccgagcagcggaccaaccataaagccgatcatggttgcagctccgatccaggcaaagcgccgcgcacgccacccgtcgtcgggcgaccagtcaccaacggtggcgagggctacgggtgtgattgccgctgccgaaaccccagccagcgctcgtgccgtgtaaagaaacaacaagttgcctgcaagttcgaacagcatcaggctggcggaaaatcccgcaagccccaggacgagcaccggacgacggccccagccgtccgagatccttccaaggaagggagcggaaacgaaaatggcggccgtgtaagccgccgccatgagacctgtatgccgggatatcgtcgcggggtcgtcgaggccggacacggccgcaattcgcgacggcaagtttggcagaatgatgctgaacgccagagcggtcgcaaaggcggcgagtaccaatgcccccctggttgtgagcggcaatccgcggtcggaaagactgtctgacatcttgcggtctcgttcaactgagagaccttaaacagctgcacaatcgataaacaagcctacgcgtgctggttggatgcagtgacgccttacctactatagaagtgatcatcccttgagcatcatgattatctagcgggcattggtctggacgcaattcgctcagaagatgacgcggtttctggtacgatgtggaacgcgcgtctccgtgcggtgctcgccggttcagctgacacattcggagggggcgcggaattctcgcgaatttcgtggtaacccgcaggggtaaggcaaccggaagctcaaatgctgctgtgcggtggaagaccgcacgtaccctcaacgaggaggctcggggccagaagccctcgagccgcctccgccaaaagagccggcttaccggactattctcctcctgaactgatcagcatttggatcgttcgaatgcgaccttccgggggatgacgcgaacggcaggcggctcactcagccgcgctccgcaatgggtccgcacgaagtgaaagctgcaccggggtcggattctgtaagatgtccagcacggggcaatgacggtcgacgatttctttcaggcgcgccaactcggcttcgggagccggactgtccaaaattacctcggcttcaatgatttgataacccggccgaacgtccccttcgacgtcgaacaagccgcgcaagtcaatcctgccggaaagctgaaccgaaacgccattgaggggaatgccgagcgcgtcggcatagaggcggtaggtgatttcctgacaagagcccagggcagccaaaatgtactccactgggttcggccctgtgtcctgcccgccgaggcccgccggctcgtcgacctggacgctgaactggcgaatcgcgacggcgctgtcaacgccgtctccgagacgggattgcgctcggaaggtcgctaacgcttgggcagggtcagcgctcagcgcggcctgcgcgctcgagaacacctccttgaacttgaatgccatttattcctcgacgggttgtgacggtccgaaaagcaatggttgtacagatcgaacgacctatcaatcggtccgcacagaaaacgacgggcgtcatctgaatcaagagctcacggccatttcgtcctattgatgcgatcggagaaagacaaagtccgctgtccgggcaacgaagaccaagaactcgaattctccaccaatcccgcgtgatcaatcacgatggcgatcccattcttctaggtttgagacagatcaacacacgtcacgggcttgcatggcaacctaatggtcctgctggggaccggaacaggtggcgaagctgcgacgggagatcgacatggcatacctggagaccgaggtgatagcggcgcaccggcacattcgccgccgcacggtggcatatgtgcttctcggcactttgctcgcgagttatttatcctatccgtatgtgaccctgtatcggcttgatcgggcactggaagccagcgatactcgcgtggttgcagaaatgatcgactggccgagcgttcggacgcagctgaaggcggacgttacgacgtcgctcgcaacgcaggcctatggcgcaagcgggccggaagcgattggcgccgctttcgcgctggccttaagtccatatgtattcgatcccgtagccgaccgcgtcatctcgccgtccggactcatcgcctggtattcggatgcacgaagatcgggccgatcgagcacgttgtgggaggcaacgagctacgcgttcttccgggccccgacgcgcttcttagtggcactgaggatgaacgagccgcaatatccgaatatcgaattcgagatgaaattgacgggtttaagatggcaggtcgaccacctggtctggccgcgcgcgagaggtatcgctgttcccgggtccggcgcatccggtccgacgacagaatgatcaaacgtcgcgccgcttatgagcgcgcttggtcttgcagcagccctgcgaagcttgcgagggagatgaaggcgttacaactgatggcggcgtagacgaggggctcttaactcgagcgccagtcttagccgtgccttgttgagccgccgtctcaccgaggccaggcgggtgataaattcattgagctcgtcgccctcgaagcccgcgaaaacaatgtcgccggcggcttgctgctgctcgtcgtcgcgggcctagctgcttgagcgccttgtgtccgaggtcgtgcccagctggtggtgtagctggagcgcagccgctcgcgacgcgcgcctcagattgcgccgtagcgagcgagctgcttggcaagtcgtcaccgaggatcgcgaggccgacgcggctcacagacgcgagccgaggcctcgatagggacgcccgacctgagaacgtcacccaagtccgttttgacgccgtagatcagtggaggtatttccgacgtctagcgacgaactgtcaaacgccctatcagtctcacagacgaaggaggggcggtcgtacgcaaacaccgaacactctgtcggtgattctgtggtgggtctaaactctcgaaagtctcccgttcgggacggcaggcgcgattttgttgtcttggaatcttgacctacatcaagcggttgcaaggtgggggagatatcaatcataagatcaggttcgcgccggcaacttttgatgatcgccagctggccggagcgcacgcataagaaggagcttccaggcggcggtggttgcgaatgtgcaggccgcgagcgataagttacgcgacgtcgcggtggatcgcgcgcgcacgtttctgatgctgatggtgcttctgcaccactccgtgattgcctacacctatttcggtcataccgacgctaagtcgtggatcggctttgatatcgtcgtgctcgccaccgacagcttcttcatggcgacgttctttttcctgtcaggcctgttcgtatggccgagcctcgcccacaaagagctgcaggtcttcctgcgcgaccggctatttcggcttggcctgccgtttgtgatcggcgtactcaccatcattccgattgcgtatttcgcgatcgaactgcgccggcgcccagacgcgagctttctttccttctggtggaacacaatcacagtcgggccatggccaagcggaccgatctggttcatctgggtgctgctcgcttttgacttggcagcttgtttcctgtttcatctctcacccaaactgctcgatcctatcaaccggctggcggtgcgcggctataggcgaccgaccgaattcttcattctggtgcttgctgttacggcggtcgtctacattccgatgcggctctattttggagcgggacgctggttgagattggaccgctctcgctgcaggccagccgcgttctactatatcctgcctacttcctcatcggggcgggcgtgggcgccgcgaacctcgatcgcggtctgctaagtgcggatggccggctcgccaaaagcggccggggctggatcgtcgcagcgctcgtcccctactgtctgttgtgggtgcttatttacgtcaagcttgaaatcctcggaaatccggtatggctgccggattggtatgaggcgagctacggcctgttcttcgtgacgttcagtgcggccattctatttgcaatcttcggctactttctgaggttcaaacgcacgggctttagcgtgctagattggatgcaggcacatgcctatggcatgtttctggtgcactacccgatcgtgctctggatccaatactggctgtttgacttcgatgtccctgcgatcgccaaggccctgaccgcattcgtgttcacagttctgttgagctggggtgtaacggcggccttgcgaacaatcccgggagcgaagcgggtgctttagtttcaccttgaggagcgggagacaacggcgttcaggctgatgagcacgcacgcggtctcggcttgggcatatacgcatacaagagcaccatcgctctccagcatgacctggcggcttctgagggtcccgtaataccggcctggcctgccgtaattactcaacgagaacagcccgttccttgacttgaccgtcctcgcggcgagaagtcgaggcttacaactcgagcgtcactcttagctttgccgtctcaagccgccgttcgagcaatgtcagttgggcgacaagtttgttgagcccggcctcttcaaagtccgtgaacacggaatcggtcaccgcttgatgcctatcggcctcgcgagccagcaacttgagcgctctgtctgacaagaagagccggacgacccggccgtccatgcgacaaggtcgtcgtcgcaccagcttgatcttttcgagcagattggattgggttgtaacaaaggacccattcacatgcaaaatctccgcaaccgttttaaccgggacaccgctcccctcgtccagatcggaaatcgctatcaggatcatccattgagatctgctgatcccgagcgctcgtgcccatactcgctggatctcctccaaataggcgtaaatcgccgtgatctcccacgtgaggcgattgatcgcttcgctgtagcgcttctcggttatattcttggtcgaggacacgctttcgtcatcccgtggtgtattctagcggacaaatctgatggacgccgtgccgcctgtccgccgtcaatcgtccccttgatctaggtccttggtgctgctgacctgtgagcgtgttggcgacgcgcaagcagaggccaggatttcctatctgaagacgtcagtgcatactcacacccgctccttccttgcggtccttgaatgaattcgtcttgtggcactggaagcattgattgatttgcgtgcttccgtgcccacccatgcgcatcgaagcgaccgcaaagtgttcggtgtaatggctcggcggggcctgatggcattgcgcacagatctttgacgtgggagagggatgcagaaaagcagcgacgcgccagttgtccgtatcatggcagcttgcgcaattgcgtcccagaagctcctgatgcgggtcttcgctgctgtggcagctcgcacaatccagagcatttctctccaccccaggtgagacggaaactccgagaaaatccgccaagtccttgaccatctgacgggtcgctcccgcatgacccgccgctccgctcgtaaggtgcgagccgatacgcacaaggctcgcgtgatccattcgggtcggccggccggccgcttgatgttcgctatggcagccgcggcaatcctggaccgtggcgtggaaggcagtcggctgcttggccagatccgcggcggcgttggcgtgacatttgatgcaggtctgagcctcaacaccgcgtgcaggcgtatggcacgcttcgcacttgccgttcaagaacgcgtgctcctcggagaggggaccgggctggaaggcttcttgccatcccggaatcgacgccgatccggtgcgataaagcatcgcaatggcggtcccgccgacaagcagccctgcgacgatcagcagcaggtaaaggccgttgagcggcttcacgacagccaccgtaggccgtagtagatttctcctgcgatgtgcaggacgagcaaggtgtacatgaggattgcggccacgacatgcgccacgatccagcgcatggacactctcttcaagatctcgcgcgagccgatggcgtattcgagatcggcgataccttcgacgacctgcagcatcgagacgttctgcagggctggcgcgctgatattggcggcagcggcgtcctcaaggacttggcgctcggcaacggcttccgctgcctgattgtaggtcgcgcgaagtgtgccgaggtgcgactccgcctccttcagctcgagagacgtctgcggtaggtaatatcggcctacgaatccggtcgccaccacgatcaacatgacgacgaggagcgcgatgccgagttggctctggtatttgtggccggtgtgcaagatggccagaaacgcgccgaagacaccagcatagacgtgaaacgtcagcaacgcgcgcagtgacacgatccgggtcacccatcgcttgatccaagccgtatatttgaccagcggatagatcagaagagaaaccatcaaagtggcggcggccaccccgagcacgaagcccatcaagcttccggcgaaccgcggcgcggtgtggaataagaacgccggcaccaggaagaggatgacggagagcactgcctcggcgatctgccgttcggtctgattcatctcaagcctcgacaaccagattgccgacggacttggcctggcaggcgagaatgatgttgttggatttgtcctcgggcgtcagggcatcgtccacctccatcgtcacctggccttcgagcaatttcgtcttgcaggtcccgcaaaccccgacgcggcaggcgtaatcgatcgacactccattggactcggcgacctcgagcacggtcttgtctggcggtagggctacgactttgtcggccttggcaaaccgaatggttgccgttgccggtccgatggcaagcgcggcgggcggcgcgcccgccgccgcagcggccggctcggatgaaaccacctgcgtcacccccggcgggggcacggcaccgcgtgccggtccgaacgcctcggtcttgacctgttccgtcggcaccccgaccgtcgctaggagcttcttcatggcctccatcatgccgggaggaccgcagagatggatgcgccgtttgatgatgtccgggaccgactgggtcaggagctccttggtcacgtggccttgcggccccatccaggaggtgccctctgcacgcgccatggtcgcgatcacgtgcaggttcggcatgcggcgttgcagatactcgagctcgtcgcgaaagatgaagtgctcggtggtctggacgccatagaccagaaagatgtcgccccgccaggcggtatcgaacagatagcgtatggcagccatcaaaggggtgattcccaccccgccaccgatcaggacgacgctgtctgcttcctgtcctctgaacgtaaacgcgccaaagggcgcagcgacttcaatcagatcgccttgcttgatcttgtcatgcatgtaatccgagaagatgcccggctcctcccgcttgatggtcgtttccacataggcggtctgtgcggccgacgacgcaattgtatatgagcgccgcacgagcttgccatcaatctccgcggtataggtaaggaactgtcccggcacgaaggtgaagggaattggcccgccgtctggattcttcagccgaaaggttttcacatcttttgtttcgcgaaagatgccggcgacctgtagcttgcctttccagggcgaggatgcggcggcaggacttgccgccgcaactgccgagctcgacgcgcccgcttcacccgcccgggtcgatggaggcgtacccggagatgcggcaggaggtggtgcggcaggaggcggcgtggtgggcggcggcgcacttggcggtgccggcgtagcgaccctgccagatgccgtggcgagagcgggagcgctcgtcaatctttgcaccaacgcgttggcacggcgcagacgcaggacatacacgagaatcatggccgcggtgaatgtcgccagcaccgccattgtgacgacatgaaaccacgacagtccaagccccgcatcgtgcgaagctgtcagcgcgggaagattcaattgtgtcctgaaccaatccagcgcgatctgctgtgggggctttccttccgaaagcgcccgaagcgtggttgccgcgctcttggcctggttcagcgcatcgcgaagccgcgaggtggcctgctccgcgccggcggaatcagccctcgcattggcctggcgaagcgccgcttcggcgctggcgatgtcttcggtggcggtgttgagctccgcacgcgcttgagattcgatgcgctggcgctgctcggctgtcaggctcggcatatccatcagcgacggataaaactccttgcgcggacggccgcccatcatttctcccatcccgcccatgccgccgtggcccataccgcccggagatgcgccccccatttctcccgtcccttccctcggcgggcccatagagggcattgaagaggcaggcggcgatcccatgctgccgagcgccgcagggcccgttggcgccgacgcattaggatgatgtgactcgtggcctccttccatctgcgcatcggcgtggaaggcggacaggctcacgatcgtggccgccgcgatcagggccaatcttgaacggcgacgttgagatgcgaacggcacgaaagaacctcccgaattcctgttatcagagagcatcacctgacagaaaacaaccccgggggcttgtgatcatgatgaggttcttgtcaccttcctgaaagtgagagccggtgaccgcccggcagcagatcgacacttgcttgcaaatcgccgacctgcgcaacctgcgcagacacatcgaagcccgagctcccgctgcagaagtttcagggaattggccatgcacggctcctacagctgcaatgcgtcttggtcacaatgaagcggattgggtcccccctgattgacctgcatcaaacttgataggccggatgtccgacaaactgctgcaaagccatccaatcatcgaactcatgcaatgcaacatgcttgtgaacggaacgtttgccctccgtcgccagaccgtcaatcaaagcatccagccgtgataaccgctcaagatcacctggacgcgctcgcaaaggaagcggcggtttcaactgccccgcggcgccggaccaaccactgggaaccggacccgcatttcgatgcgcccggcgcgccggggatacccccgacctggacgagcagctcaaaagacgtggtcggctgctcgctcgggcccgcccggctttggttcacggctggttatggcatcatcaacgaagtctactggccgaggatcgacattccgcagattcgggacctcggcttcatcggcgccgacgaccagggattttgggtcgaggtcaagcggatgggtcaatatcagctgcgatcggtcgcaccaggcgttcccgcctacgagatcacccattcccattcgcggttcagcttgcggcttcgaatcacgcccgacccgctgcgcgatgtgcttgtgatcgaatgtcgccttgagagtgacgatccggcgttgcgaatctatgtgctggttgccccccatctcggcgccaccggctatggcaatcgcgccgtcatcgccgaacatcgcggacggcgctttctgtcggcggaacgggcgccgtttgcgatggcccttgctgccgtggacgaacaccagcaggacgcgctcatgagagcgagcgcggggtatgtcggcgccagcgatggttggcaggattttgcccacaatggcaggatggcgtgggagtatccggcggccggccccggtaacgtcgcgctgttggctgagttgcgaccattcagcgtgctcgcgttggccttcgcaagcagccagggtgcggccgcgacattggccgtgtcatcactgatgcagccgttcgatcgcgttttggacgcgcaaagcgccgattggagcgcctggcaccgcagctgcgatgaatgttgcgcccgaccggtgggcgctccggctcatttgcaggatcagtttgttacatccgtcacggttttgcgcacacatctcgataagacctacccgggcgcgatggtggcgagcctgagcgtgccctggggcgacacgggcaacgagcggagcggttatcatttggtctggcctcgcgatctcgtcgagtgcgccacggcgctacttgccttcggaggggaggcggaagcgcgcaacaccctgcgctacctgatcgcaacacaaaatgtggaaggacactggcagcaaaaccaatggttgggcggcgaaccctattggcgcggggtccaactcgacgaagcggcgtatccggttctcttggccgctctgctcgccgaccgggatgccttaggaggaatcgagccccacgacatgatccgtcgcgcgctcggctatatcgcccgggtcggtccctcgacggagcaggaccgctgggaagaaaatagcggactgaacgcgttcacccttgccacctgcatcgcggcgcttgtcgcgggcggctcgctgctcgagcctacggcgcgccagtgggcgacggcgctggcagacttctggaacgcccatctggaagactggctcaccgcctgcggctccgatctggcaaaacagttcgccattgccggctattatgtccgcacggcgccgcgatcagtgctttccgaaggccaggcggcgctcgatgaactcgtgcccattcgcaaccgaagcgatggggtgcgaatgcaggcgagcgaacaagtcagcacggacttcttgcgcctggtccgctttggtctcagggacgccgctgatccgctggtcctggatacgctcaaggtggtggaccggctcttgagggtggaaacaccctccggttcggtctggcgccgctataacggcgatggctacggtgagtacgacgatggccggccgtatgatggcgccggcagaggccggccctggccgctgctggccggggaacgaggtcattacgcggtgagcgccggcgatgatcccttgccgatgctcgagacgatggccgcgtcagccagccccggtggcatgatccccgaacagatctgggacgcgtcgccagttcctgagcggcgactgtatcccggccgcccaaccgggtcggcgatgcccctcgcgtgggcgcatgcggaatttgtcaagcttgccgtctcccgcaaccacggtcggccattcgaccgtccggaggccgtctggaagcgatacggtggaaggaagaagatgtccccgtacgcgttctggtggccccacgcgcaaatccggtccttggccgcgggccgtcgcctggtcattgccctgcctcgggccggaatggtgcactgcggcgtgaatggatggcgagaggtccgcgatctcgacgcactcgatagcggtctcggcttctgggtggcggaactcgacaccagcgggatgaacagcggcgaaagcatcgatttcaccatccgctggcaggaggatggttgggaacgggtcgaccattgcatcgatgtcgtatctgctggcgaggaagtgtgagggcatttcggccgtggcctcgccaacctgtttctcgacaatacggcagccgccatccaggacctacagattggggtacgggcgcggtcgaccggcgccaacgctctccgaccgagatgctcgcaaagccccaagaaggtgctgagcaagactccgagcggcggctttgcgaggctcagttttatgtcgccgattacgggatccaccgaggcgctacaaaggaggctttggacatcatgaagcgagttgtttcgcgctgccgctcttttgcccttgtctacggccccgcacgggcggagatcagcttggcgcggcactgacgcgttgctcgttaccttgcaaaaagcagagtgcacaccccgagataggaaccaaattcgccgcgaggtgagtccagaacattgccggcaatccgtttccctcaaggcggagttggcgcgcgatgcggccaagctccggcccaagaacccaggggcggctatttgcccatattcatcggtttcgacgccgacgcaggtgcggccgtagagccgggcatcggcaccatccccagcaccatcttgcgctgatcatcggtcaggagtttggcggcctcgcccacggcgcgaataaagcccagcctttggtccgccttcaacttttcgacctcgcgaatcttcacctcgaccgtcgcggcatccggctggtctgccgccgtcagcaaccagagggcctgctctgcttcgtcgatcttccgctgctgatttgactggtcgacgagggcgcgctgcttgacatcgttgaggccggtcctctgctgggtggaaaggccgagcttatcggcatattcgaggtaaaatcccgtcgcgccgacgtgatagatatgcgatgagccgggaaaccccggcaggctggtttgcatcgacatgcccgatgcaccggccgagccagatccgggcgcctgccccatcgatcccatgcagcaaccgccgcccatgccgccggacgaagcgccggacatccccccatacccccctgacgggcttcccgacattccacccatgccggacatcgagttgttggattggcctcccatcgagcccatttccttgtcgtccatcatcgccatgcgaacggacggcggtgccgcgaatacagacgttacgaccagttgcgacgacagcacgcccacgagggcgaccgcggcgagccggcacgtcattgccggggcggatagcggattgtttcgacgactaaggttcatttctggtcctcctgatgctcatgtcatgttgctgtcttttggtgaaagacgtttgatctaaaacaaagtcggtggtcaaaatgcgtgtcaacctccaaaacaggtggcggcacttcaacgacaaatggccgcgatggactgtaatgattccgctattcgagcgtctatcgagtggttggtccttggcatcaaaggggagacgggatgggagcgcggcggaaggcgcatgattcggttcgacgtgggcggccgaccaaacccggaagtcgggctacgctcggcgccgaccccgctccacgtagccgtcccaagatcctgttcgtcacctccgaatttgccgactacgtaaaggtgggtggccttggcgaagtatccgcggcgctgccccgcacgctccgaaacaagtgcgatatgcgcgtcttgctcccaggttatcgcgatgtcgtcagccaactacaggcagtcgagatcgttggacgtctgccgtcctgcggcgacatcccgggctgcgatcttgcacgcagcatcacgggcgaccttcttccggtttatgtgctgctctgtccgcagcttttcgagcgcgacggcggtctctacggggacgcaacgggggccgactggaaggacaatgatctccgttttgcgaggctgggccttgccgccgcacaaatcgcatccggcgcaggcgatccaaactgggtaccggacctgctgcatctcaacgactggacctcggcgctggcgcccgcctatctcgcctggagcggccgatcgacaccgagcgtgctgaccatccataatcttgcgcatcgcggcttgttttcgcggcatcgcttggatcggctcggcattcctcaggcagcattcgacatcaatggcgtcgagttctgtggtgatatttcctttctcaaagcgggcatcttttacgcatcccatattacgaccgtaagttcgacctatgcgcgagaaatcgtgacgcctgagcatggctgcggcttgcacgggctgctcagaggaaagctcgatcaggggcgcttgaccggcatcatcaacggcatcgacgaaagctgggaccctctgacggacccgcacttggcgcgaccgttcagtccagatgactggaagggaaaggacgtcaatgcgcaagcgctaaggaggaccttcggcttggcggtgtcgcgcggcccgctgtttgcgatcgtctcgcggctggtccaccagaaaggtctcgatattgcaatcgaagccatcgagacgatcgtgcggcagggcggccagatcgtcgtcaccggcaagggcgaaagcgaggtcgagcagtcactctgccagatggccaagcgatatccgggcaagctcggcatcaagattggatacgaggaaaagactgcgcggcagatgctggcgggaagcgactttctgctgatgccctcgcgcttcgagccatgcggattgacgcagatgtacgcgcaacgcttcggctcgttgcccgttgcccatcgaaccggggggctcgccgacacgattcaggacggcgtcaccggcctgcttttcggtgacctctcccttggcagcttcctgggagcgatctaccgctcgctcgacatctatcattcacctcggcggctgcgggagatgcggacggccgcgatggcgcgccccgccggctggaatgatgccgcggcaaactatgcgaacatctacgattcaaccctctcggtcgcctgaggcggcatgccggccacattgccagaaaaataaccgcgcaggttgcataccgagccgaaccgctcattgcgcgcgcgatgccgccagccctgaaccagatcagataggcgactcaccctaacgccgaggacacacgccctcagcggcgtcggaaagtttgcgtgcaatttcccgcatcaacaaaccatgattccagccgttgccgtcgcttttggcgaaattccgagcgcgatggaacgcgtgggtctcggccgcgtcatcaccgacgcggatcaccacgtccggacggaaagggcagaccgcggtggcgcgctcgtcaacagcgcgttgcgaaccgctcattgcgcgcgcgatgttgcgcgtctgctggctgatgtcgttgcggcgctgtccggacgcgaaggcatgcagttggtctctcatatagacctcggactgcccctccagccaggggcttcccgcctggttatctatctaggctgccggcggcacgagccgcaggggtgcgatgccgtgcagcggggctgccgtgcattgacgcgcgcacccgagcggaagtccagcaaccgtgtgtagatcacgctcgcatcctggcccgctagatacgttatcccgtcgcgatgccagcctgagacgtgggttggcctcgagcgcgcgcctccccgtcgggcggggcctgtcagccatatgagaggaacccgcgataagtcccgctcgagcaagccggagcacgttctgttcatccactgccagccgggctcctaacgcgccaccaagttcggcaagctttgagaactctgatgactacatccggtgaggtcgatacgggataccgtttgcgacctgcagttctcttacatactgcacgattgacgtgatctgctgctcactgacctggggttgcggcggcatgttgccgtagggccaatggtgctgacgcacgccgcgctgggccgcgaagaagaaggcggcatcggagtgatggccgggattgtagatctcgtgaaccagcggcgggcctttgtcggttcccgcggctttgaggccgtggcaggcagcgcaattcgcctcgaaaagcaccttcccacttcgcccgatggcggagagctctggctcgttcacattgacaatgtagcccttagccctttcggcgggccccagcgattgccacaccgcgacgccaagcccagcggccagcacggcaagaaccaggtatttaggcgcgttcgcggccaagctcattgccttggacacctcttacgttatggatctcggggccgcacgccagggcggtaaacgcccgaggagcggggatgatctcttggcatgaagggttcatttgatcttcgacagttggagcagcgatcacatcagatccgctcgccaatttacagaattgtctttcgcagattctgggatttcgggcaccacattgcttaggccgacttccgtttggtcagatccagcaacgctcgccgcgctattgcttcgagatcgcccagcgtggttttcccggcgctcgccgcttcgatcaaatgctccgcaatgtatttgcggctttcatgatccccgccatgcttggacaagtcccggcagacgtcctcgagcaccacgttcatgttagtctgagtgcgcttgtcgaactcgctcatcggatatctcctagcccttggcgcctggcgatttggactttacggaagaggttttgcggcgacggcccgacgttccaagccggaggtgatgccgagtgctcaaggagcgccgtgcgcggctaaccatggcgataccctccgcgggactcctgacccaagatcctgctgagcttcggaataaaaccaggcacctcggctgcatatctcacatatgcgtcgccaaactctcttctcgcatcctgctcctcggtccgtgccagcctgacgtacatcactgtgagcaccggaaacatggcgagcgtaaggatggtcggccattgcagcaggaaaccgaacatcaccaggatgaatccaacatattgcgggtgccgcacataactgtaaggcccggtcgtggcgagagaccgcgcccgctgcgcatcgtagagcaccttccaggcggcggagatcagaatgaaccccccgccgatgaacacgaagctcaggatatgaaatggacccgcatggggattggccttccagccgaacatcatctccaggaggtgaccggcgtcatgggagaaccagtcgatatcaggaaatcgcgactgcagccaccccgaaaagaagtagatcgtcagcggaaagccgtacatctccgcgaacagtgccaccagaaaggcactgaaggcgctgaacgagcgccagtccctcggcgtctgcggcttgaaaaaggtataggcaaagaaaatgaagatggccgcgttgacgatcacaaggctccacaggccataggcaggtgcggcgtcgctcatgacgtccccctctggtcgtcctgttggtcttgtctcccgtgatgaccgtgcccgccgtgcatgaacagatgcataagcgggcaggccaacaatgggagccaaaccagaaggccgaccacgtgcgcccggtgttcggtaaagagcaacccgccggcgataagcagaaacccgatcagcacgagtgcggccttggatttcacggacatgctctctcgcgtatgctcccgatgatcggaatggtcttgcaccgccatgacctgaactcctggacatccaagcggaaagtagacaacaagttggcacaaacctttttgatcgagatcaatgggatcttgggcagaggataccgcgcggcaagcgtgaagcgccattccaatgtctggactgacggacgattcgatccgctcagttccgtgtcatcggagacttcgggcctccccggtatctccagacgcggctgctcgcctctggggctggcgcgacgaagaagccaggcgtcctggggactgaagcaaacgcagaactccatccaccttgcgggacggatgggccataggcgccctgcctggcctcgcttggccaataccgcttgtccgaaatcgtagctcctgcgtatgcgttgggacacccacaccagcagcagcaacattgcaccgaaggtttgttttgacataacccggctcctggtcattcgacgagaaagcttgagatctgcctcattgaggagttcggaagaaagcgcgggttggttacaggctcacgccgacgtgaaacggcgaagcctgggttacctgcgcataacttggggcccaagatcgcgcctgctacggtgcagagcacaatcgtgccaccgcgccagattgcgacaaaagcaacgagtcgtcggtgcaatgaagagcataagcgatggcgctgatgccgcccaaacaaggccggcaaacgcgcccgtccggacaaggttggtcggggccgctgttcgcaccgcagcgatgacggcgtcgaaagatgttgcaagcctgcgctcaggcttgcgttgatctggggacgatagccagagagcgcccgtcacacattctcgtcggtcgcgcgctggcgcgcccgcgctgcattcaactgcggattcgactggtaggcgttcacgagtgcgtccgaaagggtttccgcgccggcagggacggccgtaaaagaggaaaatcgacgcggtgaaggaaaatattcgccgctccgagtgcgtcgaaaagtcaatactcgatcctcgcatgttcatcccggcctcggcgtcacctatagttctgacgccgacccaccggggcaattccctgccggagggcgggaagataatttccggccaagtgcctgcagacctgttgatgcatggccttcgattgactcagatcaactcggaatcatcaaattggcgacatcgtttgtcttcggcacccatgctccaattcgcacccatgctccaattcagaggcgcaaacttgatatctgacgtagtgggtcggctgcaatgaggcgaccatgaagaccaacgaagggctgttcattcttggaatattggcaacaagttacccgcttgttttcgattgcgctcaatcgacggcgttggcactcgcaagttcacctaaccgtgaagctcctttcgatcccgctcggatcgaccgtctgccgcccgacatccgacgtgcagctctccgcatgtgccgaaagcggccaactgcggccgaacactttgtaacttatctcgacaattcgaggcttgtcaggttgcatttcgagcacttctattgtgaaggcaggccagggctttgtagaagtgcggcaaactgcctccaccaggaatttgttgcttcgggttctggttatcggcttgtcaggagctactacggtcgatcccatcatgattgatgcggccccctatgatggtcaggcagggagcggcacagcgaccttggcgacgccatgctggaatggattctgcgcatggtaggtcaatggttgctctctttgaataaaaggcggcgaggaaccttagtgccgttcatgtagtctattggcgtccgccttgattgcgttgatgggctcgcatcgacatgaggtggaggtgcttggaagccccctagggtaaggccggtctggatcaagctcgtgcgtcagccaagttcattccaagtcgaacctcgcgcacagacaatcctactcaccgcggatatgtcgccggtccgagcaagcgctggcagcagcgctgcggctgtcgcgagcggagataattccgcgcgtcttcattctcggcctccgtcttattgctcattatgcctatatcattcggccggctccggaatacgtacccttttggttgtcgcttgcagtcgcacagggcgttgagggccaccgggctcgctcaaaggcaagccaaagcccttgatcagtccgaagatcgccgggatcacaatcagcgtcagcagcgtcgaggagaccattccgccgatca

SEQ ID NO: 194 - DNA, 22846 bp, Bradyrhizobium colbertium
ggtggggccggcatgcggccgagcaccggcaatttcgcggcgggccccgcggcccgtcccggcggcggcagcttcgtaggcggtttggcatcccgtcccggagtcgcaccgtcctatagcgggtctcgccacgttgcgacgggcggcaactggcatggaggcggcggccgccactggcaccgtcatcatcgccgcggcggcttctggcccggcttcgcggctggcgccgcaatcggaggaatcggctcgtacgcttattacggcagcggctacggctattacgatgatccctattactacggctattatgacgaaccgtcggttgcggtggtgcaggacggcggtggcgactccgtggcctattgctcccggcgcttcaagtcctacgacccggcttcgggcacctatctcggctatgacggcaagcggcatccctgcccgtaagcggatcgccgacgcatgaggcgagaggcgtcgcagcgatgcggcgcctctttcgcgttgaggtgtatgtagcctgttttcggttccctcatgctccgtgccccgcgaggctgcgtacgaaatgcaaatgcacctttatgcactgcgccgtgcatatcctcagtgatccaatccaaaattgacccgacccacgattcgcggatatcacaaaaagcagaggggactttgattgctgggaagtgtcatgccgcgtgttctcgtggttgatgacgatccgatggtcggtgcgaccatcgaggtcctcctccaacgtcagggcttcgacgtcacgctggccgatggcggcgaaaccgggctggcggcgctcgaatcgcaggtgttcgacgtgatgctggtcgacatcttcatgccgcatatgcgcggcttcgaatccatccgcatctttcacgagcgcgcgccgaccactccgctgatcgcgatgtctggctacgcctttgcctcgtccgcctcgccttctcccgatttcctgcgcatggccctggaactcggcgcaacgcgctgcctgcgcaagccgttcacgccggaagcgctgctgacgacgatccgggaatgcctcgccggcgcgggcgagagcgcgcagccgaaggacaagaaagaggccccttgattccaacgcagcgcgtcattctgggtgccggacttgccatcctcctgatcatcaccgcggcctcgatcgctctcgacgtcaagtcgcggtccgacgcggcacgggtcaatcatacgatccaggtgcagaagaagatttccgatctgcgcgtgctgttgcgccgcgccgagagcgccgcgcgcggctttgagctttatcgcacgccgggcttcaacgatgagttccggacagtgcaggccaggatcgcgcctgccctcgccgagctcaagcgcgacgtgcgcgacaatccggaccatgtcgcgctgctggagggcaccgagccgctggcgctgcgccggatcgagatcgccgccacagcgatgcgcctgcgcgccgagaacgacgaggccggcattgccgcgctcatcagcaaggccgagggccgcggcctcatggacaccgtgatgggcaatctcgaccgtctgggtgcccaggaagaacgcctgctcaccgagcgcacccaggattcacgccgcaccggcatcgtgctgctcggcatcgacgtcgccggcgccctgctcatcctgctgctcgtcgcgctggtcttgcgcgaaagccggcgcgccacgggcgagcttcagagctcgctggcgcagacgcaagccgcgaaggcggcgctcgaggctgcggtggccgagcggaccgagcacctcgtcaccgcgcatgacgagctccgcctgtcggtcaacgtgctccagagcacgtttcgcagcatggcggaggcggtgctcgtcatagacgccgagggcaccgtgctcctctccaatccggcggccgagcgcatgctgctgcatcgcaccggcatgagcgtgagcaatctgcgcgcgctgtccgacgtgtttcacggcgacggcgtcacgccgctcaagaccgacgaactgccatcggcgcgcgtgctgcgcggcgagcacttcgaagagctggagatgatcgtccgcccgcacagcggcaatcccacccgccatctcatgatcagcggccggccgatgcgggacgggcaaggcaacgtctccggcgcggtgctggtctatcacgatgcgacgacctcgcgcgagaccgagcggcagctgcaccagtcgcagaagctggatgcggtcggcaagctgaccggcggcgtcgcgcacgacttcaacaacatgctgaccgtgatctccggcaacaccgagacgctggtggagggcctgaaggaccagcccgagcttcagcgcacggcgcggctgatcgacgatgccgccgagcgctgcgccgagctgatccagcatctgctcgcgttcgcgcgcaagcagccgctcgagccgcgcaacgtcgagatcaacgccgcgatcgcggatatcgccaagctcctgcgccccaccctgggcgagcagatccagatcgagaccgtgctggaacaggggacgatgaagacgcacatcgatccgtccaggctcaccaacgccgtgctcaacatggcgatcaacgcccgcgacgccatgccgaacggcggcaagctattgctggagacgcaccgcgtcgtgctggacgaggcctatgcgcaggccaatgcggacgtgacgcccggcccctacgtgatgctcgcggtcagcgacaccggcaccggcatgccgcccgaggtgcagcagaaggcgttcgagccgttcttcaccaccaaggaggtcggcaagggatccggcctcggcctctccatggtctacggcttcgtcaagcagtccggcggccacatcaagatctacagcgaggaaggccacggcaccacgatcaagctctatctgccgccgggcgaaggtgcggcggacgcggccgcgcccgtcaccccggccgccgagggcggcgccgagaccatcttcgtggtcgaggacgacaatctcgtgcgcaatttcgtcaccacgcagctgcagagcctgggctacaagaccgtggccgtgccggacggcagatccgcgctggacctgatcgacgcgggccaggcgttcgacctgttgttcaccgacgtcgtcattcccggcggcatgagcggacgcgagttggccgaagaagtggccaggcgccggccgggcgtgaaggtgctctacacctccggctacaccgacaacgccatcgtccatcacggcaagctcgacgacggcgtgatgctgctgaccaagccctaccgccgcaaccagcttgccgagatgatccgcaaggcgctgggcaactagccgcgcgtcgccagcaccaccgccgccagcgtgaaaaccagcgcggcgatctgccctgccccgagcggctcgccgagcgcgaccgccgacgccacgacgccgatcacaggcaccgccatggtcccgatcgcggcgacggaggccggcagccgcgccagcgctgcgaaccagctgacataagcgatgcagaactgcaccacggtcgaatagaccagcagccaccagccgagcggcgtcaccttgcccagatccgtggtctcgaccagcaggccgacgatcgagatcggcaggcagccgatcccgatctgccaggccgcggccgtgatcggcggcaggtggatcgggtacttcttggagagcaccgtgcccaacgcgaagccaaacgcgccgacgagcaccatgatgattccaggcgctttctccgcgctggcggcgatcccgttgccgcccatgatcgaggcgagacccgcgaaggccagcaccagccccagcgtgcgcaagaccgtcggccgctcgcccagcaccggccaggcgatgatcgaggcccagaccggcatcgtgtaggcgatcagcgccgcctcgctcgccggcagccagagcagcgccagccccatcagcaccatccagccggtgacgttgagcacggcggcggtgaggaggcgcggccaggtcgcgccgtccacgcgcaggctctgccgccgcatcaccgcgaacagcgccagcagcaccgcgccgagcacgcccgtgaccccgcgcagggtcagcggcggcagctccgcgagcaggaacttggtcacgggccagttgaagccccagccgatcgaggtgatcgcgaggaacatcaggccggccggggcgatgcgcggccgcgcatcccggcgagtcgaatcatgcatgagggcagtccggcaaatctgacggcagcttggcccggattcgccggccgaaccaccgccctggcgggcatgcctgcccccgccttccgtagggcaacgtgagtcccgcagacgcaatcccaatcgccaaaaatatacctggcctgtgaacagcgggatgaaggcccgcatcaccccgagacgcaaattttttcagttgggaatccctgaggactcactgatacttggcccaagacaggcgcggcgaagacccctgttatcccccacaatccaccatatttagtatttgattcaggaactcgcactagttcttgacgggcgcaacggagagtcctagctttcggtccgttcggcgcgagtgagtttgcgtcccgccggcactcccccaaagggcaccgcaaatttcagctccgccggccagccaaaggcagcggatgagggcttgtctgccctcgaaaggcgggactcctggggcgccagagcgggccggcaacaggctcggatggcagacttcgcggtggtttcgagtgacacctgcgtgaagtgagagaagtagcggcgttgtggggcgttgatcgcatgtcgggctcatccccttgggggcggatgggtctggacaggcaggcgggatgtgaggtgcgcgcaccgagccatcgcgtcgggagaacaagggccgggtccaccggctgagctgcggagcccgaagccgacggccgagggactcgcgaagtgaaatgacgacccgggacgccttcaacgaggggcgcgaccggtcaaagatgaaagacggggcaagacatgcggattgagcggcgccacaccagtgcgggacagtcaccttatgcgggaatcgaattccggctcaccacgtcggagattcgcaatcccgacggctcggtcgtgttcaagctggacaatgtcgaggtgccctcggagtggtcgcaggtcgcctccgacgtgctggcccagaagtatttccgcaaggccggcgttgccgcgcgcctgaagaaggtcgaggaggaatccgtcccctccttcctgtggcgctccgtgcccgacaccgaggccctcgccgcgctgcccgagaaggagcgctatgtcagcgagctcagcgccaagcaggtgttcgaccgtctcgccggctgctggacctattggggctggaagggcggctatttcacctccgacgacgacgcccaggccttctatgacgagctccgctacatgctcgccatgcagatggtcgcgccgaactcgccgcaatggttcaacaccggcctgcactgggcctacggcatcgacggtcccggccagggccattattacgtcgaccccttcaccggcaagctgaccaagtccaagtcggcctacgagcatccgcagccgcacgcctgcttcatccagggcgtcggcgacgacctcgtcaacgagggcggcatcatggacctctgggtccgcgaagcccgcctgttcaagtacggctccggcaccggctccaacttctcgcgcctgcgcggcgagggcgaaaagctctccggcggcggccgctcctccggcctgatgagcttcctcaagatcggcgaccgcgccgcgggcgccatcaagagcggcggcaccacccgtcgcgccgccaagatggtcgtcgtcgacgtcgatcaccccgacatcgagacctatatcgactggaaggtgaaggaggagcagaaggtcgccgccctcgtcaccggatccaagatcaaccagaagcacctcaaggcggtgctgaaggcctgcgtgaactgcgaaggctcgggcgacgattgcttcgaccccgagaagaaccctgccctgcgccgcgagatcaagctcgcccgccgcagcctggtgcccgacaattacatcaagcgcgtcatccagttcgccaagcagggctacaaggacatcgcgttcgacacctacgacaccgactgggacagcgaggcctacctcaccgtctccggccagaactccaacaactcggtctcgctcaaggacgacttcctgcgcgcggtcgagaccgacggcgactggaatctcaccgcccgcacctccaggaaggtgaccaagacgctgaaggcgcgcgacctctgggagaagatcggctacgcggcctgggcctccgccgatcccggcctgcacttcaacaccacgatgaacgactggcacacctgcaaggcgtccggcgatatccgcgcgtccaatccgtgctcggaatacatgttcctggacgacacggcgtgcaacctcgcctccgccaacctgctgacgttctacaacaccacaaccaagcgcttcgacgtcgaaggctatgagcatctctgccggctctggaccctcgtgctcgaaatctccgtgatgatggcgcaattcccgtcgaaggcgatcgccgagctctcctacgagttccgcacgctcggcctcggctacgccaatatcggcggcctgctcatgaccatgggcctgccctatgacagcaaggaaggccgcgcgctctgcggcgccctcaccgcggtcatgaccggcatcacctacaagacttccgccgagatcgcctccgagctcggcaccttccccggctacaagaagaacgcgccgcacatgctgcgcgtgatccgcaaccaccgccgcgccgcgcacggccagtccaacggctacgaggcgctcagcgtcaacccggtgccgctcgacctcgtctcctgcccgcaggcagacatcgtcagccgtgcccaggcggcctgggatgcggcgctcgagctcggcgagaagcacggctatcgcaacgcccagaccacggtgatcgcgccgaccggcacgatcggcctcgtcatggattgcgacaccaccggcatcgagcccgacttcgcgctggtgaagttcaagaagctcgccggcggcggctacttcaagatcatcaaccgcgccgtgccggccgcgctgcgcacgctcggttatcgcgaagctgagatcgccgagatcgaggcctacgccgtcggccacggctcgctggcgaacgcccccggcatcaatgtcaccacgctgaaggccaagggcttcaccgacgaggcgatcgccaaggtcgagaaggccctgccgaccgcgttcgacatcaagttcgccttcaacaagtggaccttcggcgaggacttcatccgcgagcagctcggcatcggcgccgaggcgatcgcggcccccggcttcgacctgctccaggccgtcggcttcaccaagcgcgagatcgaggcggccaacgtccacatctgcggcgcgatgacggtggaaggtgccccgcacctcaaggccgagcattatccggtgttcgactgcgccaatccctgcggcaagatcggcaagcgctatctgtcggtcgagagccacatccgcatgatggcggcggcgcagcccttcatctcgggcgcgatctccaagaccatcaacatgccgaacgacgccacggtggaggactgcaagtccgcctacatgctgtcgtggaagctcgctttgaaggccaacgcgctctatcgcgacggctccaagctgtcccagccgctcaactcgcagctcatcagcgacgatgaggacgaggacgatgcggtcgaggcgctgcacgagaagccgatggcggcgcgcgccacccacgtggccgaaaaggtcgtcgagaagctggtcgagcgcatcatcgtgatgcgcgagcgcgagaagatgccggaccgacgcaaaggctacacccagaaggcggtcgtcggcgggcacaaggtctatctccgcaccggcgaatatgacgacggccgtctcggcgagatcttcatcgacatgcacaaggaaggcgcggcgctccgctccttcatcaacaacttcgccatcgcggtgtcgctcggcctgcaatacggcgtgccgctggacgaatatgtcgacgccttcaccttcacccgcttcgagccggcgggtcccgtgcagggcaacgactcgatcaagtacgcgacctcgatcctcgactacgtcttccgcgagctggcggtgagctatctcagccgcttcgacctcgcccatgtcgatcccaacgagacgggtttcgacgcgctcggcaagggcgtcgacgaaggcaaggagccggacgacgacggcggccaccacgccaccaagctggtctcgcgcggcctcacccgctcgcgcacggacaatctgttcgtgatgcgcggcggctcggccgcggtcagccagggcagcgacagcgcgccctccggcggcagcaaggtcaccgcgatggcctcgcatggcgccagcgcccgcgtcggtgatgccctcgaaggcgccgtcgccctgaagcaggaagtccagcacgacctctccccgacggagaagctggagcagctccagtggagcaaggccggcagcgccgcgaccgccgtccccagcaaggccgagcgccgcgcggaggcgaaggccaagggctacgagggcgagatgtgctcggagtgcggcaacttcacgctggtgcggaatggcacctgcatgaagtgcgatacgtgcggttcgacaaccggctgctcctgatattccgacttggacgaaatcggccttctcggcaaactgtgctgattgtgaagtccctcgatttcgtattccgacttaaagcagaaaaaaccccgccgtcaccggcggggtttttgtgattatccggattgtcgtgttggagggctcacgagcctgagccttttgccggtgtagaattttcgcggagaatccacgcctcttcggcatcgtctccagcgatctcatcgagatccctaacaatctgttgcattctctcgacatctctcaactgcacttggagcagctcgtttatgtaagtctcgacgtgttttccttcgcgcgatgccgcagtggccgcgcgcgcgtacaggtcgtcgtcgatttgaaccggctttggcatagctagatcctccatcacacaaagcgggagatggctgcaccacttagagaataccacgcgataaactgccgctcagcatggcgctctcttccaggttcacaggcactcccaccttcgcgatattcgattgaacctgaagtctgatgcgcgccttcaggagcgcttgcaccccagctccctcgccgtttcagccatcgtgtcggctatccacctatggtgtctgcgttggcctcggcatggttgcgatagcggtactcgcctttaggcgcacggataaaggatcgttgagcgcttacctggctaggacgaacctcgttttccgtaacgggcacccgtgcccgatgtcaggtagcggctgcgcccggttgcctcaccacacaccatcgcgccctccggatcggccatataggggtcgagcctagactcttcgttgctactatggtagtttatatcacgatcagtcagttcgtccacgagctaaaatcgctcaatgtacaccccgatgaccagggagcagcggcggctggcggagaccatgcgctccaccacgctcgagtttgccgcgctctcccgctcgcgggacgagttcggtggcggcatgcagtggctgaaggtcaagaagtttgaatacctgacccggtaccgacgggatcctctcactggcgagcagaaggcagcttcaatcggccgccggtcgcccgagaccgaggggatctacgaccgtttcatcaaagaacgggccgagctggatcgccagatcgcggccctacggccgacaatcgccgagcagaccaggatggcgcgggcgctgcggctcacccgcgccccggaggaagtcggcgctgtggcgcgcgccataggcatgtccggactgatcgaccacgtcaccatcatcggtgaggctgccatctacgcctacgaatgcgagatggccgcgctcctgccgcgcgagatgctgcccgaaggcggcatggaccttctggtcgccggcgtacacccgacggacgtgatcaacgagctcgtaggagtgctgagacgagccaagatagaggtgcagcgcgccaagctcagtgccgacaaagcggcggtcgaactccggaccgaagaaggcctcagcctccggctctatacggcatcgacccttggcggcttgatcgaccaatatgcggagagttcggcgtacggggcggaggcggtgcagtggggtctcgacctgccggtgatgcattcgatgctggtcgaccgcaacgggcgggccgccgccgtcgcggttctcgatccgcgcgcctactgcatgcttcgtttcatggccctcgacgtcgaggagatgtcgctcatccgccgtgaggtgtccaccgaactcaatgccgcggtagtgaagctcgtccacgagcggtggaccgagccatttatcgaggagcacgttcagagcattggcccgctccacgatcttttggaagacggcttcccctcggcaccgaggatgtagacgcgagccacttcaaggattcgattaccacgccggcatgccggcggggaacgctaacttctggttgaggtttgggcgtgatgttgcgaccaggttcaagtacagggggcgcggatccggcaaagaccggagcgtttcagataaatcgcgatggagcctcagctagaggcgcacaccgtcctattccgaagcgtaccaggtccaaaacgcgccctcgcagggcgcgcgatgccggccgccagtgcggcatggtcaaggtcttccaaccgaacgctgacaggatcgcgaagctcggcttcgcgtccgttgcccacgtgccggtgattttcgacagtcgtcagcgttattgccgggaatacaatcgctatcttcgcgagcgcgcggaattggactggcgccccgcggcgggttttcacgatcgtccgcggccgcgcacactcaagaccatcgccgatcatcttaccaattggatccgttggtgtgagtccaaggatgttgcgtggcagaaggccacttacgatcacgtgctcgtctaccaagacgaacaacactcaggcatctggtccgcttcaggcgagcgtttggcagctagtacgtcaaacgggagagcagacaacgccacccattttttgacctgggccgcagatcgaggcctgcggggtgagtttaaagtcaatctcaccgttcaacaaaaaaggatcggcggccgcatgcggaccgtaaccgtcaggcctggacgtctgaaggagccgctgggcgaaagccagatcgacacgttcaggcttcctcagcctgtcgaagttcgtgactggttggcggctgtgcgacgttgtcgcggctacgcgaaatatctcgtctgccgtttcattttagagaccggtgtacggctcggcgaggccgaggcctttcccgtcgctgattggccttcggttgagaaaattgaagaggccgcgtttcgccgcgatgtctttgtgccggcgaatctcacgcgcggcacaaagggtggacgtcccaggaccatccgcgtccccatcgaacttgccagggaaatacgcgtctggatcgacgggccccgcaataagtacgtttttgcactctacaagcgggacggaaagcgcaccgacaacctgttcgtatccgatgcgccgggtttcatcggcatcccgatcctgcggcatacgattggcgactgcttcgccaaggttacgccccgtccgaaggtttggtcgccgcacaaaggacgacatgcgtttgcctgcttcttcatcctgtacgcactcgaggccgaagcgcgcgcacacaaatcgacacctgccggcatgggcgtgaattgggttcataaccgcggttccgaatggttgaagatgctccagcggcagttcggccatgtcgacgaggtcaccacccagatctacctgaaatggctcgccacagcgctcaatctcgcagagacggctaacggttggcaccgctttctagcgggtgacgaggagcgctgatcgcaatgaatgtcgtccccttcaacgccgggtcgctgaagctgaccatcaaagctcaaagcggcatcgtttacgacgtcgatttgagcgaattctccgtcggcggaaagctggaaaatgttctgcccaagtcaaagcacatctgggcaggagatttttctggccgtccattgtttgcgctggagatcgcagagcgttttcggatcgagcgaccggagcccgtagcatcgaaaaaggtacggcatgtcttccgggggattttccgttttttggatgcggtagagaccaagcatggcgctccagttacttgtatcgctgatatgaccgacgcccacggtcccatgatgctggaatggatagcgtccggaaattcgcttgaataccggagtgccaaaggagaaattgacgccctgcgccgctttcgcggcttgcccccgctcttttggtcagcgcgcgcggctgacaacgtgtccacgacagagccggtcaacagggaggcggttcggcacctctacaatgcattcaagcatgaagcccgctgcatcaagagaatgttcaaagagggcgagctactagccgctgcgggacgagatccccgcagcgacacgcgcgtttccgctcaatggactgttcgggaaaacagagcctggatcataaaggagctgacgcaacagcaccttctcgacaaacaggagttgaaggacgtgggtgcctattggggcatggttcaaccaggccgaaagggccccgactatcttgcgccgggcatgacggaacggggccgagaaggcgtcgttggagccttacgctggttctatccgagctatcaggacaccgctgtctttctgtggctcttcctgctcggaacaggctggaatctctcgacagcacttgggctcgacgtgagtgaagatgatgcctggtgtcaggcccatccacaccgcgagcagtttacggtcatccatgccttcaaggcgcgcgcggaccggcatcagttcacgctatcgatgaccgagcctgagtggcacccctaccagatcgttcgagaaatgatcaagcgcaccaagatcctgcgcgccactgtcagccatcggctggagctggctcgcaaggaccacgccctctctcccacactggcgaagtcgggcaagatcgctgaacttgaggcgctggtccgcagcccctggctttaccatacggtcaataagatcggcgaggtgtccgcattcaataacgccgattccagccatctcaatctcatcgcccggaccgtcgccgccggtctcatcgagcgccatccttcgctcgaaaagatcgcgacgtccgatgcccgcgatgcctggattgggttcgcctacgttcagtctggttatcatgtcttgcttactcagctggccagtcagcacagcaacatccggacgctcaagcattacctgaagtccaagcgatatcgtgagttcagcgagaagcaggtccgaaaggtgcaggataccgtcttcgctgaaatctctaccggcggcgtggtcgatcccacgcggctgcgcctgttggtcgccaacgggaccatcacggccgagcaggagcgtcggctgcaggatttcaggcagcggacccgacttggcctcggatgcctcgatcccactaatccgccgcgccagatcgcgcccgatcacaagagcggtgccctctgtcgagtgcagcgctgcaccggttgccagcatggcgtcgtgtttaaggagagccttggccccctcgcccgcgcgtgcgccgagctaatccacattcagcgcaccattccatacgccgcgtggagcggatcgagcttggaggacgaactcgcgtcgatcgaggagacgctcaagggcttcgatcaaaccgaggtcgcagcggccatccaggaatggtctcacaagctccagacgggagaggtcaaggcgcatgacacgtatccgatctattgatcctgcggagcgcgcccaagaatggcgtatcaagacccttccaacgctcggaaactactccgagctcgcggcaaagccttgggaggaattgcgcgaatacgagatcttcgagggctgtcggctcggagacgaggaactcgtcgtgccggaggattgggtgccgcccacgtccgtgagccggctgtcaaagaggacagtttgcccatccgatgctggcgtgccggccgacccttccgcggccgagcggcgcgacgaggcaattcgccgtgcgctgttggcactctggcttccccggatgaccgataccggcgtcaggaaatacaagccgggcccttggatcgatgccgccaatctgctgctgcgtcttgccaaatggcaattcaacaacgtgccgacggaagacggctcggtttttggtggattcaccatcaccaacatcctccaggaggtgcttcccgccctggcgccaagggagaaggggcgagacgcgatacgggccctcttccgcattctcgttgacgccggaatacgtggccgcatctctgattggcctcgcctctatgccgacggcgacttcgccaatgggaacgatgaccctacgatcgagcgaaaccggcatggccgggccgcccctgcccccgtcgaaaagacagagcagcgcaactggcaaccgttctcggacacttttgtcaccgaattcatccgccgtgctctctgggtccatgcgaacttggctgaccagcttctcccactgtgggctgagctgcgcgaaattacggccagcgaggcggcgcggggacgctcgacctcccatccttcggtcattgctctgcgcaatgccgccattgaacgcgtcagatgggtggacgcagcaggcaggccgatcacgcagcttcccttcgagattgcccgcagagatggcgtttcggaccagtggccgccgcgcaatgccagcgacatcaaccgcatggtcagcaccgttcaggccatgaacttcgggatgatcgatttctgcaccggcgctcgtgcaagcgagctcgcggccgcggaagataacgaaaaccagggctcggacgatcgtcttcactccgtcacctacaagctcatcgatcagatcggcggaaagaagcgggactggccgttgcatccggcagccgtacgggcaatcgaggtgcagcagaaaatttgccaagtcgttcgcccgcccgggcagacacatctctgggtcatcctcggcgacggtgacaagctcggcaatcggctgctcaatctcaccgaacccttggtccaggccgtagatcacctcggactctccggattgaccggccgagaccgggcccatgtgcaccgctggcggcacaccgtcgcccgcctggtcgctctctcggtcgttggtgcaccacaggttctgctcgacctgttcggccaccgcgacctcgaaatgaccttgcgctacatgctgtccgaaccgcgcatcatcgaggatgcgatgaaggtcgccaaagagacctccttcgtcatggcggaaaaggccctggccgaaaccatcgaaggccaggccggcggccctgccgccatgcccctgcaggcgggcctcgccgcagcgggaatgcagcgcggtgaaaaggtctttgagacatcttccttgagggaaaccgcggaagttctcactttcaacggccgctactggtcgctggtccgtcccggtgtcatctgcaccaagggactcggccaggctggaccttgcactaaggagcggggtgcccccgatcccggcgcctgccgcaccacttgcgaccatcgcttggagacctcgcgcgccaagcaagggtgcgaggaaacgctgcgggcgctcatcctcgagcgcgagcaaactaccaatgaaatggtcctcgccaatctcgacgggcagatcctggccaacctcaagcgctgggacgacgtccgctcgcgcgtgctcaacgagcatcccaacattcaaagcatctgggaggccggtcaatgagcacggacaggcgcgtgggcaagcgcaggatcgcgcaggcaggagcagcctatgcaaaagaaaagcacctcgagagcaagatctcggttcaggagacgatgcagaggatcgagctcgagatcgacgccaacggcggcatatacccctacaacgacggcaagctcaccgtcgacgaactgctgcggcgctccggaaagagcgcggcctacctccaaaagaacaccccgaaaatcaaggagctcaggcacgaggtcaatgcctggatcaagcggatcaaaggtcaggtcgccaccggcgcgccttccgtgcggcgggaggtcaacgcgcgcgtcaaggtggcgaacaagcagatcgacgagatcaggcaaaactatcacgaagccgagcttcagctcacccgcgtcacggccgagctggcggatgccacccgtaaaatcggcgagttggagaagagaaacaccgagcttctgaaacagctcgccggcaagactgtcgtttccttgaaaccggagcagcggaagtgaatccccgctcggtggtgccgtcgatcctcgaaaagctcgagccccaccttgagcggctcgaacttgcctggtcgtcgcagtcggaacgcgatcgcgcgcctaccctgcccctcacgtctgagggcaaggtcaacgtgcgccagctcgtacgggatctcggtctccgggaaaccctcgagcagcatttcttccggaagcccgagctcgccgggccggtgaacgccctcgcccacgcgcaaggcgtgaagccgatcggctcacgcctgctcgacgacgttgccgacgccggcgtccgcaagcggctcggccgggatgcggatacgatctccgagctgcgcaaggcgctcgccgagcgcgaggcactggtcgtctcactgcgcgacgagaacgcgcggctcaaggctcgcctcgacctaatcgaggagacgggcctcgtgttcagggctccggcatgaccgacatcgtcgtcgacagcatcgtctcgcggcgtgactttggcactatcttcgccggccgcctggccgacggttcttccgtccgggtgaaggctgcaaacgcggccatgctgggcatgccctcggtcggtgagctttggtccgtggaaggcgacctgtccgacacccagtggggaccgcagatctcggccagccgcgcggtgcgcgccctgcccagcggcaagctgatggtcgactatctcgcgagttgcgtcgccggcatcgggccggcgcgcgcccgcaggctgtggcagcatttcgaggaccgcctgcccgaagcactcgacaccggcgacgtcgcggccctcgcggcggtgatggaccccgaccgtcccgtgctggggccaaggctcgcggccgcgctcgtttcttcctggaaaaccatggccggcgaagcgaggctcgtcgaatggctcgcggccgtcggtgtgaccgagttggcgctggcccggcgcgtgcacgcgctactcggcggcgatgctccgcgggcgttgcaggcaaacccttattgcctcgtcccgctgctcgattggaagcgcgtggatgacctcggtctgcggctgctgaatgagagcggtgaagccgatcccgtaaaccatcctcatcgtctcgtgggcgcagcggacgcggtgatcaaggccctggtcggatccggttcaaccgcgatcgcgcgggacgattttcgcgagcggctcgccagcaagcttggcgggccactctcctcccgagtgctcgaccacgtggtcgagcttgcgatcgagcgccgggcggtcatcgcctcgccttccggactcctgcgggcaccgggctgcgccctgatggaggatgccgtggtcgggcagctccgcaccatggcgacggagggcccgccaaacccgctaaatcgcctcctgggtgacctcggaggccaaaaggccgtcctgagtcaggatcaggccgaggccgtccgtaggagcctgtatgccggtttctcgtgcctccgaggcggcgccggcaccggcaagaccttcgtgacgcgcacgatctgcgacctctgggagcgcgccggcggccagttgctgctggcggcgctcgcgggcaaggccgccctgcggctgtcccgctcgaccgggcggctcgcgcgcaccatcttccggacgctccgcgagttggatgaacgagaggcgatcgagagtcagctcgccggcgaacttgatcagaccgagagggcggagctggagactaagctgcgcgagctggcgcatttaacttccgacacgctggtcatcctcgatgaagcctccatggtggacctgccatcgcttcacggcctgcttcggcggatgccgcaaggtgcccggcttctgctcgttggggacgagcgacagcttccgccggtggggtttgggttgctgtttcaccgcttcgtcgacgatccggccgccacctcaacgctcaccaccgtgcaccgccaggccgcgaccacgtctatcccgggtattgcagcccagatccgccggcgggagatgccgaacctctccacttacgtcgggccccacgtcggtgtcatgcttgcgcgcgcgtcggggcgtgacgagatcgccgataaggttgtctcgatctgggatgaattgcgtgacggtcgcgacgtcatgatcgtcacgccggttaacgacggtccctgcggcgtcagcggtctcaaccggcgcctgcatgacgaatatctgcgcaggaaagacctgcaggagctccgggggccgctcggtgatttattctcgcctggcgagccgctcgtgcaccggcgcaattgctacaagcgcggactcttcaacggctcgatgggcatcgtccggcggatcgaccgggccgaacgtcagctcgtggccgttttcgacgacgaagagcatgtattcgcctctgaggacttggtcgatctctcgctcgggtatgcgctcacctgccaccgtgcccagggctccgaagcagactacgtcattgtcgcgctgccgcagagccggctgctcgatccgtcctggctctacactgcggtcacgcgggcccgccagcaggtcatcatcgtcgggcagccggagacgatgaaagaagccttgaaacggccgtacgccgataaaaggcgatcggtcggattgctgtggtgagccgccgccttgccgaggtcaaatgtcaaacaaattgagaaatcgcagcacgagagaatgcgaagggccggcgcgcatagagaccaaaaggctcagtttctctccgaacgggagaacttcgaaacttcccgggccttggccagatctccgatcgcgacagcaatgaacgaagggtcatcgctttcaagcgctgcttctagataggcggcctgctgatccggcgtcttcaggtagtcctgcacatcgaacttggttgtcttaaggggcatatcaaacctccttcgccatcgcttggcgtccggcaccacaaccacactgacttcctgaagtccagcacggcatcatcagtctgatccccggagccgccgtcgcaggcggccgcggccaacggcgcgcgcaccggacaagggcgaagagcgaagcgtcccttgtcggggagcacgacgatggcaagggtaagccgaagacgagtggcgctcgggggcagacgtcctgatccctggtgagcccgagcaccttcgctcgacagcaatattccgacttacatgaagtcggaatattgtgaagaaatatgccgaagcctaagtgcctctacatacacacgaatgtttgcgcactaataatataattgtggaagcacgacggggtgttcttaaccacagcatgcattgtgctacgaagggccattggcagagaacaagggcggccgtcaggccacccttgtttcttaagtgctcaacaggtcttctcgaccaatccgcttcaactcccccatcagccacccgcgatactcttcttctgcgcccttcaactcgcggtccaactgaatttctccaagatcgaagtcatccggaatcgaaaatctcaattggtgtcgcacaagacaccccacaacatggtcgtaaccaacactatgatcctcgtggtattcgatcgcgaagagaccgaaattctcccgaatgagcggatcgactatggtgtagatgaactctagagataaggcccgaaagtcctcgttctccggagcacaaaagtgttggatcgaatttcgcgcacgtcgaaggcggtcaaagcagcttgggtttggcaatctttgaccggtggcaacccaaagtacttgtggcaatttgtcgaagtcgtgagttttacctttttggacgaggcttgttaaatcaagggtaaccgaacgattgtcatcgaggttgaacagatcccgaaatattagaaggggatgttcttgggcgatgatcgccttaagaaacaactcaccggcgtgcgccgtgttagtcactgaaataaagtcccaatgctcgttccctggatccgagaaaacggcgtgagtatttgcttgtgaaagagcgccaattgcgagtttcagtatcctattggggatttcattgagaatttcattgtgcatcattcacccgctccagaacgaggttggaggggtactttcatctctgcaaagaagatttcatcaactcggcagatcgctttgcaaaccgcaccgaatgcattcttatcgtcggctttctcggccaattcacgagcggcgagaagcgcgattagaacctcccccagaggtacgtttatcgccgtgactgctgtaacaccatgagcaaatgtacctacatctgacagcacctttggcgcgtgcaaattcccagttgcgatgtccctactcacagctcgcgccgcttgtgtgacagccttcgcgtgcgccgttctttgtcctcgcaacctctccagcaatatcgacttcttgcccttctgagcgatttttcgaccttcgacgtcgtccgcgatttgcgaattggtgcggccggacattcgcgcgaagtaaaatataggcaaccacatgcgagattgagctagtcctgcgaagatgaaattctcagggccttcgacgatctcctgactgataaacgcatcgagtatgtctttctcaaaaatcgcctctcttgagatcaccttttggggcgatccgatcacccctaccgttcttatctcgccgaccaattttagtgttggcgcaccagatttttcttcgaattgcccctctttgataaatttgatctgatcaatcagccgttcatccaaaattatcgagcgaccatttgtgttcattgtatttttgtctgtgtctaggattagagcattggcggtacctacattggccaaagtccgtgccgcctctgcgagtgcgacctgggcacgccgatctcgctcatcaagcatagctcgcaggtcagcaaatttgatgcgagctgactggccaggatacctataaaggatatcgccctccgctaacgattctccgtcccggtaaacgacgaccggacgatccgggtgcttctccacacgcaaaaagccaaccgctcgcccatcgaagtcgattacacccttagcaactatgctcggcgtgggagcgagatgagccttaactttattcacgatgtccgcgatatcggtctgagagaatgccggaccgacaccttcgaccttgcaccggttatttccgaccccgaagaacacgtagccgcccttgttatttgcaagcgccgcgatcgcccggactaccggagtgagccttcgagggtcaaagtcctgcttgcattcgtgttcttcgctttcacctcggaaaaggtgccaatgggtgtcatcacctttcctaaagagctgtcggacctcttgttcattggggctttcagcgccatctctcctcgcgccaccccttgcgaatgatgcaaagaagtattccagctcgtctgcagacgcggctttgattttcttcgagttgctgtaagtccctgtcctgatggtcgatatcctgcccgaattaacagggcgctctgggcgattgaaataaaactgaatatccttgttcttcaatcctcgatcgagcatcgctttaatcaaggcgatttcgacgtctttgatcgttcgctccggcaattgcgtcccccaccccgttctaacctgggaactcaaataccactgcagcgaagatgcttctacctctacgcgcagtgaagacgactagccgaagggatgatcaattcgagaactcgatgcaaaagcggctggccttgggcaaaactcaccgtccaaggacgattgttgaaaggttcgtttagctcgcttacgaacgatatccgtattgcgcgaggcgtcgccgagccttgtcaatttcttcagaagtgaaaagcgaatgccatttctcgttatcgaccacttcagcttcgacggttagatcaaggcggccacgttcgtaaaggtgggtgtatccatcagacggctgtggctgattgataagaaatttggccgtatcgattcctccacggtccgtgagcatctgcaagaaaatattcgccggatatttagcttcgacctttgcacggcgatagatttcgaacattgcgcgcgaaaactcgtctgaaagctttgccgtcgtgatgctccgccggctagatgaacactgttgaagcttaactcagaaattgcctttgcgcccgagactgatcttcccccgataaagtggacg

SEQ ID NO: 195 - DNA, 4287 bp, Bradyrhizobium colbertium
tcggcaaggcggccttcaccggacggatactgatcgtgctcaactcggaggctcgttccccttggcggcgagcacctttcaggtaaggacattgctacgacagctcgtcgaaacgcggccccctcgggggtcccaaaacccgatcacgccgccagcaccaagttcgcgttgccttccccgaccgactgcgttaagcgacacccactcccggactggaagggtggccgagcggtttaaggcaccggtcttgaaaaccggcgtgcccgcaagggtaccgtgggttcgaatcccaccccttccgccagtatccactcctccaaacggcaatagttaagggattggaccttctacgattttctgaggcgacctgagggtggcgcgaagtagctacggtgacaagctacgaactctgtcaccaagcggagaccggcagggtacctcgcgtttcttcatcggcagctgagttctggtgtgagattgtagactgctgcggcgatgcagacgctggtctgcctgcccggccgatgcgggagttcgaactttaggagagggggctacggcacgaccaatactggtaccattccattcgccaggacctcggatgtttgacttcccaaaaacagcctcctaaggccgcgtcgcccgtgagatgccatgacgatcaagtcgcaacctttggactttgctgtttcgatgattgcagtagccgggtgcgaattcggaacatgcagaaagtctgaagaaacgccgatttcctccgccatcgatcgaaccacctttaacacattgtgcgcgtgctccttatgagctgcctcgtagctatcgatctcgtcctgagacggtaggatcgccgaggtgtgcccactcccatagtcaatgtacattgcctccgtcactgtaatgatcgttgctttggcgtttagagccttggcaagggcgagtccgtgtctgacgcctttgttcgcaagctctgatccatcggtgctcaagaggatgttggtatacattcgatctcctccccgatctggccaatcacccgacgcgaatttgttcgtgcgcggatgtcgaactagcggctatccaccagcggcataaaaagtcgctcaacgactcatggtgcgattgagcaaaaacgactttattcatcgaacaggcaatagcgcggcactacttggtgagcgtatccttgtatatttttccgtctttcatgatgattttgagattgttgacggggtcggcaagaaggctgatatcgttcaacggatttccgtcgacgagcagcaaatccgctaatgcgccttgttccacaacgccgagtttgccgggataaggattccgcttgccggataaggccagcagttcggcattggtcgatgtagccatggtcagcgcttcggcgggcgtgtaccagcgggcgagtgaggccaggatggccccctgttgtcgcgctagcgctgcagagaacagaacatcggttccccacgccgtcttgatcttgtacttcctcgccaattcgtaggatctcgctatcccgggccagacctcatcggccttggctctttgaactgagcctactggaaagcccaacctcaattcttcgggcagaggctgcatactcagccaaacacccctgtctgcaatcagttttgctgtctgttcgtccatgaggaaggcgtgttcgatacactttactccggctgcaagtgctcctcgaatcgccgcaggcgtgaaggcatgagccgtgacgtaggtgccccaattctcagcggcttcaacggcagcacgtatttcgggttcggtgaaagtggtcacgtcgatcggactgaaaggcgacgacactccgccgccggccgtcaacttgatttgtgaagcgccttgcatgagctgttcgcgggcacggacgcggacctcgtccgggctgtccgcaaccatcgcgccgccggtctgctccatgcgggtgagcataccgccgatcgttcgtggtaaatctataagctggcgaaaatccccatggccactcgtcacagtaatgacggcgcctgagggataaatgcgtggacccttgatgataccttcgtcaatggcgctcttaagaccaaataccggaccgcccacatctcgaacagtagtaaaaccgcgcatcagggtgtgcgtagcctcgtcgccagcaacaagattgaggtagccgacatcgccaaatgattgcaccggggtaactcggatcaacatcgcatgccaatggttatcgatgaggccgggcatcagtgtgcgtccgccgccttcgatattgcgaatttccgcgaggctatccaccgctagtgggtgtagggaaattgtttcgatcttgttaccacggaccaagacattggagggagcagacagcgtggtgctcttgccgtcgaagatgcggacattctgaaatagcgtagtccccccttctgccggaggcgcctgctgcgctagacatactccaccaaaccaactcgacagcgccaccgcgacggccagtgaacgacaggttgcgctacctcgcattcgccgccccatgcccagagtaatcgagaaaactcccagcatcacccgcgtattccccctctatgttctgtatcagcgacaggatatctttacgaatgatcagagcggatcgctctgattgcgccgaacgattttcagagccagggagattgcgccagcaacaagaaaggcaatgccgatagcggtgaagccggccgactcgctgcttaagccgaccgctgtcagcagcaaaccaaaaagcaggaggagcatacccgcgagcttcttgaccagaaggattggtctttcaactacgatcgccatcagcgtactcccttcttattgatcaattctcgctatgtcgctccaccgccgcccccatgcgtagggtcagcctgacctgcgccgtgggatgttaggccacgccgaggacaaatccgagcacccacactcggccgggaattcagcaggcatgacaaggcgccacaacgatgactaacgccaatgcctgtaaccgcaaatgcgacgccctctgcgccaccagcactcccagcgacgacgccgacgccgacgccgacgatgacgttccgggaggggccgcggtggcgggcctaagccaacttgcgccttctgtttcagattgctcgactcggccggaaggtctttggaaagtgcaagcggtatggcattggcctcgctgggccgcagagtaacgccgcaacccgcggcgaaggtgacacacaaaagtccacgaagcgcggcgcgacgatcgacggtgctcatggttcgatcctcttgtttcgttgcttcttattcttcgaactcaagacatgtggcactcttctacgtagcgaaaatctactgtagcgtgtatcacataagaatgaaacgacaggcgagctgacacaaccgggcggttgacgaagacacgccaatgcttcgcggcaggagcagccaggtgaactctatcactaaatctggatccatgttgctcggcttattgagaacaacaatcggcgttctcatccggatcgcgatagtcacatgggccgcactggccatctattactcgaacttgccttggagctggctgcgcacgtttttagctctggcatttgcggccttcgggatttgggcgctctggcgttcgcgccagcggcgcatgtccattctcttcctcgttttgtttcttggcgtcgtggcatggtggatcgcgattcctccatcgcacaatcgccactggcggccggaagttgcggtgatgccgagggcgacgattgatggcgaccgcgtgcgcctatccggtgtgcgtaacttcagctaccgcagtcggaacgagttcacagtaagctacgaggagcgtgaggtgtcgttggctcacttgatagccctggatttctatgtttcctattttactgaaggtccagttggacacacgtttgtgagtttcgtgttcgacaatgcgccaccgctcgccatctccattgaaacacgtcctgaggtcggcgaaggcttcgcgcctgtcgcctccttgttcaagcaattcgagctgatctacgtcgtaggtgaagagcatgatattgtaggtgtgcgcaccaactatcgccacgagccggtgtacctttatcgcctcaatacatctgttgaggacgcgcgccggctactgatggtctatttgacgcgcatcaacgaattggccgatcagccggagttctaccatctgctgaccaacagctgcacgatcaatatcgtacgctatgcaaatgcggcggg

SEQ ID NO: 196 - DNA, 88064 bp, Bradyrhizobium colbertium
  misc_feature (12981)..(12990): n is a, c, g, or t
  misc_feature (68011)..(68020): n is a, c, g, or t
ccggcgcgggccgcgccggtcgacatgacgagaccgatgccgagtgcaacagcggataatttcaatgcccgccagaacccccaccgggggtcttgcaccatcgaaccgctggtcatcgcgctgcgcatcactttacctgtttcatatcgtggccgattgccgctcgcacgcggctctaaccctcgcaaagccgggttccagctgccggtccgtatcggccgggatcagggcgcttttgcggcgggtacccccaggaaggaatcatacaatagcgccgccaccccagcaacgatggccacgtccgcgaggttaaacacataccaattataggtttttccggcgatctcgatgtggaacagggcgaaatccaccaccgcgccataggccaggcggtcgatgccgttgccgatggcgccgccgatgatgaggccgagcgcaatggtcgccagcagagtgtgcgagcgggccatccagactgccagcgcgaccaccgcgatacctttgacggccatcaacgcgaactgagccgcctgattgtcgctctggagccagccgaagctgatgccgatgttccaggccagcaccaagtcgaagaacggcgtcacccgcaccacgccgcggcgggcgaggtcgaacacattcaagagccacagcttcgtggcctggtcggccacgagcgtgaccacggccgcgaggatgccggcgcggagcggggtcatggccgaccgatcagacgctcacccccagcgccttccactcgcgcagcgccttggcgtcgcgcggggtgacgtcggggtattcagcgtcttcgccgaccgtcggcgaaatcttccaggagcgggcgcatttgctgccgactgccttctccaccacgacagcgactcccggcacggcatcgagacggaacgccgaagctggtgcctcgccctcacgcacctcgtagttcgaggtgatgcagatctcggcgaggtcggtgtcgaacagcgtcatcagcatgccgcgatcggcgacatagatcaccggcgaggcctccagcgaggagccgatgttcttggcggcccgttccagctcgagcgcgccggtgacgacgcgccggacgttgcggatcgcctcccacttcgcagcgagctcgtcgtcgcgcaaatcttcgagatcggtcgggaacagcgtcagatgcacggacggctcggcgtcgggccggtacatgcgccacgcctcctctgccgtgaagctgaggatcggggcaagccatttcagtatcgaggcgcacaacagatcgatggtcgtcaacgccgccttgcgcgtcgcggatgacggcgggtcgcaatacagcgtgtccttgcggatgtcgaaatagaacgccgagagctcgctgttgaggaaggcggacaggatcgcgaccacgctcttgtagtcgaactcccgataagccttcccgatcgctgccgcgcgcacggcgagctcgtgcagcatcaagcgctccaactcgggcatctggtcgggcgcgaccgcgtcggccggcttgtagtgatgtagcgtgccgagcatccagcgcacggtgttgcgcagcttgcgataggtttcgacggtgttcttcaggatttcggggccgatgcgctggtcgtcggtgtagtcgcaggatgcaacccacagccgcaggatgtcggcgccggattccttgatgaccgactgcggctcgatggtgttgccgagcgacttcgacatcttgcggccgtcctcggcctgggtgaagccgtgggtcagcacgatgtcgtagggtgcccgacctcgcgtgccgcagctttccagcagcgacgagtggaaccagccgcggtgctggtccgagccttccagatacatcaccgtgtcggtgccgccatcgaccttgcgcttgatgcccgacagtcccgggaaatgcacggggtcttccagcacgaaagcatgggtggatccggaatcgaaccagacgtcgagaatgtcgtcgaccttctgccagtcttcgctcgcgcgcgatccgaggaagcgctcgcgcgcccccttcgcgtaccaggcgtctgcgccttccttttcgaaagcttcaccaatgcgcgcattgacagcctcgtcctggaggatctcggcggagccgtcacccttctcgcgcacgaacacggcaatcggcacgccccaggcgcgctggcgcgagatcacccagtcggggcgggcctcgatcatgccgttgatgcggttttcgcccgacggcggcacccattgcgtcaccgagatcgcgtgcagcgcgcgggcgcgcagcgtatcgccgctcttggtcttgcctcccgtcgcgatgtccatagccccggccttgcccggggcgtccacaatcggcttgtccatcgcgatgaaccattgcggcgtgttgcggaagatcaccggcttcttggagcgccaggagtgcggatattgatgcttgagccggccgcgcgcgagcagcatgccccgctcaacgagcgccttgatcacggcctcgttggcgtcgcccttctcgcccttgtcggtgatgacgcgcttgccgacgaagccgggcgcatgatcggtgtaggcgccgttctcgtccacggtgtaggggattgcagtggtgatgccgcgcgcatcgagatcgcgtgcatgcgccatccagacgtcgaagtcctcgcggccatggccgggagccgtgtgcacgaagccggtgccggtgtcgtcggtgacgtggtcgccgggcagcagcggcacgacgaagtcatagccgccgccaacgcccttcagcggatgggcacattcgatcgcgtccatggtgtcgccagggacgtcacggactttctcataggcggtcacacgcgcctgcttgaagacttcttcagcgagcgcgtcggcgaggatcaggaggtcgccggtcttggtccaattgtcggcgggcgcgtccgtgaccttgtacaggccgtaggcgatcttcggcgagaaagagatggcgcggttgccgggcagggtccagggcgtggtggtccagatcacgacgcttgcggaggcaagcgcgccgtgcgcgggcgacgtcaccgggaacttcacccacaccgtatcggaggtgtggtcctcgtactcgacttcggcctcggccagcgcggtcttctcgaccacgctccacatcacaggcttggagccgcgatagagcgtgccgttggcggcgaacttcatcagctcgcgcgcgatctgggcttcggcgggatagttcatggtggcgtagggatgatcccaatcgccgatcacgccgaggcgcttgaactcctcgcgctgcacgccgagccaatgcgtggcataggcgcggcactccttccggaaatcgatcattgcggcgctgtcgcggaagtcgggcttctgcttgcccttcttgcgatagtgctcctcctcgaccttccattcgatcggcaggccgtggcagtcccagcccggcacgtagttggaatcgaagccgagcatctgctggctcttggtgacgagatccttcaggatcttgttcagcgccgtgccgatatggatgttgccgttggcgtagggcgggccgtcgtgcagcacgaacttggcacggcccttggcactctcgcgcagcttctcgtagaggccgatctcgtaccagcgcttgaggatctccggctctcgttgcggcaggccggcgcgcatcgggaattcggtctgcggcaggaacagggtcttcgaatagtctttggcttcagacttttgggacttttgcggcttttcggacatgaggctgactggctcggaagggcgcggaaacgaatggcgatgcggaatcgcgggcgaaacgacgaaatcccggtcttgcgccgagccttcaggctcaggcggaagccgggccgctaatccctatgatgcgccgcgcaaacatgggctctccatagcagggggccaggggaagcgcaaaggttcggaggctcgcttcaggttcagtcgaccgtcccgagccgcggaaacgcgtccggggcggcggccagcatggcgcgggcgcgggcggaatcgtcgtccatctggcggatcagggcctcgaggctgtcgaacttcagctcctcgcggatgaagccgatgaaagcgcagtcgaggagctgcccgtaaaggtcgcccttgaagtcgaacaggaagatttccagcagcggggcgccattgtcgaacgtcgggcggcggccgaagctggctaccccgtcgagccgctcggcgccgcggccgacccgcaccgcgtagatgccgtgcttgagaccgcaattggcgtcgaggcggatgttggcggtgggatagccgaggtcgcggccgcgcttttcgccatggatgacctcgccggtgatgaaccagggtgcgcccagcatggtcgtggcctcatccagctggccctcggcgagggcgatccggatcgcgctggaggacaccggccgttcgtcgatatcgacatgcggctgcacgtcgacctcgattccgagccgtggcgcctcgttgacgagcaggctcggcgagccgacgcgacctttgccgaaatggaagtcgtagccgaccgcgataccactgacgccgagacgtccgatcagatcatggtgaatgaaatcttgggcgctggttccggcacgggccttgtcgaatgtcatgacgacggcgccggcaaggccggtgccggccagaagtcgcagcttggcccgctcgtccgtcaggcggaattgcggggtgttggggctgaaaaaccgccgcggatggggttcgaaggtcaatgccagcgcagggcggccatgcgtccggcccatctccagggcagccgcgatcacggcccgatggccaagatggaccccgtcgaaattgcccatggcgaccacggcgcccctcggaatcgcggaatccggcgttgtgtcgcggataacggtaaaaggctggaccatcagggaaattctcgaagcgggcaggaccggcccggaccgtggcgcgaccggcccgaccaagtcaagcggggggagcgaagacattgaacacgatttcagtccttcgaacatgtcggcaattaacgcgctgtttaacgccttggtgctagtccttgagcgtggaactgccgggccccggcttggcagatccgatcctaatatttcctgggtttgcgttgggggagtcgagatggcggttgatttgtcgatgccggttctggtggtggatgactacagcaccatgatccgtatcatccggaatctgctgaagcagcttggcttcgagaatatcgatgatgcaagcgacggttcggcagcgctgaacaagatgcgtggcaagaaatacgggctcgtgatctccgactggaacatggagccgatgacgggttacgacctgttgcgcgaagtgcgcgcggatccgaacctcgccaccacgcccttcatcatgatcacggcggaatccaagaccgagaacgtgattgccgccaagaaggctggcgtgaacaactacatcgtcaagccgttcaacgcggcgacgttgaagaccaagatcgaggcggtcttcccggacatggcgagcgcgtaagcgcgcctcgcctgacaacattcatctgctgagatcgtcatgcccgggcttgtcccgggcatccacgttttggtgcagagagccgtggatggccgagtcaagccggccgtgacgggtcgggcacttaggcaattggtctaagtccgaactgtcgcggtcggccgaagccgtcaccacttcaattcgcgcatcagcgccttcggcgggtggccgaacaattccatcacggacgccgggtcgagctggtcgagaccctcgaactcctcggcatgaattccgcgggtcacgaacaggcaatcgatgccgaactcgcgcgcgccggttaggtcggtgcggacggaatcaccgatggcaagcaccttcttgcggtcgatctggtagccctgtcgttctccggcgagcgccatggcacgctcgtagatcggccggtgcggcttgccgtagaagatcacctcgccgccgagctcgcggtagagctccgcgattgcgccggcgcaatagatcagccggtcgccacgttccaccacgatatcggggttggcgcagactagcgtcagcttgcgctcgcgcgccttcagcatcatgccgcgatagtcttccgccgtctcggtctcgtcgtcatagaggccggtgcagacgatgtaatcggcttcctcgagcggagctgtcactgcgtcgaggccacgatagatcgagttgtcgcgctcgggaccgagccagaacatcttgcgaccgggatgctcggcgacatagagccgggtcagatcgcccgacgatacgatcgcatcataggtctcatccgcgacgccgagcttgcgcaattgccgctgcaccgagtccgccggacgcggcgcgttggtgatcaggatcaccgtaccgccgtggctgcgataggtgtgcagcgcctcgcaggcttcgggaaaggactccaggccgttgtggaccacgccccagatatcgctgagcacgacgtccacaccgcccacgagctcgcgcaggccttcggcgaaatgcagcgcagtcatgaggcgcgcggccgatcaaatgcgacgcgcgagcgccgcgttgccggtgatgcgttgtggcggaggcgcagaggacgtcgcgcctgcgctgggtgtagcggagccattaggtccctgaatgtctttcgcctggttaggtgaggtcccggcggtagcagatgccccctcgggccgcaatggccggggcggcgcgaacaggaacccctggccgaatcgcacgtcatagtcgagcaggtccacgaccgcgcgctcgccctcgatccgctcggcgatcaggtcgatgccgaagcggcccagcaggtccgaaagatcggacggatggatgtcggaggtcgaagcctgtctggggtcgagcagcagcgcagccggcaccttgatgaagcggaccccgcgatcggcgagctcgcgcggctcaatgcgcaggtccgtgacgtggtcgatcgagaaacggaagccgcgttgggcaagggcggcgagattctcggtctcggccgggccgagattgcggaaggtcgactgcttgaactcaagaaccagcgagggcgccagcgcccggttggcttcgaggaagtcgaggcattgcgcgaaggtggtggaattgccgagcgtggagaccgcgacgttgcagaacacgccgacgtccttgttgcggaccatcaggcgccgcagcacctgcacgcagcgcagcatcaccatgttgtcgatgcgcccgatcagcccggaggcttccgcgatgctgatgaactcctcggcggcaatcaattggtcgcgctcgtcgcgcaggcgcgtcaccgcttcgtagaaccgcaccttgcgttgtggcagcgtcaccattggttgcaggaagatgtcgatgcggttctcgtcaatcgcgttgcgcagcgtcgccagcagctgggtctgattgcgtccgttggcggtctgaaccgggttggcggattgagtttgaacgaccggcgccggccgtgggggcggtgcgggaagcggaggaggcgcgaccggcttttcctcgagtggggcggccagatcgatcatcgcctccggctcgggctttgtgaccggtgcagaaactggcgccggtgcgttgcccgccagcagatcctcatgagtcgccacggtcgtggcaagctgcctgaccagcccgccgagttcgttgatttcgccgatcaccgactggatgcggtcggagttggccgcatttgaggaggcgatgcgcccctcgatcgcggcaagccggcggccgaactcggccacctggcgggcgaggtcggcggtgccccgcgagaggtcggcgatctggccgccgacgtcgctgcggtcgcgcagccgcatcgacaccgcgttgtagagaatcaggaaagtcagcgcggtcagcgccacgatcgccgattgcgtcccgctgatgcccgcgaccgaatagagcacgagcccgagcgaagccgcgaccaggaccatgcagatggcgatgaagatcgtcgaaatgcgaatcatgccgcgggttcgcctcaagagctgactgcctcacccgggaaaacacgggtcgcgtccgaaccgtcgcgcctcatgctcccccaagcattgcaacaccctaacatcattgttgattcgaggggatagagactgtctcgcagcccacctcaggtcggcccggcgaaagctttgcagcgcgcgatgcggtcgcgggcgagcttgatcgcacgcagttcgcggcgctccaccgaaacgtcacgcgtcctccccggctccggtcgggaaatcaaggcgctctcagcgtaaaataacgcccctctcaaggccagcgagccgcacgtgccctagtcgttccggcgttctcaaccgcaggagattgcccatgtcgacatccgccgcgctcaagccagctccaacccaacccgaccttgccgccctcaagcagcgccagcacggcgcctggtcgtcgggcgactatgccgtggtcggcacgaccttgcagatcgtcggcgaacagctctgtgaggcaatcgacttgcgtgccggcagcaaggtgctcgacgtcgccgccggcaacggcaatgcgactctggctgcggcgcggcgctggtgtgacgtcacgtccaccgactacgtgccggcgctgctcaagcgcgggcgcgagcgcgccgtggccgaacatctcacggtcgagttccgcgaggctgatgccgaagcgttgccgttcgccaacgccagctatgacgtggtgctctcgaccttcggcgtgatgttcacgccggatcaggacaaggcggcttccgagctcgcacgggtctgcaggtccggcggcaaaatcggcctcgccagctggacgccgcaaggcttcatcggccagctgttcaggaccatcggccagcatttaccgccgccggccggggtgaagtcgccggcgctgtggggcacggcggcgcggctcgaagagatgttcgcaagccaggcttccgagatcgcggccgagccgcgcatgttcgtgttccgctatcgctcgccggaccattggctcgaaatcttcaagaccttctacggacccacgctgaaggcgttcgctgcgctcgacgcgaacggccaggccgcactgaatcgcgatctcctggcgctgctagaggagttcaaccacgccgacgacggcacgatcgtggtgcacagcgaatatctggaagccgtgatcaccaagcgctgacgacgcctgcgatgcggtcaggccggcccccggcctgaccgtcaccgggtcaaaatggcgcgttcgcgcccacggtgtcggcggaaacggcttggcgggtacccagcggcttcggccgccccgtggtcgtgtcgcgcagggtctgccgctcgatttccgaattcagctcggcgccgaacatgatgacgatcaccgacatccacatccacatcatcaggccgatcgcagcgcccagcgagccgtaggtcgcgttgtaattggcgaattccgagaggtaccaggacagcagggccgaacctgcgatccagagaatcgcggcggtgaccgcgccgaggctcagccattgccagcgcggcgcgtcacggcttggcgcgaagcgatagaggacggcgagtgcgacaagcaggatcaggaacagcagcggccatcgcgccagcgcaacgatcagcttgttttcgggcgccaggccgagatgattgagcgcaagggggaaggcgacgacggccccaaccatcaacagcagcgccacgatgccgccgacggtgaaggccagcgaaaccatgttgagccgaacgaagctgcgcttctcgcgttcctcataggcgacgttgagggcgtcaaggatcgccttgacgccggcattggcgctccagatcgcgagcagcaggccgaacaggaacgtgacaccgagtgtcgcattgccgttcgacaccacgcgggcgacctgctcctcgacaatctggaaggaaccctcgggcagcatggtcgcgagcgtgtgaagattggcgctgatcgtcgcgggatcggcaaacaagccgtaggatgagacgagtgcggtcacggccggaaagatcgcgagcaggccgaagaagacgacgccgcctgccgtcgcgagcagtcgatcctcgtcaatgcgctgataggtccgccaaaagatatccttccagccggcccaggggatctcgaagggacttttcgccttgcgaccgcggccgggctgcatcgccgccccggccggctgcgtttcgggggaattcgcttcccctctccggtgctcttgtggaggccccgatctgatcaggccgaaatccttgaagtagcgctccgcggtcagcacgaacagcgccgttgcggccacaagcacccacgagtccacctgatcggagcgccgcagcggcatttaggcgtccagtctctgactgcgacgccttcgccgcgccgctgtgaaccctgccagcccaaccgccgcaagcatgagcccgagctgcacgggccggttggcgcgaacgggccaggcagttctgccatggccgcgctcgccgggcgcgaacggcgccaggggaatggtcgtcgcgacctccttgacggcctgcttgaccgttccgcggggaatccgcgggctggcgatcgctacgcgcatccggctggcaagtggcacgatcggcttggtcggccgcttcatcatcgccatggcgacgccgccacagaccgccgccagcaccagcagcaccgcgccgacgaccgcgaatccccagaattgcccgtaggtgatggcgacccagcgataaagggcgatcaagccgacgaagaaagtcgcgatcgcgaacaatccggcggctgcaaacaggccggccgcgatcgcataggacgttgcgcgccccgtggcctggctggtgcggtcacgcatataagattgcgcggcgcgcttgagatggttgagcttgagcgccatgccggcgcgcagcaattcgcccgatggcgcgagcatgcggacatcctccgagagacagacagttcgtcgagggatgaacgttacggtatttgacttgttccgacggagcttgatcggtcgtgaggattcaaccgagatcggcggcggcaatccagaacacctcgccctcggagtcttcggtgtccagccagagcagcggcagctccggaaacgcctcgtcgaccaattcccggccgcggccgatctcgcagatcagcccgccgtccggcgtgaggtgatcgggtgcttcgcgcaggatgcggcgcaccacgtcgagaccgtcggcgccgccgtcgaaggcgatcttcggctccgccctgcactcaggcggcagcgccgccatgccttcggcgtcgacgtaaggcgggttggtgatgatcaggtcgtatctgttatcgccgaggggggcgaacaggtcgccgcggtagaggctgatccgatgctgaagcccgtattcgcggacattgcgcgccgcgacttcaagtgcacccttggagatgtcgacagcgtcgacggcggcgttcgggaaatgatgcgcggcgagaatggcgaggcatccagatcccgtgcagagatcgagcacgcgcccgactgccgttggatcgtcgatcagcgagcccgcattgtcctcgccgccgaaatgcgaatccaggagctcgccgatgaaggagcgcggaacgatgacgcgctcgtcgacatagaagggcaggccgcgcatatagatcttgttgacgaggtacgcagcaggtttgcgtgtggtgacgcgccgatggatgaggtcgaggatggtcttgccttctgccgcggtgacgcgcgcatgagcgaagccctcgaactggtcgggagtgagatgcagcgcctcgcagaccaggaaggcggcttccgccacagggtcggtggtgccgtgggcaaaggcgagcttcgcctcgacaaagcggctcaccgcataacggacgaaatcgagcagcgtcagaagctcgcctggcccgactttcgcgagctttggcgcggcgcggccgcgcacggtctttttcgcgacctttgccatcaggatcgggtccaccgtgcggcggcttcgtcgtcgcggatgtgggcctcgacccaacccgtgccggtggcgctctcttccttcttccagaaaggcgcattggtcttgagatagtccatcaggaactcggccgcctggaatgccgcctgtcgatgctgtgaggcggtcagcaccagaacgatgttctggcccggcatgaagcggccgacgcggtggatgacggtaacgccgttcagcggccagcgcgatgtggcctcgccgacatggcgcgcgatctcttcttccgccatgccgggataatgttcgagcgtcagcgcggcgaccttcgcgccgtcctcgtcggagcggcagatgccggagaagctcacgaccgcgccgatgtcggtccggctcctggtcaggagcgcgatctcgcgcgcgatgtcgaaatcgtcttcctggatgcggatggtgactgggcaggtcatgagcctagccgcccgtcatgggcgggaagaacgcgatctcgcgggcgcccgcgatggcggcgtccggcttgacatgggcgtggtcgatcgcggcgcggatcaccttcggcttctcgaaggcatacgcataggcctcgctctgaccggagagccaggcgatcagttcctccaccgtgcgcacgctggcgggcggctcgatgatctcctccgccttgccgacgcgctcgcgcacccaggcgaaatatttcaccttcatccctcgtcctcctcgatgaggtgatggatgccggcacggaaatagtcgtagccggtgtacatggtcaggatcgccgaagcccacagcagcgccagtccgatcatcgagaccaccggcaccacctgatcgccggccgggccggcgatcaggnnnnnnnnnnagccgatcgcaaccagctggaccgtggtcttccacttcgcgagcttggtcacgggcacgctgacgcggagcgcagccagatattcgcgcaggccggagaccaggatctcgcggcacaggatcacgatggcggcccaaagcgaccagccatggatgatgccgtcggcggcgagcatcaacaggcaggaggcgaccagcagtttgtcggcgatcggatcgagcatgcggccgaaagccgattgctgattccagatccgcgcataatagccgtcgaggtaatccgtcaccccggccgcgatgaaaagggcgaccgcgagccagcgcagccagagcggctgatccaggatcgactgcgcatagatgcatccgaccacgaccgggatcgcggcgatccggccataggtcaggatgttggggagggacatcgcgcggctggtcgtccctcgtgtcgtggcgatgttcatccgtcctaccaataccgctcaaggctgaaggtcaaccgttccgcttcccagatgggggcgggatacgacgaccatatgaccgcggtccccctttagttcaccccggctggggatggaaatactcgaaaatcctgcgcgcgctctcggcgctcacccccggaaccttgccgagatcggcgatcgacgcccgttcgatctccttcagggtcccgaaatggtgcagcaaggcacgtttgcgtgacgggccgatgcccggaatttcctgcaaaccggcctcgcggatgtccttcttgcgcagcttgcggtgcgagccgatgacgaagcgatgggcctcgtcgcgcaggcgctggatgaaatagagcacgggatcgcgcggctcgagcttgatggcctcgcgttcaggcatgaaaagggtctcgcggccggcatcccggtcaggccccttggcgaccgacatcagcgacacctgagtcaggccgagatttgcaaagatctcacggacggcgttgagctggccgcggccgccgtcgatgatcacgaggtcgggccattgcgggaagtcgtcgtcctttcccttggctacaccctcttcgggcggattgatcaggcgcttgaaacggcgctccagcacctcgcgcatcatggcgtaatcgtcgcccggcgtcagtccttccgacttgatgttgaacttgcggtactgatttttcacgaaaccatcaggacccgcgacgaccatggcgccgactgcattggtgccctggatgtggctgttgtcgtagacttcgatgcgcttgggcgggtgcggcaggctcagcgtcgcggccatggcctcgagcaaacggctttgcgtcgcggtgtccgcgagcttgcggccgagcgcctcgcgcgcattggtcagcgcgtggatgaccagttccttcttctcgccgcgcttgggcgcggtgacctcgaccttgtgaccggccttgatcgagagggcattggcgagcagctcgctctcctcgatcttgtgcgagagcaggatgttcctcggcggcggcttgtcgtcgtagaactgggcgagaaaggagccgagcacttcttccggcgtaaaggtcttctccgcgcgcgggaaataggcccggttcccccagttctggccggtgcggaagaagaacacttcgacacaggagaagccgccctcctggtggatggcaaatacgtcggcttcctccaccgtgcgcggattgatgccctgctgggactgtatcgccgaaagcgcggcgaggcggtcgcggtagagcgcggcgcgctcgaattcgagttcgccggccgccttctccatctcgccggcgagctcctgctttacggcatggctctttcccgacaggaagtcgctcgcctcgcgcaccagagttgaatagccgccgaagtcgatctcccgggtacagggaccggcgcagcggcggatctggtggagcaggcagggccgagtgcggctctcgaagaaggaatcggtgcaggagcggatcaggaacgcgcgctgcagcgcagtgatggtgcggttgaccgcgccggcggaggcgaacgggccaaaatagcggccgggccgggtctgggcgccgcgatgcttgagaatctgcggtgcccaatgatcgccggtgatcaggatgtagggaaacgacttgtcgtcacgcagctggacgttgaagcgcggccgcagctgcttgatgagattggcctcgagcagcagcgcttcggtctccgtcgtggtcgagacgatctcaacgctcacagtcgccgcgatcatgcgcaggatgcgggccggaaggggcgcactctggcgcgcatagctggacaggcgctttttgacgttcttggccttgccgacatagagcacgtcggcgttggcattgagcatgcggtagacgccgggcgaggtgggggcgagtcgaaccgcgcgttcgatcgcctcgtgaccgctcgccagtgggccttcgccgaccgtaccgctctcttccaggatatccggcagcagcgaatcgtcctcgtcgtcgcctgccgtcgcgggatcgaggtccggcgctgccagcccttcgggcggcgcgtcgttcgcggcagcctgcggcgacttgcgcgcgcggtcgtcccggttgtcggaggaattgtgaaccatggtgcgaatttaggcgctgggggtgccgatttgaagttccggccctgcggcgcgcacagaggagggcggccagttcccggtaacgcttccttaattctgttaagcgggcggtaacccgacttaacagccctttaacttaaaactctcgataaatcctacgcgaaaagtttttggttccgtaaccacgcgacgggccggcgcggcggcgcgggcatcgccaggggttgcgacagttgcgttggagtgagtgatgaagaggctcgttgtgggcgcagccgcattggtcgccgccggctggacggcttcggcaccggccgccgatctcaattacgggcagcgtgcgccctacaccgtcaatcagccgctcaatgcctatagctgggcaggtccctatctcggcggcaacatcggctatgaatggggctcggtcgacaacaaccccacgaagccgtcgggcttcgtgggcggtgtgcaggccggttacaatttccagaacggtccgtgggtgttcggcgtcgagggcgacatccaggcggccggtgccgacgacacctttgcgccgtggaagttctccaacccgtggttcggcaccctgcgcggccgcgccggctatgccttcagcaacgttctcttctatggcaccgccggtctcgccttcggcgagttgcgcggccagaccttcggctgggcggagtcgcatacgactgcgggttggaccatcggtgccggcgcggaagtgggccttgcgtcgaactggagcgtcaagctcgaatatctctacatcgatctgtcgacgagccagttcgcaattacgggggtgtcaaacggctatagcgccagcgttgtgcgcgcaggcgtgaactatcacttctgatagtgaagaagaaaataccggaccagcctcccggccgcttgcggccgggatttttttgctcaggacccgctaggagaggatcaccagattgaccgccttcggtcccttccccttcttgtccggttcgacttcgaaagtaatacgctgtccttcggcaagatccttcagtcccgcccgctcgacggcggtgatgtgaacgaagacatcgcgaccgccgtcgtcaggcttgatgaagccgtagccgcgctcgccgttgaagaacttgaccgttcccgtcatggccatcgggaaactccccctcattgctcctccgccgcgacgcagactcacgtcgcgacatgaccgggcgttacggagcccgggagctggccatccttggacggacctcatcggtccgacgggatctttcttagggccttcactccgccgcaaccattcgcggaagcggaacgtaaagccagtcacggaaacagcataatacggttcgttgcagattgactaccggtcctgcatatttttcccaagaacgccgaagcgttacggcctcggcacctcaagtcggaatctggcagctccgccctggcccagcggcatttccagctcgggcaggatggtcttgagttcgccctgtagcgtgtagggcggattgacgatcagaagcccggcggaggtgagagccttgctatcggcctgcggcgcgacactgaattcgaggcgcaggcattttcccggcggttttgctgcagctgcgagccgcgccaccgtctgggccagcgtgtcggtggcgcgccggctcttggcggggtaccaaattacatagataccggtcggccatttcgcgaaggcgaccgagaaggtttcgccaagccgttcgaactcgtccttggcctcgaagggcggatcgatcagcacgaggccgcgccgctccttcggcggcacgaaggcaggcagtgccacccagccgtcgagatcgaccacgcgggcctgctcgtcgcggcgcagcgcgtcgatcagagccttgcgtgccttcggctcgagctcgcaggcgacgagccggtcctgcggcctgagtaggccccgggcaatcaggggcgagcccggataagccctgagctcgcccttcggattgaaggcacggacgatgtcgagatagggcttggtcagcgctgcggtctcgttcgacaggcgcgcctgcatcagccgcgcaatgccggtcagccactcgccgctccggcgcgcctcgtcgctatcgaggtcgtagaggccggcgccggcgtgggtatcgatgacgcggaatgcggccggcttgtcctgcagataagtgaggatgcgcgccagcacgatgtgcttgatgacatctgcgaagttgccggcgtgaaaggcgtgtcggtagttcatggcggagagttacgacatcgcgcgatgaaagtaactgccgtcaatccggggcacgcgaagtgtgaacccgaaatctacgagattcccgtccggtactaactcgccacggcggccttcacccacctctgatcggtggcatcgtcacctggtcgcggcgacaggcgcggcgttcgatctcgtcgcacgcgcggaattgcagatccttgctgaggcagatgcggacctcggagagccgtgtccggttgcaggtgaccgagatggcggcattgctgagacccggattggcctggacgaaggcctcctcgacctccgccggcgagacggtcttggcttgcgacagatcgagataatcggccgggatcttgatcgcggcccgtgccttccggatcgtctcgaaatagctgcggccctcgagcccggagcaggtgccgtgcttgtcccattcgttgaagatcaagcccggcgccggcatcaagtcgagcatggaggagacgatgttgcgattcagccgcggggccggccgcttgcaatattccggaaaaccgctctcgtattgcggccatagcccatgcacgacaaaggcatagggccgtccgccgcattgcatctgcgaacggccgccgcgctcggcggcttcctcgcagaaggagggcgaccatgacagcgccagcacatagaaatcgaattcaccgggcgcgttctgccgcttgtcctgagcccttgcgtcgcttgcgaatgaggccaggcctgcagcaagcatcatggaaagggtcagcgagatcacgaggcgggagaatgaatgcaatctggaatgaaacatggcgacgcccctcaactagactgtgcaagcaagcctagcaggcgatgagaacatttcaagaacaaaattgatgcggccacggtcgagcagccagcgcagtccgaatcagggcttggcggcgcggcatgccggattgtaggcccagttgcggtcgagcccaaccacgcaccattcgacgccattgccgtaaccggcaaagccaccgtcttcgatgagcgagaaatgcaccttgcgcaccttgccgtcattgaggatagcgtcggcggcgcaataccggcgcggaatgttgtcggactgccaggggcggaatgcgacttcgcgaacggcggagaagccggtgatcttcaaaggggaattccagaacgagctttctttctcccagaactgggtggcgatcgtcggcagcgccctgtcgcaatcggcaacagtgccgtcatagcgcggcccgctcagccagaaattcatctcgagcggattggcagccttggcctcgccgagcgtcagcgctccgaacatgaggccgagcacggcggcgaagcgaagcgatttcagggagggggcgcgcatggtcaatccagacagctcaagtcttgcgaaggtcggacggtgacgcgaaggccggggcaggtcaagtgcagcgcggcaacacttggccaggagttgactgcaacgctgccgcccacagggcttcagttcttttcatggcgatcacggcaccgtagactgccctccagccaattggagtgacgggaatgcgaatcattgcggccgcgggccttcttgccagcctggttgtcccgggcatgatggcgagccagtcggcgcgtgccgactacgtgccgccgttcaagggcaacgacaccggcggcatcatcgcttactcgatggcgacccaggtcgatgcgcgtcaggtcgcggtcgatcactgcgcgcgctacggcaaggtggtgaaattcctggccgtgcagccctatgagggcggctacatctcgttctcctgccgctgggtgccctatggcgccgccgagcagccgatccgcacgctctactgagacgctgtcgtcacgccgcaattctcggccgggagcctccacatgacgcgcaaactcgctttgctcggctcgctgctttgcctcgtgttctccgcaggcagagccagcaccgacgacctgccggtgcgcaaggccggtctttgggaaatgaaactggtcacatcaggctcgcccgtgcctgagatgaccatgcagcactgtaccgacgagaccgtcgacaaggagatgagcaacaacgtctccccgatggccaagcagatttgcgccaagcaggagatcaagaagaccgcgaccggctatgtcagcgattccgagtgcagcgtcgcgggcgtcagcacgacgtcgcatgccgagatcactggcgacttcaattcggcctatacaatgaagaccacctcccatgcgcaaggcggcgtcgccggcgcggcggggcgcgataccaccatgacgctgcaagccaaatggttaggagcttgcaagcccgaccagaagccgggcgacatcgtgatgcccggcggcttcaagatgaacgtgcgcgacatggacaagctgaaggcgctgcttccgaagtagggccatggcggctacaccggaatccggacgctcgccctcaatccacccatcgggctgtcgccgagcgtgatatcgccgccgtgggtgcgggcgatgtcgcgggcgatcgcgagaccaaggccggtgccgccttcgtcctggttgcgggcgttgtccagccgcaggaacggcttgaacacctcttcgcgcaagtgagcgggaatgcccgggccgtcgtcgtcgacggtgacggtcaaatagcggtgatcgcgctggccggtgatggcgatgttcttgccgtagcgtgccgcattggtgacgaggttggcgaggcagcgcttgaacgaggccggcttcaccgtcaccacaggcaggccgtggaaggcgacggttgcgctgtggccgtggcgttcggcatcgctgcgcagctcctcgagcgcctgcgccatgtcggtcggctgcgactgctcgccggtatcgccgcgggcgaaggcgagatagtcctccagcatcatggacatctcgtcgacgtccttgcgcatgccctcgagctcggggctgtcgccgatcagcgcgagctcgagcttgaagcgggtcaggatggtgcgcaggtcgtggctgacgccggcgagcatcgcggtgcgctgctccatcgtgcgctcgatgcgcgatttcatttcgaggaaggcgactgcggcgcgccgcacctcgcgtgcgcccctcggacggaaatttggcgcctcgcggcccttgccgaagctttcggcggcatcggcgaggcgcaggatcggcttgatctggttgcgcaggaacagcaccgcgacgatcaacaggatcgacgacgtgccgaccatccagaacaggaagatctccgagttggaagcgtaggcggcgctgcgctgcgcgaacacgcgcatcacggcatcgtccagctggatgcggatctcgaccagattggagcggccgaccgtgtcgatccagaacgagcggccgatctggcggccgagctgcaccgacagcgtctggtcgagcagcgagaagaacggcttcggccctggcggcggcatatcgccggcaggcaggaagtcgacgacgaggccgagccgctgctgggcgatgcggcggatctggtcgcgatcccggtcctgcggatagcccttgtagacgtcgatgagtgcggcgatgtcctgcaccacagcggccgacaggcggcgcgtcaccgtgttccagtgccgctccatgaacacgaacgcgacgaccgattgcaggatcaccataggcacgatcatgatcaggagcgcgcgagcgtagaggccggtcggcatccagcccttgaacgcgttgcccatccagccattggcggcggagacgcggccggcagcgctcttgagcagcgtcaggccggtatcgatcgtgctcatctggcgcgcttcactgcgttagggcgaggccaccagccggtagccgatgccgcgcaccgcctggaggaatagcggattggcgggatcggtctcgatcttgcgcctgaggcggttgatctgcacgtcgacggcgcgctcgttgacgctgccgttcccggtcagtgcgctacgtggcacggtctcgcccggtgtctccgagagaatgcgcagcatctcgcgctcgcggtcggtgaggtggatgacctcctcgccctggcgcagttcgccgcgctccagatggtagacgtagggaccgaaggcgatcttctccacggtcgcggcctgcggcggcggggcggcgcgcttgaggatgttgttgatgcgcagcgcaagctcgcgcggctcgaacggctttgccacgtaatcatcggcgccgatctgcaggccttcgatacgggcttccgcctcgtgccgcgccgtcagcatcacgatcggaaccgaggaggaggtgcggatgaagcgggcgaggtcgaagccggtctcgcccggcatcatcacgtcgaggatcaggaggtcgaaatgcaggcccagcagtttcgagcgcgcatcgccagcgctcgccgcggtggtgacccggtatccttcgctggcaagaaagcgcgagagcagatcgcggatgcggcggtcgtcatcgaccagaagcaaatgtggggggtcgtcggcggggtggaccggcgggcgggcgagcgtggcagcgagcggcacggtcactccttggcgtcgtggttgacggaagcgaagatcgtctcgagcaccttgtccggatcgtcgcggtcgatcatcgcgcgaaggaagcgcttcacggtctcggcgtcctgcggcgtcatctcggcaagcgccctggtgatgcgcgtggtctgaagtccggcgagcttctgcaccagcgcctcgcccttcggcgtcgcatagagcagacgctggcggcgatcattgtcgccggtcttctgcacgatatagccttcatccaggagctgcttgagcacgcggccgagcgactgtttcgtgatgcgcagaacgtcgaggagatcggcaaccttgagcccgggatagcgatagacgaagtgcatcacccggtgatgggcgcggccgaagccgaaagcctcgagctcctggtcggggtcgccgacgaaatcgcgataggcgaagaagagcagctcgatgatatcccagcgcaaattgcctccgtcatcggccgccggccggggcacggcagcgtcgggagacgaagtggcgaaatttatgtcaggcatattgacgtatcttgggttcaatgttacaaaaccataagcccgcacgaaattttagatcgtttcgcgtcgggtggcatcggagccacgcggcctgagagtgccggacaggcgacgacggccgaaacagatctaccgtgcgattgtcgagcggcatttcggcaaaacatactggacttccgccttccgcaaaagcatgtcctcggcggcatgctggccacggaaaccggccgtaacaaggctggcggcgatccggcagaaaccaatcaaagccagccgggcccggagcgggcagggcgggcgccagaacagcgccgccaccggcagcgggaggcaaggacatgaccatgaaattcgatatccagcccgcatccaatccaacccctgaaaaggaccgcgtcgccaagctggtggaccccggcttcggacgggtcttcaccgatcacatggcgattgtccgctacaatcaggccaagggcggctggtatgaagccaagatcgaggcgcgcgccaacttccagctcgatccggccggtgccgtcctgcactacgcccaggaaatcttcgaaggcctgaaagcctacaagcgcgacgacggcggggtgaacctgttccggccggacgccaatgcgcgacggttcagggactcggccgaccgcatggcaatggcccagcttccggaagacgtcttcatcgaggccgtcgagcaggtcgtgcgcatcgatcgcgcctggatgccgggcggcgagggcagcctttacttgcgtcctttcatgatcgcgagcgagacctttctcggcgtcaagccgtcgtccgaatacatctttgcggtcatcgcttcgccggtcggctcctacttcaagggcggccctgcgccggtctcgatctgggtgtcggagaactacacgcgcgctgcggtcggcggcaccggcgccgtcaagtgcggcggcaactatgccgccagcctgcgcgcccaggccgaggccatgcagcacggctgcgatcaggtcgtcttcctcgatgcgatcgagcgccgatacgtcgaagagctcgggggcatgaacgtgttcttcgtgttcgacgacggctcgctgtcgacgccgcccctcggcaccattctgcccggcatcacccgcgactccatcatcacgctggcgcgcgacgccggcaagaccgtgcgggaggagccgtattcgctcgagcagtggcgcaaggatgcggcgagcggcaggctcaaggaagcctttgcctgcggcacggcagccgtgatctcgccgatcggcaaggttcgttcggtgagcggcgatttcgagatcggcggcggcgccgccggccccgtggccatgggcctgcgcaagcagctggtcgacatccagtacggccgcaccaacgatccgcacaactggatccgcaaggtgttctgagggacgtcgaaacgtttcccctttctgatcaggagaggggaaacgtgcaatgcttgtggcttatcatgcactgaacgcaccgccataactcggcgacaaagccaggatacatcaaggcatcctggatatcgcgatcatggcaaccaagctctcgcagcccatcaagtgggtcgttctcgccgcaatcaccggcgtctccgtcttcggcatcctgaccgtcggccccacgcacgaggtcgtcgcgcaagaccgctcgccgatcgtcgacgtgcgcacctccgatcccgagatgaacgccgcgatcgtacgcgcccgtgccacgctcccgaccttctgggcctcctatgagtcgcccaagccgtccgaggccgggcattccctcaaggtccgcttctcgacccggaagggcggggagcacatctggatcggtgaggtgaagaagcagcccgacgggaccttgaccggcctcttcgccaacgagccgcgcgacatgccgggcaagcgggccggcgataaagtcgcgttcggggaagctgacatctcggactggatgttcatgcgaaacggcaagatcgtcggcggcgaaaccatcaagccgacgctgaaattcctgccgaaggccgatgccgatgccctgagggcccggctggagacgccgtaggacggagcgtcattccggggcgccggaagcgcgaaccctggtgcgcaattgcgcacctgaggattgcgagatttccgggttcggtgcttgcgcatcgcccgggaatgacggcgttccccaagccccccgttgccgccctgcgtcccggctggtaaacgccgcgcatggccgagaaacccaagaaaccgcagaaattgaaggcgcgcctgccgcgcgggctggaggatcgcgatccctcagcgatccgggcgacgcgcgagatggtcgagaggatccgcgccgtctacgagctctacggcttcgagcccgtggagacgccggcgatggaatacaccgacgcgctcggcaaattcctgcccgaccaggaccgcccgaacgagggcgtgttctcgttccaggacgacgacgagcagtggatcagcctgcgctacgatctcaccgcgccgctcgcccgctacgtcgcagaaaacttcgacacgctgccaaagccctaccgcagctatcgcgccggctacgtgttccgcaacgaaaagcccggcccgggccgtttccgccagttcatgcagttcgatgccgacaccgtcggctcggccacgccggcggcggacgccgagatttgcatgatggcggcggacacgatggaagcgctcggcattgcacgcggccagtatgtcgtgaaggtcaacaatcgcaaggtgctggatggcgttctggaagccatcgggctcgcgggtgacgaaaacgcaggccgcagactgaccgtcctgcgcgcgatcgacaagctcgacaagttttctgccgacgaagtgcgcaagctgctcggtcccggacgatgggacggcggcgaggaaggcaagggcgacttcacgaaaggcgccaatctgagtgcggcggaagctgacgttgttctcgccatcaccaagccgcgcgacgattggaaagaggccattgcggcggcggaaacctacctcgccaagagcgaagtcggtcaggccggcgtgaacgagctggaagagatcgcccggctggtcacggcgtccggttatgacgcggatcgcatcaagatcgatccctccgtcgtgcgcggcctcgaatattacaccggccccgtctacgaggtcgaactcctgctcgacaccaaggacgagaagggccgccccgtacggttcggctcggtcggtggtggtggccgctacgacggcctcgtctcgcgcttccggggcgagccggtgccggcgaccggtttctcgatcggggtgtcgcggctgcaggccgcattgacgctgctcggcaagctcgacacgcggccggaattcgggcccgtcgtcgtcaccgtgttcgaccgcgaccgcgtcgccgactatcagaagatggtcgcatccttgcgcgcagccggtatccgcgccgaactctatctcggcaatcccaagaacatgggcaatcagctcaaatacgccgaccgccgtaactcgccatgcgtgatcatccagggctcggatgaaaaggcgcgtggcgaggtgcagatcaaggacttgatcgaaggcgccaaggcggcggcagcgatcgcctccaaccaggaatggcgtgagactcgcccggcgcaattctcgtgcagcgaggccgacctcgtcgccaaggtgcgcgaggtgctggcgcgccatgacgtgagttggggctagccattcgccgcgatcgtcatgcgcgggcttgacccgcgcatccatcttcaaaatgatggactgccggatgcagacgagtgtacgtagtctgcaagagcagacgactacgccgggcaatgacgaagcaggcaataccgaagcagcagggagacaacgatgcctgagatcaccatcagcatggccgaaggccgcaccgacgagcagaaggccggcatgatgcgcgacatcacccaggcactggtgaagaatctcggcgtcgatgccgaagccgtcgtcatccagatcaacgaggccccgctccgccacaagatgaagggcggcaagactttcgtggagcgcgcggcggcggcgaagaagtgacgcgttagcgtcattccgggcacccgccagggctgaacccggaatctcgatcgacaatccctggattccgggtttgcgcttcgcgcgtgccggaacgacgagcggtacccatggacgcacgcgacttcatcaagcccggcatgagcgccgagcgcacgctggtggtgccgaccgagcgcaccgtcgggcacttcgtgcccggcatgcccatggtttacgcgacaccgatgatgatcctggagatggaaatgacctcgggcgatgcgatccgcgccgcgctccagccaggctgggtgaccgtgggcaccgaggtcgacatccgccatctcgctgccgccctcgtcggcgcaaccgtgcggaccaccgcgaaggtggtcgcggtcgagcgccgcgtcatccgcttcgaggtcgaggcgttcgaaggcacgcgcaagctcggtgaaggccaccatgcgcgcggactggtcaatgtcgagatgttcaacaaacggctcggagcctagcgcggccgtggacttcgcctaacccacctttcgggcttgtggagacgaatacgacgtttcctgctccttgcggagacgcacggcaggcagcctctcgtcaatcgtcacatccgcccaggtgatacaggcgtctttggcgaccgccttggtcaatcgcacattgtgcgcaagcccgagcggcagatagcccttttcaagcgaggtgctggcgggcgtcagcttgccgaagacggtgtagccgccttctccgtcgagcgtgtctccctcgcgcaagtccttcttggctgtggcggcaacatcggcgttgaacgtcgtggcaacgcctgtcgcctcgttgcgcagagcgatcgaggcaactgaaattccaagctccagccctatgagatgccacttcttgtaggagctcatgtaacgaccgcttggatcggtgacgacgctgtattcctggaaacagttgcggatgtaatcgctgtcgccttcgaaacagacccacacgcccttgcggatgtcgttggggatgggtctgccttcggccgtcaggcaggacacgacctcgacttggcccttggattccaggatgccgccctccgaacgggggcgcatcagcgtcgggatgtcgtcgaccgatcccggtgggaatgcgaggccatgcgagggcgccttcaggcctgttgcgttcgcgattgcggcggattcgatcgcaggcttggagccgtcgaggaacgcgttgaacatctttggattcatgccgccgcgcgcagcttgctcggcagacaatccccagtgatcccagaccgtttcgggcgtcgattcccggtaatgcggcagccatttgtggccgcggcccgctgccacgacgggaaatccgcaggccctcgcccaatctacgaggtcgcaagcgagggccggctgatcgccataggcgaggctgtagatcacgccggcctgcctggctctctgcgcgaggatcggtccgcagaaggcgtcggcctcgacggtcacgttgatgacggccttgcctgcagagaaggcgccgaggcagtgctcgaccgccgcgacaggattgccggtgcactcggcaatcacctcgatgccttcgcacttcacaagcgcttcccagtcgtcggtcaggaaggtcgtgccgttcttgagagcatcgccgagcgaggccgcggcgaattgctccgtgcgccagcccacccggttcaggttttcgcgggcacgcgatggagacaggtcggcaattccgacgagatggacgcccggcgtacgcaggacctgatgaagatacattgcgccgaatttgcccgccccgatcagtccgatcttgatggggcgccgctcggcctgtcgttccagaagttttgcgtagaggttcacgatcgctctccctatcggcgacagccgggatcgccgcgcattcggccgccgaggtgccctgatccgtctacttcgccagttccttcgaccgctttgtcgccgcggcgatcgcgcggatcatcagctcgcgcaggccgggctcgcccatgagcacgctgagcgccgccgcggtggtgccgccgggcgaggtgacattctggcgcagtgtgctcgcagcaagctccgatcggtgcagcagctcgccggagcccgcgaccgtctcgcgcgcgagcttcgtcgccagcgcttcgggcaggcccgcctcgaccccggcgcgggcgagctcctcggcaagcaggaacacataggcggggcccgagccggagacggcggtgaccgcgtccatcagggcttcgtcttcgacccattcgaccgagccggtggcgcgcagcagcgcgtcggccaccgcgcgctgcccggcattgacgttcttcgccgcaaccgcgacggtgatgccgcggccgatcgcggccggcgtgttcggcatcgcgcggaccacggcgccgccgcagacctcatcgagcgaggcgatcgtggtgcccgccatgatcgagaccaccgaggtcttgtccgagatgaacggtttcagcttggcgcgggcctcgcggaacatctgcggcttcaccgcgacgaccagcgtctcgaccgggccggcggtcttcacatcgggattgagcacgacgcccttggcggccagtgcggcgatctcgggcgcgatgtgcggatcgaccaccgcgacccgccgtggatcgagtccgcctgccagccatcccgtcagcatcgcgccgcccatcttgccggcgccggcgaggaggatggtaccggtgatgttttggagggtgctgctatctgccactgcgatcaccttagcaaacggtgccgtccctgcgaacgcaggaacccataaccacgactggttctaggggatggagcgcagggcaacaagcgtcgtgccacgaggcatcgggcggtgtgggttccggatcatcgcgccgctcgtccgggacgacgacgaccagggagctgtcgcgcctctctcacgacatccgagagccctacgcctctccgaccgtgtcgaacatcgcggcgtccatggcctgtgtggtggtcttgccggcccagaccacgaactggaacgcggggaagtagcgctcgcaggcgtggatggcgccggccagcatggcttcgcactgcgccgtcgaggcggtgaggccgcccggcagcacaagggcctggcgatgcatgaccatgccggtgttggtccacaagtcgaaatggccgacccacagctgctcgttcacggcggcgacgagccgctgcacctcgccgcgccgggcgggcgggatcttcatgtcgaaggcgcaggccagatgcagcgcctcgatctcgcccatccaggtgaaggagagctgatagtcggtccattgtcccttcgagacaatcgtgagttcgtcttcgccggagcgttcgaacggccagttgttgctggcagcgatgtcctcgaccaccgcaagcggatggcttctggaatcgatagcgccttcgagcagggacatgccgtctcgacctcttgccttcttgttgtccttgatacgcacgcggttgggcccggcgcgcgctacctagacgctaaccgcgatctccggagtcgctctcgcgatcccctcggatcagcgcgggcctgtcgcggatcaagtgatgtgattttcggaatctgcgcaacggggtcgcgagtccgtccacaagccaggactcgttcgtccacagctcatctccgccacaatccttaacggatgagaacaaatcggaatcggattcggcaaaagacgccgagcgcagttccgccaggcgagccgagtcgccgtgacggcatgggaccatgcgcttggcccatgcggaacatgcttgccgcgccggctcgccggctgcatatttcccgataggccgttcattccgggcggccgatgttctcagggcggggtgaaagtccccaccggcggtaagggccgaaaaggcctaagcccgcgagcgctttccgtgaggggtatcccgcagggaagggtcagcagattcggtgcaattccgaagccgacggttaaagtccggatgaaagagaacggtcggtggcagacgcatcgcaaggtgcggctgtttgtcgttccgtgtgccctgattctggtccttaaaccgaggaaagccatgaatcagatgttgcaagatccccaagccgaaacctcccaaacagagcccacgcaggttcccgcagacctgccgccggcgcccgaccatccgcgtttcgccaagccgcagcgggtggccttcgtgcaggcctgctggcaccgcgacgtggtcgaggaagcccgcatcgccttcctgaaggaggcggaagcgcgccatctcacccacgtcgacgtgttcgaggtgccgggctcgttcgagatcccgctgcacgcgcaggtcctcgccaagacgcggcgctacaccgcgatcgtcgcggccggcctcgtcgtcgacggcggcatctaccgccacgagttcgtcgctgacaccgtgatcaaggcgctgatggacgtgcagctgcgcaccgaggtgccggtgttctcggccgtgctgacgccgcagcaattccatgagaccgaggtccactacgacttcttccgcaagcatttcgccatcaagggcgtggaggtcgcggcagcctgtgcggagacgttgcttggtctggagcgcctgcgcggccaggtcgctgcgggaatcgttggataggcgatggccattccgggccgcgcgacgcgcgtgcccggaatcggtgcatcgacatcgattgcggcaagatggattccgggcccggcgccgccgcgccgcccgcgcttcgcgcaggtatcggcgccaatccgcctttcgtcagcctaacgatacacctgcctttgcccggctgattccgagggtcaggatgcggtgcaggagatccggatattggagcccgtcatgttgagccgcggtggcgaactcctggttcctggcgatttccggattcgggtttgcttcgatgaaatagggcgtgccgtcggcggagaggcgaaagtcgatgcgcgcatagccgtcgaggcccaggacctgatagatgcgttttgcggcacgctggatgcgcgcggtgacttccggcgtgaggtcttttgcaggcccgtcgacgatgccgacccgctcctgataatcggtgtcgtgcttggctttctcggtggcgatgtgccgtgacctgcgcccgcccatgttgccgaatttcagttcccaaacaggcagaacacgcagacggttgttgccgagaacgccgacatagagttcgcgtccctcgatgaactgctcggcgatggcggcggtttcgctccgctcgtggatgaaggcgacgcgttccgcgagcttctcgtcggtgtcgacgatggaggcttgcgagatgccgaaggagccatccatgttcaggctcttgacgatcagtggcagcgcaagacgcggggggcgcttgaccttgcggcgcattgggaaaacggcgaaggccggcaccgcgatgcggcggtgatgcaccagcgttttggacagatccttgccgcgcgcaaggatcaggccgcgcggattgcacccggtataagggaccctcatcagctcgagatagctggcgatgtgctggtcgtaagcgacgttggaatggaattcttccagcagcgtgaaaaccacgtgtggcttgaactcctcgatcgcttcgcggactggcttgatctcctcctgcgccccgagcgggcgaacctcatggcctgcctcgcgcaaggtgcttaccacgtcatattccgttttccacgcgttgatttcctgtgcggtgtatccgtcagaggagtccggaggcaggaagtccggatgcatcagcacgagaatgcggagacgtctcatagcgcgatccatttgcgccgggacgggccaaacagcgcgtgcatcgtcttggcggtcacgaggacgatgaaatcgaggacgagcttctgttcggggccgacggcccgcaaatcgagatcccggcagcgggaaatcatgtcgtcaagcacggcatcgagcgtgagctggttctcgcccgtccatcgcgcgaccaattgcctgatctgggcgcggtgccgcctgatcagggtcgaggccggcgttgatcgatggtgacgtggatcggctgaaaacagccgggacaggtcgcggtcgtaggttttcggtggcgtgaaggcgtagaacgcctgcttcttcttgtagtgctcttcgagggtctggctgagccggctcagcgggtcgacgcgctcccgcgtcgtgatctgcggccgctttcccgcgatctcgcccatcaactcgtcgacatattcgagcttcttcagcgccggccaaccggcatatcgggtccgccagttcgagcgcggccgcagccacaccgcaaaggtctcggcgaaatcctcgtcgggatggctctgtgcataccagagccgaaggtgctggacgtaacgtctgctggccggattgggccggtagtagcgcgggtagcgcttcgacgacgggccgaacagctgttgccagcgccgccgccgctgcaactggtaaccatgctgcaaggcatgcccggcctcatggcggaggatagccatgcactcgcgccaggttccgccctcgacgtcgaacatcatcttcttctcgagcttcatcaggcgcggatgggcgagataaaaagggatggcgatgccgggcacgtcgccggggctgaaccattcgctcgagatccatgtgtgcggccgcagccggatgccccgctcttccagttcctcgtagagggtgccaacgcagtcttcgagccaggtgccttcgactgtaaccttcaggctgcggaggcgttgcttgagcaacgcgtcatccgacagcttctcccaagcaaatttccggcgtggcatcaggcatccagaggcagagatgactcggtatctcgatgatgtcacgggccgccgctggcaacaaccggcgcggccaggctgcggtggggcgatggccgaggtcagactgtcatttcgggggcgtgcgttgcacgagccccaagtcccttgatgtgcaacggttcgttgggagacggactccggattggcctcgccgaaggccccggaatgacgggggtgaaaaagtcagtcgaacaggctcgacaccgactcctccgccgccgtgcgcgcgatcgcgtcggagatcaggctggcgatcggcagcgtgcggatattcggcgccttggtcaccgcatcggtcggcaggatcgagtcggtgatcacgagctctttcagcttcgagccggagatgcgtgccgccgcaccgccggagagcacgccgtgggtgatgtaggcgtagacgtccttggcgcccttggcgatcagcgcgtcggccgcgttcaccagcgtgccgccggagtccacgatgtcgtcaacgaggatgcaggtgtagccggcgacctcgccgatcacattcatgacctcggactcgccgggacgctcgcggcgcttgtcgacaatggcgagcggggtgttgatgcgcttggcaaggccgcgcgcgcgggccacgccgccgacgtcgggcgagatcaccatcaccttggagaggtcgaacctctccttgatgtcgcgcaccatcagcggcgccgcgtagagattgtcggtcggaatgtcgaagaacccctggatctggccggcatgcaggtcgagggtcatgacgcggtcgacacccgcctgcgtgatcagattggcgacgagcttggccgagattggcgtgcgcgagccggacttgcgatcctgcctcgcgtagccgaaatagggcagcaccgccgtgatgcggcgtgccgaggaacgacgcagcgcgtcggtgatgatcaggagctccatcaggtggtcgttggccgggaacgaggtcgactggatgatgaaagcatccgagccgcggacgttctcctggatttcgacgaagatctccatgtcggcgaagcgccgtaccaccgccttggtcagcggcagatccaggccctgcgcaatggcctgggcgagggccggattggagttgccggcgacgagcttgatggagccgttcttggccgacatggacgcttcctcccgcgctttgctggatacgacgttcaacatcagagaatacccactggcagcacggttacgacgcgcgaggaaatatcaggcgggaggctgcaatggcaacccgggatgctacgttttcccttcgaaaatcctgagtcgggccaacggcttggccgcaagttgaggccttggtttagcaggggttattggtcggcatagcctagcgccgaagtcggcatgtccgacagcggagcgtccttgatgacgctcgccaccgctggtccccgcaaggccggagccgcgcccggggcatccggcgttccgttgatcatgttggaaagtccgctgaatccggcctgggcgatcttccgcaacacgaggtcgtcggcagccgcccacgcgtcgcggccgcccttggccgaggtcggttcctcgccggagaggcgcagcgcccgctgctggttggcgtcgtagacgtcccagacccaggcaatcacggtcttgccgcgcacgacctgggcggagaggtagcttcgcacgcgataggcggcagtgccctcgcgggagaccaccgacaggctgcgcagcttggattcgctgtcgagcaccccgaccatgcggtcgaacacctgcggcggcggtccgtcgatcgattcgaacgccaccgtcgcgctgctgccgccgctcggcgccatcgcataggagttcgcggcaccgccgccacctccggcgcagccgccaagtgcggtcgcagccgccagcagcatgaccgccagcgcgcgcgaacccgcgcggcgcaaagtgaatgacgcgtccctcattatggagggcagcgatatcgttaaaatcgattaaggtctagggcagccgcgccacagcgcaccgtcatcgtgtccgggatcacccccggaatgacacggggttgcctatgtgttcacgtctcgagcgcgatcgcgtgaatgtggcggccgtaatccggctccttgcggtgcaccgagcggcgatagctgaagaagcgttcgtcggcataggtgtcgagcccgagatcgtcgatcatcaggatgccggcggattccagccgcttgcgaacgaagccggcgagatcgaacatcgcgtggccctcgcgcacagacgggatgaagaacatggcgttgtccgcatccgcctcgatgaagcgcgtcacgaactcgttgccgacctcgtagctctcctggcggatcatggggccgatcgcggcggcatcatcgccgcgcgtggcaccaagcttctccatcgccgagatcgttgcttccagcacgccggtcagcgcgcccttccagccggcatgggcgccgccaatcacgcgcgcattgggatcgacgaacagcaccggtccgcaatcggccgtggagacgccgagcgcgatgcccggcgtcttcgtcaccagcgcatcgcccttgggccgcggtccgttcggccagggcgcatcagccacgagcacgtcgggcgaatgaacctggtgcaggctgaggaagcgttcgggcgcaacgccgacatgctcggccatgcggcggcggttctcggcgcccaggttctgatcgtcattggagccgagcccgccgttgagcgcggcatagatgccgctggagacgcccccctcgcgagtgaagaaggcatggcgcaggccgggcacggcggacagcagcgacgaagcaagtgtcatgaggcttctcctgcctgatcgaggtcgctgaggccggcaaggcccgtcaaccgcggctcggagatgccaagcaccttgaacatcgagcccatgccgccacgcccggtatcggtcaggcgcttgagcgccaccgaaatgtctgtggcgacttcgggcgtcgccttttgcatcagcgcggccgcgcgggtgtcgatgccgatccgcttgaggaagtcgccctgcgtcaccgggccgtgcacgcgcgcgccgacatcctcggcggcgcgcgccagcgcctggaagtcgacatgggcggtgacgtcggcctggcccggcgccttcaggggatcggcgaaggtatggcgcgcgatcgcctggaaggtgtcgccggcatcgctgcgcaaatggccgtagtcgatgatcagcgccgcgccgtcctggtcgcgcacgcgcgtggcgagcttcatgatctcgccgtcgggccgccactcgaacacggcgccgacgggagcggcgcgcaccaagggtggcagcagtacgtcgaagcgcggggtcggctccggcgctgcgccaaactgaagcttgccgttcgcatcgatctcgatgacgcgctcgtgccagccgttctcgtggcggatcatctggtggatcggcagcacgtcgaaatattcgttggcgaggatgatgcttggtccttccggcacctcgtcgatgctgtcgtgccaggcgatgttgcgcacgttggcgagcgtcgcgctctgccgttcacgcaggaccggattgacctcgaccatgtggatgtggagcgcctggtacagcggcggcagcacgcgcaatgcgcgcagcgcgtccgccatcatggtgccgcgcccgggaccaagctcgatcagccgcaggaactgcggtgagcccatctgcttccacaccgaggcggtccacagtcccaggagctcgccgaacatctggctgacttcgggggctgtggtgaagtcgccctcgcgcccgagcggatcgcgcgagacgtaatagccgtagcgcggatgcatcaggcacaattccatgtaccgccagaccggcatcgggcctgaagatttgatcagggccttgatctcgttgaggagcggcgagtcggtcacggcctgctttctggagatgaactagctaactgtctcgatcggcttcggcgcaccgcgcctgattgccgatacaataagtataaggcctacgataagcatcgggatcgacaacagcatgcccatggttaatccgccccagagatagccgagctgggcgtccggctcgcggaaatgctcgccgatgatccgggccagaccatagatcaggatgaacgcgccgaggatcatgccgggtcgcttcagcgcgccgaggcggatcatgacggccagcaccgtgaacagcaggatgccttccaggccggcctgatagagctggctcggatggcgcgccagctgcgtcggatcattggggaagatcatcgcccagggcaggctcgcatcggcggcgcggccccacaattcgccgttgatgaaattggcaatgcgcccgagcagcagcccgaccggggcgaccgcagtggtgatgtcgccgagggacaggatcgggatgccgttgcgataggcaaaccccatcaccgccacgacgcagccgaggaagccgccgtggaaagacatgccgccctcccacaatctgaagatcgcggcgggatgatcgatgaagaagggcagattgtagaacagcacgtaaccggtgcggccgccgaggatgatgccgagcgtgacccagaggatgaaatcgtcgatctgcaccagcgagatcggggccggtccgccccacaggcgctcgtttttcagcagcgagcgcgcatagagccagccgaacacgatgccgcagatataggccagcgcgtaccagcggatcgcgaacggaccgatctcgatcgcgatcggcttgaaggcgggaaagtcgatgagcagatagggcatcgcgccttccatgtctggacgagatcgcagcgaaggagcaccggcaggcgccgtgtgattcttcttatgcagggaggttgaatacgattgcaaggaaaccggttcatgacaaggatgccgcgcggcggcccttgaaccattccctgcggattgccattgtctttcgagagttcgcgcaaagtttatcggagaccgaaatgacccagaccaacaaccggtttttcgacgagatcggccgcctgatgaacgatgccgccggtgccgcccagggcgtcaagcgcgagttcgatacggtgatgcgcacccaggcggaaaaattcctgcgcgacatggatctggtcaagcgcgaggagttcgaggcggtcaaggacatggcgcgcctcgcccgtgaagagaacgaggcactgaaggcgcggatcgcagcgctcgaggcaaagcttggcgggacgccgacgctctgaggcaataacaggcccgggcatcgccaaatcgtcatggccgggcctgacccggtcatccatcttcctcaacagccgtcgctttgcgtgatgggtgcccgggtcaagtccgggcatgacagcggcccattctccttgtcatttccgcatcttccgggtaaaagcccgccacgttcgcagcccccgcacccctggaggcttgctgcggatgatgccatgggccgcgctgcggcccattaacttttgcaaaaacaaggacttaacgacatggcgacgaccgtcaaggaattgaaggcgaccgcacgtccgaagagcggcaagggggccgcccgggctgagcgtcgcgccgggagagtgcccggagtgatctatggtaacaaccagcccccggtcacgatctcgatcgaggatcgtgagctgcgccagcgcatcctcgccggccggttcctgaccacgctggtcgacatcgacctcgacggcaagaagcaccgcgtcattccgcgcgactaccacctcgatccggtcaaggatttcccgatccacgtcgacttcatgcggctcggcgaaggcgccaccatccgcatcagcgtgccgttgcacgtggtgaaggccgaaacctctccgggcgtcaagcgcggcggcaccgtcaacatcgttgcccacgcgatcgagctcgaatgcggtgccgagaacatcccgcagttcatcgaggttgacgtcggctcgctcgagatcggtcactccctgcatctgtccgacgtcaagctgcccaccggcgtgaagacgctggcgcgcgaggatgcgacgctcgtcaccatcgtgccgccttccggttacgccgaagagcagaaggccgcggctgcggctgctgctggcggcgctccaggcgctgcggctgccccggcggctggcgcggccgctccggctgctgctcccgcggcggctgccaaggctcctgccggcggcgacaagaagaagtaatctctcaaggctggcgcgcggtccttgatcgcgcgccgagcgaggggcgcgccgcgtcatgcaactctttgttgggctcggcaatcccggcgcgaaatacgcacgcaaccggcacaatatcggcttcatggctgtcgacgagatcgcgcggcgtcatggcttcacgccatggcgccgccgctttcagggcgagacgtcagagggcacgctcggcaccgagcgcgtgatcctgctcaagcccgcgacctacatgaacgagtccggccgcagcgttcaggaagccgcaagcttcttcaagatcgccgccggcgacgtcagcgttttccatgacgagctcgagctgccgccgggcaaggtgcgggtgaagatcggcggcggcatcgccggccacaacggcctgcgctcgatctcggcgcatatcggcaacgactaccgccgggtccggctcggcatcggtcatcccggcgtcaaggagctggtgcatggccacgtgctgtcggacttcgccaaggccgacagcgaatgggtggcgacgctctgcgatgcggtcgccgagcacgcgccactgatcgccaagggcacggatgcgaccttcgccaacagggtgcatctggccatgcaggcgaaggggtttttgaccaaggacgagaacggcaaggaataaggtcgccgttctctccgtcgtgcccgggcagaagcgcgaagcgcgtcttcgcgctagatgttccgggcatccacgttcttccttccgcgcgttagggcgtggatggccgctcaagccggccatgacgaatacggatagaggacatcatgggattcaaatgcgggatcgtcgggttgcccaatgtcggcaagtcgaccttgttcaatgcactgaccgagacggcggctgcgcaagccgcgaactatccgttctgcaccatcgagccgaatgtcggcgaggttgccgtgcccgatccgcggctggagaagctcgccgccatcgccaagtccggccagatcattccgacccggctgaccttcgtcgacatcgcgggcctcgtgcgcggcgcctccaagggcgaaggcctcggcaaccagttcctggcaaacatccgcgaggtcgatgccatcgcgcacgtggtgcgctgcttcgaggactccgacatcacccatgtcgagggcaagatcgccccgctcgcagacatcgagaccatcgagaccgagctgatgctcgcggacctcgacagcctcgaaaagcgtgtcgacaacctcaccaagaaggccaagggcaacgacaaggacgccaaggagcagctcgacctcgtcaaccgtaccctcgtgctgctgcgcgagggcaagcccgcgcgcctcgtcgagcgcaaggccgaggaggagcgcgccttctccatgctcggcctgctgtcgtctaagcctgtgctttacgtctgcaacgtcgaagagggctccgcggctaccggcaacgctttctcaagggcagtcgaggagcaggccgccaaggagggcgcggtcgccgtcgttatctccgccaagatcgagtccgagatcgcgacgatctcgcgtgaggaacgcgcggacttcctggagacattgggactggaggaagccggcctcgatcgcctgatccgcgccggctaccggcttctcgatctcatcacctatttcaccgtgggcccgaaggaagcgcgcgcctggaccatccatcgcggcaccaaggcaccggcggcggccggcgtgattcacaccgacttcgagaagggtttcatccgcgccgagaccattgcgtatgaggactacatcacgttcggcggagaagccggcgcacgggatgccggcaagctgcggctagaaggcaaggaatacgtcgtcgccgacggcgacgtgatgcatttcaggttcaacacgtagtatctctcctcgtcattgcgagcgatcgagcaagccggactgttgccgcggtggcagtctgggttgcttcgtcgcttcgctcctcgcaatgacggctaccgcatcccgccgccctggtcgcggatcgcgccgagatgctcgttgatgcggaagacgatcaggatcaattccgcgacgatgcgcgagaacacgatgccgaccacgacgctggcgatcgaggacagcagcaccaggaagccgccgaacgggctgatcgccattgcggcgagccctgagaagatgccggagaggccgaacagacagatcagcgcgatcaccagccagtagaaggtcttgatgatcgtcggcgtgatgaagcggtcccactgaaacagatcgctgaatgaaaacattactctccccagggcaagatcgggcccccacaccgggccgtggcagatggtccgactcaaggccacgccgccagcctgtatgtagcacgagccatgcgggccggcgggttgagattgctgcaaagtgcggccacaatctgtcattcctgcaaagctttccaagatgaccctgaccttcgaagacttcccgcccggccggttcggcacgttcggcccgcgccacgtcacccgcgacgaaattctggccttcgccgccgagttcgatccgcagccgatgcatctcgacgaggaggccgcagccaagagcatgctgcggggcctgtctggctcgggctggcatctctgctcgctgatgatgcggatgatggccgacggatttatcacccgctccgcgtcgctgggatctcctggcgtggatgaggtgcgctggttgtcgcccttgcggcccggcgacgatctcatgctcgacgtcgacgtcgtggaggcgcgcgcttcgaagagccggcccgaactcggcatcgtcaagttcaaatgcaccgtgcgcaacgcggcggggcaggcgcttgccgagatgacctcgcccatcctgatcaagcggcgcgagggagcggtctgatgcggttcttcgaagacatcgcgatcggacagcgtcgcgagatcggcacctatacgttcacggccgaggccatcaagacattcgccgcaaagttcgatccgcagcgttttcatctcgacgaggaggaaggcaagaactcgctgttcggtgggctcgcggcctcgggctggcatgtcggctcggcctgcatgggcctgcttgtcgccgacggccagcgcctggcgcgagaagccgcttcacgcggcgaggaggttgccgtgtggggcccatcgccgggctttcgcgacctgcgctggatcaggccggtgctcgccggcgacacggtcgcttacgtcaatgtcgtcatcgacaagcgcacctcggcctcgcgccccggctggggcatcttgaccgcccgcaccaccggcaccaaccagcgcggcgaagaggtctattccatcaccgcatcggccttcgtgccgatgcgtggaaagagcgtttagacttgttccaagatgaacggggcaattgagcgcgcaagtgttgcccgcgcgctatggacgcgattccgggcggctgccataagcctgcgcgagctggtcgccgcgaagcagttcggcggaaccagtgagttgctaactaattatgaacctgtcgctgtctatttgaaacgaattggcagagacaggggacgaggaccatggcagaccgcggcgcactcaaattcgttggattcatttttgcgactgcgacgctggccgtgatgctggtcgccggcatggtggtgaagggctatgccgatggcgcctacaccctcgaagcttcgaccgtcgacgcgcgccggtaagaattccttaattatccagggccgcggaatccgctcctgcgttagcggctgtagacgaacgcgagcacggcaatcgcaaccgcgagcaatccgataaagcgcagcacgatcgtgccgagctgattcggcgcgggccgcagcgcgacagggtccgtgttgtcgggccgaatgctttccatctgacgtatccccaagacccggccatggctgcacgggcgcttggcgttggtcgccggggagaggcggagggttcaacgcctcgcgccggcgcacccacaattgtcatgctacggactgaatgcttgaacggggcatccagtacgccgcgacccatcaggtcaatctttcgcctctggaatactgggtcacacgctttcgtgggtgatgacagctgtgttcgggaagtcgcgttcaaacacctaccctcacgaatcagaaccgccgcgctcccagcggaacgcggcggccggtgatgtcttgtattgatgcttagctgttgcgcaggccgtcggcggcgcgcttccactgcgcgacgttgtcggcgatcatgcgggtcgacttcatcgcggcctggctgagctgggcgtagccggagatctcgcgctggacgcgctggccctcggcatgcagcaggtcgcgcaggctctccagctccgagatcagattctcgatttcggcgagcgaggtgccggcgacgcgctggatcagcgagttgacgttgttgacggtggcttccgcgctcgggtcgagcggcggcgcgtcggtggtggtcgatgccgggcggcgcagataggcgatgtcgttgcggacgaaatcgcggatgccggcctcgacttcggtcacggcggcaaggttggtgtcgaccggctcggtctcggtggcttcgatcttctcgggacgcatggcgttcatcgttgttcccctgttcgcgttgagcgcagcgcgagtgtcccccgcacgacgagttcgatcatccgactaggacgtcggattttgaccgcaacttggccgagatacggcaagggcggacgattcgggggctttgccgtggcgtatggttaggggagtctaaacgctggacccggcgacgcggctccccaggaaacaggggagcgctgggctcaccagctcttcttgaaccctgcagctacgctcttgttgaacgtgccttgcgaggtctcgccgaccgaaccggagacggtgacattgtcgaacagtttctgctcggcgccgaacctgcgcagccatttgtcatcggtggttgatagcgtctggccggcggtgatgctggtgccggagtcgttcagggtgaccttggcgatctgatcggtctggtaattgcgggtgatgtggccgccgatgccggggagcgcggtggtgccctgctggttgacgctgtagccgttctggagcgtcagcgaggtgtcgcccgacagcggcacggacttggtcagcgatgccccgatcttgctgtgctcggcgccgggatcgacccgggcttccaccgcagtcttgtcccagatggtgcccgcgcccggcgcggtcgccatggcccacgcgctgccggaggattgcggcaggctgccgccattggcggccttctgcgccagcagctcggacatcgtcctgggctcgttggtcaccgtcaggtcggcgccgattctcgtatcccagaacgagaacaccgactgcttcacggtcaccgccgaggagccgttggcattggagttcgacgaccagtccaggccttcttgggcggcctgggcgcgcttcttggcggccatgggatcgatgccggtgccggcgtcgactgcgagctggctccagtcgagcttgtcgacatcgatgtccttgagcacgtcggcgtcgttcgcgctgggagcctcggccgcttccatctccgcttcgtcgtcaggcgcggccgccgtgggcggaatgatctgcgccgaaagagtcagcgtcgagctcaggatgaatgcagccgccagcaatggcagcctggtccagccaaaccctgtcgagaattccatcgtcctgcccgcaacccccggcacatgccgttcgatgttatatatcgagttcaggccatgtgccattccgcgccgaacatgctgatccatcgtcgcgaaaatgtgacggcccgcggcgaaaaagaaccaacgggccgcgcgataggcgcgcgcccggcgacgagcttcgagatgcgacggcatccggcggggctggaggccaggacgtcgcgatcgcctcgtcaccggtcccgacgaacggggcccgttggcgtccccctcagccgacgctggtcatcttcggcagatgaatggcgcggccgagtgcctgctcgaccagatcgaaggtgtcgatcagcacgcgcatgctgacgagcctgcccgccttgaactgggcgaactgcgcgacccgcaggctgatcggcttgttggaatccagagccgtcagcgaataacgcagcatcgaggcggcggaatcgacccccagcatgatgctctcgcggtcgaagcggcggacctggaagttgtcggcgaactggcggatgacctcgagcacggcctccttgccttgacgcgcgccgaggaacggaaacatgtcgatcgggccgtagagcgcccagtcgacgtcctcatcgatcaaggcttcgacgtcgtcgaaatgccggtcgttgatggcgcggtgcaacgcacgcgagaaacgccagagactgtgctctgtcattttgggaagtcctgaagctggcttgcgaaagaaacggaaaacaaccccatgcaccgtcgggtgccggggctcaattcgtttgtatacgaataaaataaggcatttcggccaaaacgcaattcacgtttttgcaatgcaccattgagccgattttgtgagatttacaataggaccccgtaatgttccgggggcgggtcagaccggttcccggcggggtgaacaggatcaatccgcccgcgcgcccgtgatcaacggcccgatctcccgctccagcacctgctgcaccagatcgtaggaatcgatgatctcgcggatctccgcaaccagcccgccgcggaagcggtagaataccgccatgtcgaactgcacgatgcggccgttgctgcgtttcctgaaatgggcttgcacgtaagttgccaccgcgtcgccctcggcgaggatgtgcggtgccctgtagcggatctccgaatagcgtgcccagatcgtctgccagagctcgcgtagctcgtccttgccatggcgcggcaccatgtgtggcagcacgtcgatcggcgcatgggtgaggaagtcgacatcgtcggtgcagcaggacagcgccgtctcgatatctccgcgggcgaaggcgtcgagcaggtgcaccacacgctggcgattcagtttctcaactgtcatcccgcctgtcctcattggccccgtggcgccgcaacggtagcgcgcggcctcgcgcaccgacaatccgcaaaatcacagggatgttgcagacggtttgacgcgcgagcgcaatgcccggttcatggggcgcaattgcagatcgaattcggtatggctgcgcggatctccgtcatacgcgcttgcgtggcgcgcaacgcgtatggagcaatgcgcaacaggcaagcagcgggaggagttaagtcaccagtccctcatcggccgcgctgcggcactgtccaaaaacaccgttcccgccagcatgcgggcgcccaagctgacacggttgagcgcagcgaggcatgcgaatcgcgggccatcgggtctgtccttcgcgcgttgggggccgctttcctgatacgtgcgcggcgcgtactataccgcagcgacagacgaacccgacatgacaatgacggcgaagcctcgacgtggatcatgacaaatccgaaggaaatgccgtcagcgccggcacttgcgcgccgtctcgcctgctcccgctgcggctccgaattcagctgcgacctctcgggcaattgctggtgcgcggaggaggcggcaaaactgccgatgccgatcgagggtgaggattgtctgtgccgggcgtgtttgcgcaaggcggcggcatcccgtagcccggatggagcgcaagcgtaatccggattcgttccgctggcgccgacccggatttcgttgcgctccatccgggctaggacgatcacaccgcaaatcccggcgacttccgcgccatgccgtcgaacgcgtcaagcagcttctcgcgccagccatggatcggatcgtccgtctccagcagcttgaaagggctgaccaaccgcgcccactgaaaaccgccgaacacgatatagtccgcgtagttcggcgcctctccaccgagataaggctgcttcttcaacgtctgccgcatcacctccagcgacttgcggaatgcgaccacgccggtgtcgcggctcgccatgacctcttccagggtcttgccgccgaagcgtgcctcgcgcgacttccggaaataggcagcatcgatctcggccagattgttcggaatgtcggccacgatcagcggaaagatgccgccgacgatggcgatgtcgccccaggcgttgatcatgcgcgccatggcgcggccgccatcgccgccgaacagcgacgaacggttgggaaaattgtcttcgagataggtcgcgatcgtccaggaatcgacgacgggcttgtcgtcgtgcaacagcacggggaccttctccgagccatgcggcgcaagcgcgctcttctcggtgaagcgccagggcagtgtttccgctgcgagccccttatgtgccagcgccatccgcgtgcgccagcaataggggctgaacggccgcgaggcgtcggtgccgacgagttcgaagagtttgagtgacattggcgggtgctccgtcattgcgagcgcagcgaagcaatccaggctgccgctgcggtgacattctggattgctttgcttttgctcgcaatgatgttgtggaggcaggtgcgcgcgtcaccgcccatgcgcgcgcaacagcttctcgccgcattcggtgacggcgataacgagccccacgccggcaatcgtctcgcgcgtaacatagccgcgctcggccgcatcttcccagatggtgaggcgcgggcacgaggtcttccaggtcgcgatcacctcgacataggcgcgcggctcgcgcgcgacccattcgacgaaatccagcaccagcggatcggcgccacggctcattgcaggcctccctagtcgaaagcggccagcaccggggtgcgaaccaggagccagccgccataggcgatgtagtagcaggcgatggtggtgatcagcctgttggaccaggccatgaattgctggtcggtcatggcttcgaggatgcgccgcgccagcgtggttccgagcatcgaggccgcaatggcgacgcccgcgagcacgggatcgaggctcgccgcctgatcgatgatcccgccgaaatagatcaacttggtgaaatggctgacgagctggcacatcgccttcgtcgcgaccttctcgcgccggccgaaatcgccgccgaggaagaaggtgtcgagcagcgggccggagacgccggtcatcagcatcaggcccatgcacatcgtgccatagaccgtgccctgccagagccgatcagggttcggcttgatgttcgcgggcaagagccgcgccatgaacggggtgataccgagcagcagcagcgccatgggcttgtccggcacatagcgggtcagcgaccatgccgcgagcgcgacagcgcagccggccagatagttcgcgaccgcccgccagcgaatatgtgcccgccagagaaacgcgcgccagccgttcgaggccatctgcgtgatcgcgtgcagcaccatcgcggtcggcagcggcatcaacgccaggagcacgccgatcaggatcagcccgcccgccatgccgaacagccccgacaggaacgccgtagccaccatcagcaatccaagggccgcaatcatgatgggcgtcacgcagggagctccgctggtgcgtgtcggggacgcgggccggcaattcagccctcgcgtcatggaacaggtctgaaggagcgtgccttgcttgcccctccctcgcaaactgagttatcttgccctggcatcagttttcctgagggtagaaagtttgcggcggctgctgtttctcaacggcatcaaggcattcgaggcggcggcgcggaccggcagcttcgctgcggccgggctggagctgagcgtgtcggcggcggccgtcagccgcatggtgcatctgctcgaagagcgcctcggggttgcgctgttcgagcgcaaggccaatcgcctggtgctgacgcaggcgggccgcgcctatcaaggcggtctgacgccgatcttcgacgcgctggccagcctcaccgcgcaggtgacggcgcccgcgagcgtgcgcgtgctcaccatcggcgtcggccacacctttgcgatgcgctggctgatcccgcgcctgtcggagttccgcagcgaggagcccgacatcgaggtgcgcttcaccaccggcggcgcggcggtgccgttcggcgaggacttgagctgcggcatcaagctcggcaccggcgactggcccggcctcgtcgccgagccgctgtttgccggcgatctgaccccggtctgcgtgccgcgtcttgcgagcgggctgaagcgcccggctgacctgaaaggcccgagcctgatccgcgtcgcgcattcgcccgaggactggccgatctggctgaaagccgcgaacctcgcccgcctcaacgcgcgcggacccgaattccagttttatggccaggcgctccaggctgccgccgacgggctcgggatcgccatgggcatccgcccctacatcgacgacgatctggcggccggccggctggtggcaccattcgacctctcggtgcccaagggcatgcgctggtacctcgtctatcgcagcttccagaccgagcagcgcgacttcgccgcgttccgccgctggatcatgcgggcggcgtcggaacccgcgccccgtcaggcggatcggccgctccgcggggcggaaccgaggccaagggctccgcgacaaaaacccggccgcttgtgaacgggttcacatttcaaaatccgcaaacgtggtcccctgactctccgaaaagaaacgtgggacctacacttatgacgaccctttacgacggctttgacatcgaatccttcgaagctggcaaggggctgtggcacgcgcgcatccggcgggccgatttcagcccggtggccatcgacggcgtgctgtttccggccatggaagtcggcttcgcctggcccgatcgcgatgccgcgatcgccgatgccaagcaccacatcgaccgtttccgccggcgggccgagggcgacgacgaatagacgagcggccgcagccgcatcagcggcatgacggcacaaacagtgcggcgcaaaggggggaccgatcatgtccatcatcgaattcgacgcggcgcggccgcgaatttatgcccgcgccgtgctgtcaaactgcccggaatgcgacggcgatcttgaggtgctgcgcgtgatgagcggccgcgccggctgcgagtactgggccatgcgctgcaccgattgcggcggcatccatctcgacatcctcgagccgaatcttccggccggggataatgggggaccgctgccggcggcgtgagcggcgcgctgctgccagcctgctgtcagcagcctgcatggcggcgggcattcgccctttcgcgcggggcggactcgtcccatattcgccccatggcgaagaaacccgcatcctccgaaaaatccggcaaatcccccaggaccaaggccccgaactcgaaagcacatcggcccgacgtgcagccgatcgggccggcgctggccgagttgctcaatcccgcgatcaatcgcggcgatgccggattgggatctggcacaggcctgcagccgccgccggacaattcgcgcgaccgccgcgccgggggcgaggccgccgcgcaccgcgcgcgcgcttcaacgccgaaggagtttccgcaggacaccgcacggccgatgccgctccggcccgatccacagccgccgggagcacgtgcatcgaccgagggtttcgcggaggcgccgcaggccaattacggcactgccgccaccattcctacgctcgatccggaactggcgcggcagctcggactgccgaccgaagaggacgatgccgaggcgctggcgcgcccaccgcgcagcaagatggaggcgctcggcgtcaaggccaccgcggatgcgcttgaagcactgatccgcgaggggcggccggagttccgcaagggcgacggctccacgaaggtgtggacgccgcaccggccgccgcgcccggaaaagtccgagggcggcgtccgcttcgagatcaagtcgtcctatgaacccaagggcgaccagccgaccgcaatcgccgagctggtcgaaggcatcaaccgcaacgaccgttcgcaggtgctgttaggggtcaccggctcgggcaagacctacaccatggccaaggtgatcgaggcgacgcagcgcccggccttgatcctggcgccgaacaagacgctcgccgcccagctctatggcgagttcaggaacttctttcccgacaacgccgtcgaatatttcgtcagctactacgattactaccagcccgaagcctacgtcccgcgcaccgacacctatatcgagaaggattcctccatcaacgagcagatcgaccgcatgcgccactcggcgacgcgcgcgctgctcgaacgtgacgacgtcatcatcgtcgcctcggtgtcctgcatctatggtatcggctcggtcgagacctataccgcgatgaccttcgcgctgaaaaagggcgagcgcatcgaccagcgccagctcatcgccgacctcgtcgcactgcagtacaagcgcacccaggccgatttcacccgcggcacctttcgcgtgcgcggcgacgtcatcgacatcttcccggcgcactacgaggaccgcgcctggcgcgtgaacctgttcggcgacaccatcgagaccatcgaggagttcgacccgctcaccggccacaagcaggacgagctcgaattcatcaagatgtacgccaattcgcactacgtgacgccgcgcccgacgctggtgcaggcgatcaagtcgatcaagtcggagctgaagcagcggctcgaccagctgcacgatcagggccggctgctcgaagcgcagcggctggagcagcgcaccaccttcgacctcgagatgatggaggcgacgggaagctgcgccggcatcgagaactattcgcgctatctcacggggcgccgccccggcgagccgccgccgacgctgttcgaatacgtccctgacaacgcgctgatcttcgccgacgagagccacgtcaccatcccgcagatcggcgccatgttccgcggcgacttccgccgcaaggcgacgctggccgaatacggcttccgccttccctcctgcatggacaaccgccccttgcgcttcgaggagtgggacatgatgcggccgcagaccatcgcggtgtcggcgacgccgggtagctgggagctgaacgagagcggcggcgtgttcgtcgagcaggtcattcgcccgacggggctgatcgatcctcccgtggacatccgcccggcccgcacgcaggtggacgatctcgtcggcgaggtgcgcgccaccgcgcaggccggctaccgctcgctgatcacggtgctgaccaagcgcatggcggaggatctcaccgaatacctgcacgagcagggcatccgcgtccgttacatgcattccgacatcgacaccatcgagcgcatcgagatcatccgcgatctgcgcctgggcgcgttcgacgcgctggtcggcatcaacctgctgcgtgagggcctcgacattcccgaatgcgcgctggtcgcgatcctcgacgccgacaaggaaggcttcctgcgcagcgagacctcgctgatccagaccatcggccgtgccgcgcgcaacgtcgacggcaaggtgatcctctatgccgaccagatgaccggctcgatggagcgcgccatcgccgagaccaaccgccgccgcgagaagcaggtcgagtacaacacggcccacggcatcacgccggagagcgtgaagaagcagatcggcgacatcctcaactcggtctacgagcgcgaccacgtgctggtcgaggtcggcggccacgacatgaccgacgacgtcatctcgatcggccacaatttcgaagccgtgctcgccgatctcgaaaccaggatgcgcgaggccgcagccgacctgaacttcgaggaagccgcgcgcctgcgcgacgaggtcaagcgcctgcgcgccaccgagctcgccgtggtcgacgaccccaccgccaagcagcgcaccgtgcagggcaaggccggcgcctatgcggggacgaagaagtacggcgacgccgccaacctgccggtcagcgcgatgaagaagaagacggtcagctcggcgctgaaggcgagcggcggcggcagcggctccagggtgcacaagccgcatctcgacgagatgcacggcccggaatccctgccctaccgcgagacccgcgcactgccggcgaagccgttcggcggaaacagccggatcatccagccgacggactcacggcagtcgggcccggagttcggcccggcgccgaaatcgacgggcgggcagccgggacggcgcggtgggtggaagaagaggtagggcctccgcgcactgcccttcgtgccgtggattccgggctcgccgctttgcgacgccccggaatgacggggaggattgcgattctcatcccacgctcgcctccaccacggccatcaccgacagcatcagcacgattgtcacgagctggagcgaggcgaccggctgggtgcgccaggcggtgatcttgtctgacagcgacagatgggcctcgaagaacttcgggtcgtagacggtcctgaacaaatgcgggaaactcggcccgaacgtgaccgcgagcatcgcatggacgaacgaggcgacggcaacgaagatggcgacgccagggtcgccggagaggtcgcgctcgccgcagagcttgagcaggaacgccgcggcggcgaaggtggggaagctctggagggtcgctgtcagcgcgaggccttcgagtgcgttgtgcaggcgggactttctggcggtggcgatgccggccatggcacgtctccctgatgacatgcgtatgacgctagctgcgatgccgatgcgctgatgtgagatgggtcacgcgctgggcgagcccttcacctcgtcccgggcgacacgatcagccgccgcaaatccagtccgagacgtacgcccgagagacaggtacaaggcgctccctcgcgggaacaacgatgtccttggccatttcgatggcgtttcgactataactcgaaccgagctcgcggaggctgcccctcacttcgcctcttcccataagaaccgggaaaggcgctgcgtccccactctcaggagatttcacccatgtacatcgccatgaaccgcttccgcgtcgccaagggctccgaagccgctttcgagcaggtctggctctcgcgcgacacccatctcgacaaggtgccgggcttcgtcgaattccatctgctcaggggccccgagctcgaggatcacaccctgtacgcctcgcacaccgtctgggcgaaccacgcggcattcgaggcctggaccaagtcggaggcgtttcgcgccgcgcatcacaaggccggcgacaacaagccgctttatctcggccatccccagttcgagggcttcgaggtggtgcagacggtcggacgcggcgcgaagtaggcgccgcgcctcacgcatcagcccagcgtgatccggtcgatctccgccatctcctccgcactgagcttccaggcgatcgccttgacgttctcctcgatctgctcgacgcgcgtggcgccggcgatgacgctcgacacctgcggacggccggcgagccaggagaaggcgagctcgagcatgctgtgcccgcgcgccttcgcgaaggcctggagcttctcgaccatgtcctcgttgcggggcgtgacgtaacggtcgcgcagggccggcgccttggcgaagcgcgtgtcagccggggcggccgcgccgcgctggtacttgccggtgagcaggccgctcgcgagcgggaagaacggcagcaggccgagcttgtactcctgcgccgccggcagcaggtccttctcgatgtcccggaccaggaggctgtactcgtcctggcaggacacgaagcggctgacgttcatcgcgcgcgcggtgaactcggcttccgcgatgcgccaggccgggaagttggaattgccgatgtagcgcaccttgccctgccggacgaggtcgtcgagcgcgcgcaagctctcttccatcggcgtcagcgggtcgtaatcgtgctgctgatagaggtcgatgtagtcggtcttgagccgcatcaagctggcttcgaccgcgctcatgatgtagcggcgcgaggcaccctgcttggtgccgtcggtcgccatcggcttggcgtatttggtcgcgagcacgatgtccttgcggcggtcgccgagcacggtgccgagcacggtctccgagccgcccatcccggcatagatgtcggcggtgtcgaacagcgtgatgccgagatcgagcgcgcggtggatccccttgcgcgaggtctccagatccgtgcgctgaccgaaattgttgcagccgagtccgaccgccgacacgcgaaggccggaggcgccgagattgcgaatttccatgggggatcccgttcagatgagcagtggacattgtgaccaccgggcgccgcagcagcaagccgctgcctgcgctgctgccatgcaggcgatcccaggcaaaaaaatgcggcccctgtcagacgcggcgactgacggggaccgctttggggcgcttgatcggtgacggggggcctgaccagacgcaaggccagcctagacttgctgtgttacgcgcgggtgacaggcggagttatccacagggctccgggcgcaggactcagaagaccttgcggtagacgatgaagccggaacgctccgcgaccttgtcgtacaggcgctgcgccgtgagattggtctcgtgcgtctgccagtacacgcggggcgatcccgcgagccttgcccgctcatagacgccatggatcagcgccgagccgacgcccttgccgcgcgcggcctccagcgtgaacaggtcctgcaaatagcaggatggttcgatcgcagtggtgctgcgatgaaacagatagtgcgtcaatccgagcaggcgcccgtcgtcctcggcgacgagcgcatgcatcggctcataggcgtcgaagaagcgctgccaggtcatgcgcgtgatctcgggagcgagcgcggtcggacccgagcggccgtaaaaggcgttatagccgtcccacagcggcagccattgatcgtagtcctgcctggtgacggcgcgaatgatgagcgacatgtgggttaccgcgatgtccgagatgcacgatgaagatgccttcatacgtgatgacggcattgccgatcaatcgcggtggtgccggcggtggcgacggccgcgattgcgaggacgccgagccgtgccagatccgcgttgccatgaccggaagcgctctggtgatgaaggaagatcagcgtggcaccgatcaccgcgacgaccgcactggtcatggccgaggcgaggcccgacgaggcgccggcaagggccacaagacagaccagcagcggtgccgccgatggagcggggagggtggggacaacgcgatcgagaagcacagccagcagcagggttgctgccgtcaggaccggaccgtaaatcgcacgccatccgagccgcatgggccagtctcgctcctcccgaacgaggcaaggcggcaacactgactgattgttgcgccagtgcgccgcgatctcgtgcggtgtgcctaaggcgcgcttgcgtgcaagcgtgaggctttcggatgattttagaccatgtgcgcgtgcttgacgggttgttgcagcgtgggcgcgttcagcgtcgacgtccccacgcccttgcgcgtgccgacgatgatcaacagcgacgccgcgaccaggatggccgcagtcagcgtaattgcaacgactaccacaggtgatttcatcgacgtcctgtcgcgatgccggtcggcgcgggccgcacggcgccctgaaggccggtccaggatggaacggggatcagaccggcaggcccatcgccatggtcgccttggtcgacagcaccgtcagggtgacgatcaagcatagcgagagtgcggcgacggcaagcgaggccgcgaccgcatgggtgagccgggaagacgcgacggtagcggatgggccctgaaagcctgccgtgccggacgcccgcatcatggtctaaatccttcaacgcgcgagcgaatcacccgcgacctcccgcaaacttcaccgctgcaaccggcaatattgcggcggcggttgcgccaaaagcggcgaaattgcggcgacggcgtcccttatgcccgctattcgacggagcggggcgcagtcagacgccggcggcgatgctggcggggtcggcaatgtcggccgggcgccagtccatcgtcacgaaaccgggtgcggcttcgacgcgcttgagccagtcccggatggcgggaaaggttgaaaggtcgaagtcgcagcggtcggccagatgggtgtagccgtacagcgcgatgtccgccaccgtgagctggcgcgcggcgaaataggcgttggtcttgagatggttttccatcacctggagagcgccatagccgcgctccatccagtcctccagcgaatgggtctggaggtcgcggccgcccttgaccagcgagagccagaagtaggcggcgccgatgttcggctccagcgcgtgctgctcgaagaacatccattgcagcgcctcggcgcggtcgatgcggttctccggcgcgagcggcgtgccgacggcgacgtaccagaggatggcgttcgactcggcgagatagcgatcctcgccgacctcgagcagcggcacctggcccgaagggttcttgctcagaaaatccggcgtgcggctctcgccgcgcagaatgtcgacctcaacggcttcgtagggcaggttgagcagcgccagcgcaaggcggaccttgtagctgttgccggagcgttgcatcgaatagagcttgtacattctggcgttcgaatccgaagacgggaaggcgcggcgctcgttgccccgcgaggcggctaaacaatgatgccgatgcgaatccgccgcaagagccagccgatagaaaaactcgaaaaccctaccgcactgcaacggtgctgaagatcatttccgcgcgatgatgaagatcagatcacgcttgcgtcaacgcggaggcggcgagacgtacatgatgaagcgcaaacttccgccatcgtcgtcgccaggcacgatcccgtcatccacgtcttggccatggggcgaagaacgtggatgccggggcaagcccgggcgtgtcgacgagcggctttggagagatgcaccacgcaaaattgctccgaggacaagccttgtcggatatgagccattcgggaggcaaagttgcggaaaattgcgggaaatcacggcttgaaccgctcgatatccgtaagtttttccgcgatcaggccgaagtttcttgcggcgcagcggcgcacgttttagggtggcgcattcccacaatcagagtcgtgaggcgaaaggcttcacgacgctcgccaggagatgatgatgtccttccttgccgctgcgctcgaccgtgtgaagccgtccgcgaccatcgcggtcacggacaaagcacgcgcgctgaaagcggcggggcgtaacgtcattggcctgggcgccggcgagcccgacttcgacacgcccgccaacatcaagctggcggcgatccatgccatcgaggccggcaagaccaagtacactgcggtcgacggcatccctgagctgaaggaagcgatcatcgccaagtttcagcgcgagaacggcgtcgtctacaagccgaaccagatcatcgtcggcaccggcggcaagcaggtgctctacaacgcgctgatggcgaccatcaatccgggcgacgaggtgatcattcccgcgccctattgggtcagctatcccgagatggtcgcgctcgccggcggggagccggtgcccgtggtctgcaccgcagcgaccggcttcaagctccaggcggaagcgctcgagcgcgcgatcacgccgaagaccaaatgggtcatcctgtgctcgccctcgaacccgacgggcgctgcctacacgcgttcggaactcaaggcgctcaccgacgtgctggtgaagcatccccatgtctgggtgatgaccgacgacatgtacgagcatctcgtctatgacgacttccagttcaccaccgtcgcgcaggtcgagccgggtctttacgaccgcacgctcaccgtgaacggcgtctccaaggcctattgcatgaccggctggcgtatcggctatgccggcggtccggcgcatctgatcaaggcgatggcgacgatccagtcgcaatcgacctcgaacccgtgctcgatcgcgcagtgggcctcggtcgaggctctgaacgggccgcaggagttcatcccggccaacaacaaggtgttcaaggagcgccgcgacctcgtggtctccatgctcaaccaggccaatggcatcgagtgcccgcgtcccgagggcgcgttctacgtctatccgtcctgcgccggcactatcggcaagaaggcgccgtcgggcaacgtgatcgcgaacgacgagcaattcgtcacggagctgctggaaaccgaaggcgtcgccgtggtgcagggttcggccttcggtcttggacctgcgttccgcatctcctatgcgaccaagacctcggacctcgaagacgcctgcaagcgcatccagcgcttctgcggcaacctgcgctgagactcagtcgcgacgagacatcgaaaaggcccgcctccggcgggcctttttggttggttgcacgctttccttgcgcgcgatctggcaccattgcggctgttgtggcatagatcatcgcgcaacacgggtggggcgctctctgctcggatcacatcatcgcggagatatctttcatgcgccgttcgctcctcctcgccgggctcaccgccgccagcctcgttgcctccgtcacgagcagtggcgcgcagcagcggatggcgcggatcggcgtgctcgaatgccgcggcggcgccagtgtgggcttcatcgtgggatcggtgactcatctcggctgcgtgctgcgggccgacggcttgcccgatgatcgctatgtcgcgacgatccgcaaggtgggcctcgacatcggcatcacccaggagaccgcgctcgcctggggcgtgtttgcaccggtcgaccgcctcggccccggcgacctctccgggaattacgtgggcgcgcagggcagcgcctcgatcggcgtcggtctcggcggcaacgtcctggtcggcggctccaacaattcgatcgcgctgcagccgctgagcgtccagggtcaggtcggcctcaatatcgcggccggcctcgaaagtttggaactccgacccggccgctaaggcgcaccgccggtggtgcttcgttcacctctcctgattgcgagaggtggaacaccggcgattggccgatttgatctcatcacgctggatctcatcaggcactataaaactcgatccaactgacgacgcaccgcagcgacgtttgacgcttgccaaatctcggggacgggcagagcatcagcgtttgccgacccaatgatgggccgagctccacaagaaggaggcggcgaatgggacaagacgtcagaagtcccccagtcaataaaacgtcgggtccacggtgcatcgcactggtgggccctttccaaagcggtaagaccacactcttggaagcaatcatggcgcggacgggcgcaatcccgcgcgccggcagtgtcgacgccggcacttccgtcggcgacgccacgccagaggcccgtcatcacaagatgaccgtcgggttgactgccgccacgacgagcttcatgggcgacagctacacctttctcgattgtcccggttccgtcgagtttgcccacgacatgcgcgccgcgcttcccgcggtcgatgctgcgatcgtggtctgcgaggccgacgagaagaagctgccgcagcttcagatcatcctgcgcgagctcgaggagctgaagatcccgcggttcctgttcctgaacaagatcgatcgcgccagccagcgcatccgcgagaccctcgcgatgctgcagcccgcctcccgcgtgccgctggtgctgcgccagatcccgatctggaagggcgagctgatcgaaggcttcgtcgatctcgcgctggagcgcgccttcgtctatcgcgagcacaaggcctcggaggtggtcgcgctcgaaggcggcgatctcgatcgcgagaaggaagcgcgcttctcgatgctggagaagctcgccgatcacgacgacgcgctgatggagcaattgctcgaggacatccagccgccgcgggatgccgtattcgacgatctcgcccgcgaattgcgggaggggctgatttgcccggtgctgctgggtgcagccgtgcgcgagaacggcgtgttgcgcctgatgaaagcgttgcgtcacgaggcgcccggggtcgcggagacggcaaaacgcctcggcgtacccgagagcaaggacgcactcggctatgtcttcaagacgctgcattcgcagcacggcgggaagctgtcgctgacgcggctgctcgccggccgtctcgacgatggggcgacgctgcaatcctcctcgggcggtgcggggcgcatctccggcatcctcgccgtcaacggcgcctacgacaccaagcgtgcttcggccgaagccggcgacacggtggcgctcgccaagcttgatacggtgaagaccggcgacacgatctcgaacggcaagagcccgcccgctgcattgatcacgatcgagccgacgccgccggtacttgcgatctcggtcgccgccaccgaccgcaaggatgacgtcaagctcggccaggcgctcacgcggctgcatgaggaggatccctcgctggtcgtcgtgcagaacgctcagacccacgacaccgtcttgtggggacagggcgagatgcacctgcgtgtcgccggtgagcgcttgcgcgatcgtttcggcgtcaaggtcacctcgcatccgccggctatcggctatcaggaaaccatccgcaagccgatcacccagcgcggtcgtcacaagaagcagtccggcggccacggccagttcggcgatgtcgtgctcgacatcaagccgctgccgcgcggcgaaggcttcaagttcgccgagaaggtggtcggcggcgcggtgccgcgcaactacatcccggcggtggaagagggcgtcgtcgacggcctcgcgcgcggcccgctcggctttcctgtcaccgacgtgcaggtgacgttgacggacggctcgtatcacagcgtcgactcctccgatctcgccttccgcacggcggcgcgcattggattgaacgaaggcctgccgcaatgccagccggtgctgctggagccgatccacatggtcgagatcgtctgcccgaccgacgctacggccaagatcaacgcgatcctgtcggcgcggcgcgggcagatcctcggcttcgacactcgcgagggctggagcgggtgggattgcgtccgcgccatgatgccggaggccgagatcggcgagttgatcgtcgaactgcgttcggccaccgccggcgccggcagctttacccgccagttcgatcacatggctgaggtcaccggccgcgccgccgaccagatcatcgccgcgcatcagcacgcggcgtgattccagcggggaggtaacggcctctctccccctttccccgtctgaacatcttcacggggaggggggtgagaggctgtcacctcctgtacggcccttcatttctgccgcgcattcaccacgaggggcgagatcaggcccccttgcgcatgcgcatgaatgatgtattttacatcattgtatatgttctagatatcatctataggtgcccataagtgaggctgaggtgatcacgtcgtttcagatgcgcgcagcccgggcgctgcttggcattgaccagaaaaccctggccgagcttgccggcgtgtcactgccgaccatccagcggatggaggcctcgaccggcaacgttcgcggcgtggtcgagaccctgatcaaggtggtcgaggcgtttgaccgggccggcatcgagctgatcggcgaacaggcgcgcagcgacagtggcgggcgtggcgttcgcctgaaggagccggggccgccgcgccgcatcggggcatgatcggaggttgatcgtgctcggggtcaggatgggtaagcgcatcgtcgcacctcggcaacacgggacgcacgatgcttcggagcgtcgtgcatgagcatcacaacggatcaagcggccaagctgcatcagctgcgtcgtccgactttcgcggaactgtacctgccgaaactcgtcaccgtctggcgtgaaggttacggcgtcgcggatttccgcgccgacgtcttcgccggcctcacggttgcgatcgtggcactgccgctgtcgatggcgatcgcgatcgcctcgggcgtgacgccggaccgcggcctctataccgccgtcgtcggcggcttcatcgcttccctgctcggcggcagccggttccagatcggcggacctgccggtgcgttcatcgtcctggtcgcagcgactgcggagcgtcacggcgtcgatggcgtgatcctcgccaccatgatggcgggcctcttcctggtcgccgcgggcctgctcagggtcggcacctacatcaagttcatcccctatccggtcacggtcggcttcaccgccggcatcgcggtgatcatcttcgccagccagctccgcgatctctccggcatcacgcttgcgggaaaagagcccagcgagttcgtgccgaagctcgttgcgctcgccggcgggatcagcaccgtcaatccgtccgccgtcgcggtggccttcgtcagcatcgccatcatcgctgccttgcgccgctggcggccgtcctggcccggcatcctgatcgctgtcgtgtttgcggcggtcgcaactgccgtattgtcgctgcccgtggaaacgatcggctcccggttcggcggtattccgcgcgagctgccctcgcccgcattgcctgcgttctcgctggagaaggcaagggcggtgctgccggatgcgatcgccttcgcgctgctggccgccatcgagtcgctgctgtcggccgtggtcgccgacggcatgaccggccgtcgtcatcgctccaattgcgagctggtggcgcaaggcgccgccaatgtcggttcggcgctgttcggcggcatctgcgtcaccggcctgatcgcccgcaccgcaaccaacatccgcgccggcgcgcgcggaccgattgcgggcatgctgcattcggtcttcctgctgttgttcatgctgatcgccgcgccgctggcgagctacatcccgctcgccgcgctggcctccgtgctggtcgtggtggcctggaccatggcggagaagcacgagttcgcgacgctcctgcgctcgtcatggggcgatgccgtcgtgctgctcgcaaccttcctgctcacggtcttccgcgatctgaccgaaggcatcctggtcggcttcgccctcggcgcggtgctgttcatccatcgcatggctgagatgacgggcatcgaggagcggacgccgctggtggccgacgatcgccccgacgacggcaatggcgaacgcgtgccttacgatcccgcgcttgcggtcgatcgcgacgtgctggtgtatcgcatcaccggcgcgttcttcttcggcgctgcctcggcgatcggcagcgtgctcgacggcatcgccgaccagcgcaaggccttcgtggttgacttcgccgcggtgccgttcctggattcgaccgcggccaacgtgctcggccgggtcgccgccaaggcgcaccgccagggcatcaggctgttcatcacgggggcatcgcccacggtccgacgcgcgctgctcacccacggtgtgacgccgccgcgcgcgcgctatcgcacgagcctcgagcgcgccatcgccgacatcaagggccggaccgccgacgaggccggggcgaactgacggcgcgcgcttgacagggcgggcgcgacgcgaaatggatcgcctcggaaacgacccgagggaaacatgaccgcgcccaaagctcccgcagcctgtctgatcggatggccggccgcgcattcgcgctcgccgctgatccatcattactggctgcgcacgctcggaatcgaggggggctacgtcatcgaggcggttccgcctgaggacctgcgcgatttcgtgctgcggctgccgctccgcggcttcgtcggggccaatgtcaccatcccgcacaaggaagccgtgctggcgctgtcgacgcctgacgcgcgcgcgaaggcggtcggcgccgccaacacgctgtggttcgccgaaggcgagctgcgttcgaccaacaccgatgtcgaaggcttcatcaacaatctggacgccagcgcgcccgggtgggacgcggcggaagaggcgctggtgctcggcgccggaggctcctcgcgcgcggtcgtgttcggcctgctcgaacgcggcatcaagcgggtgcatgtcgccaaccgcaccgttgcccgggccgagacgctggcaaagcagttcgggccggacgtgaggccgctgccatggaacgcgatcggcgacgtgctgccgcgcgcaagacttctcgtgaacacgacctcgctcgccatgcatgggcagccttcactcgatattgatgtcgcgcggctgccgcaagccgcggtcgttgccgacctcgtctacgttcccctggcgacaccgctgctcgccgaagcacgggcgcgtggcctgagcaccgccgacgggctcggcatgctgctgcatcaggcggtgcgcggcttcgagctgtggtttgggcggcggcccgaggtcacggccgagctgcgcgcattggtcgaggccgatctcacaaagtcttgagagaatagggcgcggtctttcggagttctccatcgtgggggacaatcggagaccgtcatgtctgttcaacgtgcaaccttcacacgtccgctgatcgccgtcgcgatggtggccgtctcaacctactgcgccttcgcccaaagggcgccggtgccgacgcgcgtgcgtggcacgatcgagagcgtcaatggcgacaccatgcaggtgaagtcgcgaagcggtgaagaggtcaagcttcacctcgcctccgatgtgaacgtgtcggggatcaccaggatttcgctcgccgacatcaagccgggctcgttcatcggcgcgaccaccgtgccgggaccggacggcagccagaacgcggtcgaggtccacgtgtttccggagagcatgcgcggcaccggcgaaggctcgcggccgtgggatctcaagcccaactccagcatgaccaatgcgaccgtggccgaaagcgtcgtcggcaatgacggtcacacgttgctggtgaaatacaaggacggcgagaagaaagtattcgttcccgacaacgtcccggtggtgaccttcgtgccgagcgacagatccgagttgaagccaggtgccaaggtcatcgccttcatgaagcaattgcccgacggctcgttcgagaccaaccgcgtcagcgtcggccgcgacggactgacgccgccgatgtgaggcggaatgtcgttccggggcgcgcacaacgcgaactatggtgtgcaattgcgcacctgagaatctcgagattccgggtctggtccttcgnnnnnnnnnngtcccggaataacgagtgttagaccgcaatgatgtgatcgtcgatctcgtccaccctgttgacgccgcacaggcccatcgtggtgagcagctccttctggatgatgtcgatcgccttggcgacgccggcctggccgccggcgccgagaccataggcataggcgcggccgatcatgcaggactttgcaccgagcgcgagcgcgcgcatcacgtcctggccggagcggatgccgccgtcgaacatgatctccatcctgtcgccgaccgcgtccgcaatctccggcagcacctcgatcgaggacggtgcgccgtcgagctgccggccgccatggttggagacgacgagagcctgcgcgccggtcttggcggcttcctccgcgtcctcgacgtccaagatgcccttgatgacgagcttgccgggccagatgctgcggacccactccacgtccttccagttcagggaggtgtcgaattgcgaggccgtccattcggcgagacggttgagatcctcggtgttcttcacgtgccccgcgatgttgccgaaggtgcggcgcttgccttgcagcacgccggagacccaggccggcttgctggcgaagtccaatagcttcgagagcgaccattccggcggcaccgtcatgccattcttgatgtccgcatgacgctggccgatcacctgcaggtcgacggtcagcaccagcgcgctgcacttggccgcgatcgcgcgctggatcaattccttgatgaagccgcggtccttcatgacgtagagctggaaccagaacggcttctcgacactggcggcgatgtcctcgatcgagcagatcgacatcgtcgattgcgtgaacgggatgccggccgcctgcgcggcacggcaggcatggatctcgccatcgccatgctgcatgccgagcaggccgacgggcgccaggatcagcggcatggtggagggctcgccgaggatcgtggtcgaggtgtcgcgcttggaaacatcgaccaggatgcgctggcggaacttgatcgcctgcatgtcctcgcggttggcgcgcagcgtctcctcggcataggagccgcggtcgcaatagtcgaagaacgccttcggcacgcggcgcttatggagcgtacgaagatcgtcgatacaggtgatatgcttcatgtcgcttccccgcccgtctttgacccagcagtcttgcatcggaacatttcggggtcatctagcatggttggatgcacagccaaatcgtttgcgggatgttttgcaggagggcgccatgacgaggccgcacgctggaccgtcgccggaagagatcaaggagaagcaggatctcgatgaggcgctcgaagagggactggaggagacatttccgggctccgatcccgtcaacgtcacccagccgccgccgagccgcgaggacggccatgtgaagcgcagcgggtaggacgggtttcgccccggcgcggcgatttggcgggaagcatagcgttaacaagaccttaccgaatcggccccgcagccggttccgtaatgattcatcatattttttgaagccaagttagccgcgatggccttataagacccccagcaaatcagggatgcgggtccccatcgggaagcccgtggttgtcgaggggatcccctggttgctgccttgggggacgatatgagccgcaaatatttcgggacggacgggattcggggccgcgccaacggactgatcacgccggagctcgcgctcaaggtcggccaggccgccggtctcgcgttccagcgcggcgaccaccgccaccgggtcgtgatcggcaaggacacccgcttgtccggctacatgatcgaatacgcgatggtcgcgggcttcacctcggtcggcatggacgtgctgctggtcggcccgatgccgacgccggcggtcgcgatgctgaccaagtccatgcgcgccgacctcggcgtgatgatctcggcctcgcacaatctgttcgaagacaacggcatcaagctgttcggcccgcagggcttcaagctttccgacgacgtcgagaagcagatcgagcagttgctcgacgagcccatcgacaagcggctcgcacaaagcgcgagcctcggccgtgcccgccgcatcgatggcgtgcatgaccgctacatcgagttcgccaagcgcacgctgccgcgcgatctgtcgctcgatggccttcgcgtcgtgatcgactgcgccaacggtgccgcctacaaggtggtgcccgaggcgctgtgggagctgggcgccgacgtcgtgccgatcggcgtcgagcccgacggcttcaacatcaacaaggattgcggctcgacctcgccggaagcgctgtccaagaaggtgcgcgagatgcgcgccgatatcggcatcgcgctcgacggcgacgccgaccgcgtcatcctggtcgacgaacgcggtcatgtcgtcgacggcgaccagctgctcgcggtgatcgcgcagagctggaaggaagacggccggctgtcgcggccgggcatcgtcgccaccgtgatgtccaatctcgggctggagcggttcctgaacgggcaggggctcgatctcgtgcgcacgccggtcggcgaccgctacgtgctcgagcagatgctgagcggcggctacaatctcggcggcgagcagtccggccacatcatcctgtccgactatgccaccaccggtgacggcttcgttgccgcattgcaggtgctggccgtggtgcagaagctgcgccgtcccgtgtccgaggtctgccatcgcttcgatccgctgccgcagatcctcaagaacgtccggcacaagggcggcaagccgctcgacgattccgacgtcaagtcggcgatctcggacggcgagaagcggctcaatggccacggtcgcctgctgatccgttcctccggcaccgagcccgtgatccgcgtcatgggcgaaggcgaggaccgcatcctggtcgaggacgtcgtcgacaccatcgtttcggcgctgggccaggcggcggcgtaaggcgagctctcttccttctgcccttgtgggagaaggtgccgcgaagcgccggacgaggggttctcgcaactcgcaatgctgttcgtttggatagagacccctcacccgtctcgccgctaatgcggcgagccaccctctcccgcaaggggagagggtaagagacgcattccagccatttgcgattgacggtggtttggctgccgctcgcatcgtaatcaccggttcgcggcgttctgccgcgccggattgctgcattgaacaagcctgttgtcgtctcggatgaaacgctgaccgagcccgtcgtcgtcagcgatgtgacgcccgccgccggcaaggcggcagggccggcatacatcgtgctcgccggcatcagcttctcgcacttcctcaacgacaccatgcagtcgctgatcgcctcggtgtacccgatcctgaaggacacctatgcgctcgatttcgcgcagatcgggatgatcacgctggccttccagttcacggcctcgctgctgcagccggtcgtcgggcactacaccgacaagaaggcgcagccctattcgctggcgatcggcatggcctcgaccttcttcggcctgctgctgctcagcgccgcgcagcaatatctcgtcatcctcgtcgccgctgcactggtcgggctcggctcggcggtgtttcacccggagtcggcgcgcatcgcgcggctcgcttcgggcggccgctacggctttgcgcaatcggtattccagctcggcggcagtttcggcacctcgatggggccggtgctggcggcgctgatcgtggtgccgttcgggcagggcagcatcgcctggttctcctcgatcgcgttcctcgcgatcctcatcctctggcgcatcggccgctggtacgcgccgcagatcaaggcgaggacgacggccgctgtccagtcccgtcccgacgcgccgagctcgcgccgcgtcgccgtcgcgctggccgtgctcgtcgcgctcctgttctcgaagcagctctacgtctcgagcctgtcgagctactacatcttctatctgatggaccgcttcggtgtctcgacgcaggcagcccagatctatctcttcatctttctggcggcgaacgccgtcggtgcctttctcggtggtcccctgggcgatcgcttcggccggaagatcgtgatctggatctcgatcctgggcgcgctgccgttcacgctggcgctgccttatgccgggctcgttgccagcgccgtgctcagcgtcgtcatcggcctgatcatctcctcgacgacgtcgtcgatcatcgtgtttgcgcaggagctggtgccgcatcgctttggcatgatctccggcgttttcttcggcgttgccttcggcatcggcggcctgggcgcggccgtgctcggcaagctagccgaccatacctcgatcgagttcgtctaccaggtctgtgcctggctgccggcgatcggactgctcgcggtgttcctgccaaagctgccgcgtcacgcgcgttaacgcattctcaactgctgcctccagggcttcatacatcgttagcaattgcgaaccgccggcgctgcatttctgcaacgctcccgccgcgcccgcgcgagcagtgagaaaaaatcaaccttaaaaattagggttaagtggcgcttaaacatttgctggcatcgtcctgccgtgagtttccagaacgtgaggcgctcgttttttagcctcaccggccataaggacgaagccaatgcgtagcgttaagtctctccttgtcgcgagtgcggcaaccctgatctcgtcgatggcgttcgccgccgatatgccgatcgccgcgccccctcccatgtacgcgcccccggctccgcccgccgacttcggcggctggtatctgcgcggcgacatcggcatgaccaaccagagcgccaagcgcatcgatagcgcccttccggccgggtatacgaagtcgacggaaggcctcggcttcgactcttcgccgctgttcggcctcggcgtcggttatcgcttcaacaactggtttcgtgccgacctgatcgggcagtaccgcggcaaagccaatctgcacggcagcgacaacgtcgttggacccggcttcgtcggcgtcaacaattacagcggcagcaagtccgagtgggtcgtcatggccaacgcctatgtcgacctcggcacctggtggtgcatcacgccgttcatcggcgccggtgtcggcggctcctacaacaagatcagcggcttccgcgacgacggcgtgtcgtacagcccggctctcaacaacagcgtcgcctacttcgccgacaacggaaagtggaacttcgcctgggccgctcacgccggtctcgcctacaaggtcaaccccggcttcaccgtcgaactggcctacagctacatgaacctcggcgatgcggcgcccggcaattatcgcttgttcgacaacagcgcctccggcccgacttcgatcaagatcaaggacatcacctcgcacgacatcaagctcggcgtgcgctgggatctcaacagcccgccggcctacatgccgccgccgctggtcaccaagggctgatcgcccacgctgatcggttaggacttcttaacggcgcgggatcatcccgcgccgttttgctttgcgtatttttcatggcgcgcagtgatgaaagcacccgccgcaaccattggttaaggttaacaggcgatgatcatcgcaacagttcgagtccgatggagcgtggtgatgcgtaggctggtgttggcagcggcggtgttggggacgatgtctgtcgcgcatgcggctgacatgccggacctgccggtgctgcggggcggcttcaccgaaggcttgtcgaagtcatccgtcaattgggatggcttctacgtcggtggtcagttcggctttgccacgtccgagatggacttcagccgcgctccgaaatcgatgacggatttcatgctgcgcgacagcatcctgcaggccccggttggaggatggtcgctgctgccgaagaatcacgtgcagacgacgggattcggcgcctttgtcggccggaactggcagtattacgacgctgtgatgggcgtcgaagccaactacagctacatgaacaatctcgcgagcaccgcaagtgattccatgacgagattgatcgccggcgaagaagctcccacaaatcacgtctatacctacaacacgacgctgggcggcggcgccgcgttgcagctcaaggactatgtgaccttccggggtcgggttggatggtccggcggagacttcatgccttatgccttcggcggcctcgcgatcggacgcgccgatgtatcgcggtttgcgacggtgtcgtacctgaagtacgacgacttcacggatcccaacaccggcgtcaccacgcgcacaaccatcggctccgctacgatgacgcagtccgagcaacgcgtgaacagcttcatctacggatggacggcaggcatcggtatcgaatacgcgctgctcgactgtgtgatcctgcgcggcgagtgggaacatgtcgggttttcgagcgccaagaacatctccgtcaacttgaacaattttcgtgtgggcgccggctacaagttctaggccggcgttgcagccggttgacacggccgcgtggtcctgatgctctgtcgcccgaaagtggggcgggctgcgatgaagatttacggcgacagcaattccggcaattgtctgaaggtgaagtgggtctgcgacaagctcgcagtgccctaccagtggatcgagatcgacacccgcaagggtgagacgcgcacgccgcaatttctgaagatgaacggcgccggccaggtgccgaccgtcgcattcgacgacggccgcacgctggcgcaatccaacgccatcatccgctatctcgcccgcgacagcgcgcttgtcccgcgcgacgctttcacggcggccaagatggacgaatggctgttctgggagcagtacagccacgagccctatatcgcggtgtgccggttcctcatggtctatctgggaaaggacgtctccgagctcgatcccgaaaaggtcaagcgcggctatgcggcactcgaccgcatggagcagcacctttccggcagccgcttcttcgcgggcgacgaagtttcgctcgccgacgtgtcgctgctggcctatacgcgcctcgcgcatgaaggcggcttcgatctcggccgctatgcttccgtccgccgctggatcggcgaagccgaagcgtttctcggcctgtcgccggcgcgctgaggtgcggagttgtctgccatgaacgccgatgccattgtcatccgttccgcgcgccgcgaggacgttgccgcgatcgtggcgatgctcgccgacgatcatctcggtcgcgcacgcgagcgtgtggaggatcccttgccggcctcgtattacgacgcattcgcgcgggtcgagcgcgatccgaatctgacgctcgtggtggccgagggcgcgggcagggtggtcggctgcctccagctcgcgatcctgcccggcatcagctcgcaaggcggcgtacgcggcctgctcgaggacgttcgcgttgcttccgattgtcgcagccgcggcatcggcgagcgactggtgcaatgggcggtgacggaagcgaaggcgcgcggctgcaatctcgtcgagctgctcacgcatcagacgcgcgtcgatgcgcagcgctgctacaagcggctcggcttcacggcgagtcacgtcggcatgactgtccgcttttgaggcaggaaggaatgcgcgttgcgcggccggcgaaatcaggtcgggcatgcgttcatcttaagagctggtaaactacctagccgtcgttcacgttctcacaggaacgaagaatgctacggcagcttctgacaccgagctcggtcggttcggggatttcgatgccaagctattcgatgatcaaggtcggcaacggctatgtcgtgcaggccaatgacaaatgcattttgaaggtcggcagccgccgcaaggccgcgcaattgatcagcgatgccacggacttgctgaatgcgctcgctgttgtcgaagctccagaaattgcaccggagctcccatcactgacgcgtgaggccccggaacttccttgactgcccttcccgattcccgtatcagccgcggcgggacacctccccccaacgggaggcttactatctggaagggtagatcatgaccgtagcgaagcccgcttcgcggccgaacgtgccgcatttttcttccggcccctgcgccaagcgccccggctggaacgcccaaaatctcaaggacgcagctctcggccgttcgcatcgcgcgaagatcggcaagaccaagctcaagctcgccatcgatctgacgcgcgaggtgctcgaggtccccgccgattaccgcatcggcatcgtgccggcgtccgacaccggcgcggtcgagatggcgctgtggtcgctgctcggtgcgcggcccgtcaccacgctcgcctgggagtctttcggcgagggctgggtcagcgacatcgtcaaggaattgaagctcaaggacgtcaccaagctgagcgcggcttacggtgaaatccccgacctgtcgaaggtcgatcccaagagcgacgtcgtcttcacctggaacggcaccacctcgggcgtgcgcgtgccgaacgcggactggatcagtgcgacccgcgagggcctgaccatctgcgacgccacgtctgccgcattcgcgcaggcgctcgactggccgaagctcgacgtcgtcaccttctcctggcagaaggcactcggcggcgaggctgcgcacggcatgctgatcctgtcgccgcgtgcggtggagcggctcgaaacctacaagccggcctggccgctgccgaagatcttccgcatgaccaagggcggcaagctcaacgaaggcatcttcgtcggcgagaccatcaacacgccgtcgatgctctgcgtcgaggattatctcgacgcgctgaactgggccaagtcgatcggcggcctcaaggcgctgatcgcacgcgccgatgccaacaccaaggtgctcgccgactggaaggcgaagacgccgtggatcgacttcctggccaaggacgcctcgatccgctccaacacctcggtgtgcctgaagttcaccgatcccgcgatcacctcgctctccgacgacgcgcaggccgacttctccaagaagctggtcgcgctggtcgagaaggaaggcgccggctacgacttcgcctattaccgcgatgccccggccggcctgcgcatctggtgcggcgccaccgtcgaggccagggacgtcgagctgctgacgcagtggatcgactgggcgttcgccgagaccaaggccgcgctcgcgaaggcggcgtaactcgtcaccccattctcgtcatggccgggcttgacccggccatccatcgagaaagatggacccgcgggtctcagagcgcgaagacgcgcttcgcgctcatgccccgcgggtgacgacatcagcatatcgcgcccactaagggatcatccccatgaccaagcccaaagttctcatttccgacgcgctctcgcccgctgccgttcagatcttcaaggaccgcggcatcgaggtcgacttccagcccaacctcggcaaggacaaggacaagctggccgagatcatcggcaattacgacggccttgcgatccgctcggcgaccaaggcgaccgccaagatcctcgaaaaggcgacgaagctgaaggtgatcggccgcgccggcatcggcgtcgacaatgtcgagattcccgcggccacggccaagggcatcatcgtgatgaacacgccgttcggcaattcgatcacgacggccgagcacgccatcaccctgatgctggcgctggcccgcgagattccgcaggcggacgcctcgacccaggccggcaagtgggagaagaaccgcttcatgggcgtcgagatcaccggcaaggtgctcggtgtcatcggctgcggcaacatcggctcgatcgtcgccgaccgcgcgctcggcctgcggatgaaggtgattgcgttcgatcccttcctctcgccggagcgcgccaaggacatcggcgtcgagaaggtcgagctcgacgacctcctcaagcgcgccgatttcatcacgctgcacaccccgctcaccgagaagacgaagaacatcatcgacgcggccgcgatcgccaagatgaagaagggcgttcgcctgatcaattgcgcccgcggcggcctcgtcgacgagcaggcggtggtcgatgcgctcaattccaagcacatcgccggcgccgccttcgacgtcttcgtcgaggagccggcgaccaagaacgtgctgttcggccatccgaacgtgatctgtacgccgcatctcggcgcgtccaccacggaagcgcaggagaacgtcgcgctgcaggtcgccgagcagatgtcggattacctgctcaccggcgcgatctcgaacgccgtgaacttcccctcgatcacggccgaggaagcgccgaagctgaagccgttcatcgccctcgccgagaagctcggctccttcgcgggccagctcaccgagaccggcatcctcaaggtggagatcacctacgagggccatgtcgccgagatgaagatcaaggcgatcacctccgccgtgctgtccggcctgctgcggccgatgctgggcgaggtcaacgtcgtctccgccccggtcgtcgccaaggagcgcggcatggtggtggacgagatcgtgcgcgccgcgcagagcgattatgagagcctgatcaccgtcgccgtcaccaccgagcggcaggagcggtcggtctcgggcaccgtctatgccgacggcaagccgcgcctcgtcgacatcaagggcatccgcgtcgatgccgagttcggcaagtcgatgatctacgtcaccaacgaggacaagccgggcttcatcggcaagttcgcgagcctgctcggcgacgccaagatcaacatcgcgaccttccaccttggccgcgtcgcgcccggcagcgatgccatcgcgctggtcgaggtcgacggcgcggtaccggccgacctgctcgccaaggtgcaggccctgccgcaggtcaagcaggccaaggcgctgacgttctgagtgcggagattccacaggactctcgtcgcggttcgaaggcttcattcgcaagatcagctcgaaggcggtctcacatcgaggcgctcgtgctgagccgccgctgcattccagagagaccttcctgcgccggtcgggcgaacctccatcaatccgagaggttcgcccggcggtatcggtcggccgctcgatgggccgttagtttacgtgcggcttcgacggataaaaccgatccttcgctctcgccgcattagcctgcggcattggcggaagcctggcttcgccaactctcggccgggatggtggagcgttgggtaccggctgtgcttcgccgaggaaaacgcgcgacggcagtcgcttgtccgagggattggccgtgccgggcctgtcggcgaagccgccgccgccggcgccggtgcagtcgagcgaaacctgcttccatccggttgattgtccgatcggattggtcttgtcctcggccatcgcctgcacgctggtcgtcttcgacaccgagatcttcttggtgaagaccgcctcgtacttgcccggcgaaacgaacgacgaccaggcctcgacgaactggctctgcatcggctcgttaccgatcttggtccagagcttgaacttgactccaccggccttgctggtgccgacgcggacgcgggcgtgggtcacctggcatttcgccccgggattgggactcgtcacatggccggcggaggtcatgaagcggaggtggatgtccttgacgctgaagttcggctccttggcggcgacgtcgtcggccttgccatgcttgccctcgcatttcaccggcacggccacgttggccgtgtgcttgtgcggcgttcccagcccgcccgaaggaagcggaccgacatcgttgctcgggatcaggaacgaggctatcagctcgacgccgaccgaaccgaacgtgttgtggctttcgcgaatgccctttccttcgctgagcttcttgttgcaggtcgcaatgatggcctgcttttctgcagccgtcatgaagtcggtcgagccttcataggtggtcgagaagttcacctcgtcgtcgtgcttcttgtcgggagacgcgttgacgaaatacatgccctcgggatggccgagctgacgcaccttgtagttcacgatcgggtacgacggcgttgtgatgtggaccttgacgggcaggctgatggtgctgccctcgatcttggtccacgacgttccattctcggaaacgaccttcaggatggtggagctgaagccgttgccggcgatcgtgccgttcgcgcgggccgcatgagcgccggtgctgccggtcatcaacaggaggatcgaggccgctgcactgcgcaggagccatggcgggaggtgggtggcaaaagacatggaagttctccgtaagggtttgaaaatacatttggttttcgtgtgcagcgtttcttgggggatgcacgaaggttggtcgctgttgtcccaaaatcagtttgccgatatgatttcacgaacatcatgaatgacattcagctgaatcgggtcgacctgaacctgcttccggttttcgaggccgtgctcgccgaagggaacgtcgccagagctgcggctcgtcttcatgtcacgccctcggcggtgagccatggacttggccggctcaggcagcagttcaacgaccccttgtttctcaagacgccgaaaggcgtcgtgcccacagagcgcgctctccaactcgccgatgccattgcggacgtcctggcacgtgcgcggcgcgtggtggggacggcggagccgttcgatccggctcgctcgaggcgccgcttcacggtcggcgcgcccgatgcgatcgcagccgtcatgatgcctccattgctgaagctcgttcagcgcgaggctcccttcatcgacatggctttgcgatacgtgctgcgcgaagcagcctttgcagcgctggatgcgcggacagtcgacatcgctgtggttccgatcgacgacgttccagcgcgctacgtgtccaagatcgtttttgaagacaggttccagatcgccgtccgtcgtggccattccttcgcggcagaaccgacgctgaagcgttattgcgagatgcagcacgccatcgtgtccccggccggcgatacgcgcgcttacgtcgatgacgtccttgccagcaaagggctatcccgccgcgtcgcgatgaccgtgccgagtttcatgctcttgatggcggttgtcgctgaaagcgatctgatcgccgccctgcctaaggggcttctcgatgttcacggcgcccgctttggtttgctcggcatcgattcaccgttgccgatgcgaagctttcaacttcgtgccatcgttccgaaggtcgcgatgatggatgccggcgtcgagtggctgttcggcctgctggacaatccgccttcgaaggcgtcggcgtaagcattcgctccgcgatagtgccgcctcctggtcggagttcgagtccagagcgcggaatccgacagcgtgcggatattccgacctgcggaaacagccgcgggcgaccggatggcgtttttctttcccgcggccgcccaactttgtgtaccaatagcgtcaggacgctcagttcaagatggttcgacagggagaaacacatgcgtgaagccgtcatcgtttcctatgcgcgcacgggccttgcaaaatccggccgcggcgggttcaacatcacgccgccgatgtcgctcgcggcgcacgccattcatcacgcggtggaccgcgccggcgtcgagaaggactatgtcgaggattgctatctcggcaattgcgcccatggcgcgccgaacatcggccgccaggccgcgctgctcgccggcctgccgaagaccaccgccggcgtctcggtgaaccgcttctgctcctcgggcctgcagaccatcgccatggccgccaattcgatccgctcggacggcgccgactgcatcgtcgccggcggcgtcgagagcatctcgattccgggcggcgccacgccgaaggaatcgatcgatccggagctgctcaaggtcgcccccgacatcttcatggccatgatcgacaccgccgacatcgtcgccgagcgctacaagctcagccgcgaataccaggacgagttctcgctggaatcgcagcgccgcatggcctcggcgcagcaggccggcaagttcaaggacgagatcgtcccgatgaagacgaagatgaaggtggtcgacaagcagaccaaggcggagagcatcgtcgactacgtcgtcgatcgcgacgagtgcaaccgtcccgacaccacgctggaaggtctcgccaagctcgagccggtgaaggggcccggcaagtacgtcaccgccggcaatgccagccagctctcggacggcgccgccgccgtggtgctgatggaagccaaggacgcggagaagcgcggcctcaagccgctcggccgcttcgtcgcgtgggcgaccgccggctgcgagcccgacgagatgggcatcggaccggtgttcgcgattccgaagctgctcaagcgcaccggcctcaagatcgacgacatcgatctgtgggagctcaacgaagccttcgccagccagtgcctgtattgccgcgacaagctcggcatcgatcccgccaagtacaacgtcaacggcggctcgatcgcgatcggccatcccttcggcatgaccggcgcccgtctcaccggccacctgctgcaggaaggcgcccgccgcaaggcgaagtggggcgtggtgacgatgtgcatcggcggcggccagggcggcgccggcctgttcgagatctatcactgagaccacgcgagcggtccgaatgcagaagggcacggcgcgagccgtgcccttcgtcgtttcgcgcgcagcgaagcaatcaggaatcgcttcgcggcacagcctggattgctaggccttcgccagcaccggcgcgaacaccacctcgatcagcgtgccgtggcctgcgttcttgatgttgaagcgggcgcggttggcttcgaccagcgccttggtcagcgacaggctcagcgccgagctgtcggcggcgtcgccgggcggcggtgtgcggaacggctccatcgcggcggcgacctcgcgctcgctgaggccgtggccggtgtcgcggatgcgcagcgcgatctcgccgcggtcggtcagcgcggtcgagacgatgacctggccgcccgcgctggcgagccggatcgagttcgagatcaggttcatggtgatctgccgcatcgcgcgcgcatccgcgctcacctgcggcagcgcatgcgcgagcgaggtgcggatgatgatgcgctcgcggttggcctgcggctgcatcacggtgacgcaagcctcgaccagatcgttgagattgaggtcggcgaagttcaggtcgagctggccggtctcgatccgcgacagctccagcaggtcgtcgatgatggcgatgacgcgctcgccggaggcgcggatgtccttcatgtattcgccgtagcgctcgttgccgagcgtgccgaagcgctccgagatcatcacctcggcgaagccgatgatggcgttgagcggcgtgcggatctcgtggctgatccgcgccagcatgtcggccttggcattcgccgcgccgtcgacgaggcggcgggcctgcgtcagctcgctctcgcccttcttggcctgcgagaggtcgcggaacaccgcgaagaagttcggcccgtccgggcgcgtccggcccatgatcatcgcgagcggaatggcgccgcccttcttctcgcggcccagcacctcgcggccgtggtcgagcaggctcgcaatgtcctggctcttcaggctttgcagataatcggcgacgacctgctggctctccggcgcgaacagcgtcatcaggttctgctgcagcagcgcctcgccgtcgtagccgaacagcgcctcggcgctgcggttgcaggcgtggatgttgccttcggcatcgaacatcacgatgccctcggccgtggtgtcgaggatggcggcgagatcctcggcctcggcttcgccggctgcgggctcggcgatctctgcgacgatggactcggcaacgacggcctcggtgacgacgctctccgcgacgatcggcgtcggctgcggcagcgcgcagatcagcgcatgcgcgctctcgccgtcccagtcgatcgcatgcagatgcgcgtccgtcgtcgccagcggcgcttcgccggtcgcgaccgtcgcgctgatcgtcaccggcgtgccggcttgcgaggtgctgctggcggacgacacgcccggctcgacatagagcgcatcgagcccgccggcattctccagcgcgctgacgctggcatagcccatgcgcgcgaggaaggccgggttggcgtagagcaggcggtcgagccgatagatcaggatgcctgatggcaacaggtcgagcagcgtgcggtcgcgcgtgctggtgccgcgcggcggcggtgccggctcgctcagccattcggcggcggcctgcggcgcctccggctccggtgccgctggctcggctgcgatctccgccgccggctcggatgcgtcggctgcgatcgtctcgcgctcgcgttcgagccgctcggacaattgccgcgcgagctcgttgaacgcgctgttctcgaccggcgtcagcgtcggggcgcgcgtatcgccgggagggcggaacggcacgacattgggaggcgtttccacgtgcgtgtccagatcggttgggtgtgaagtcgcgtcgcttgtgggctctggcagttcaggctttggcagttcaggctctggtgcttcagtctctggtgcttcaggcccggatgtcggctcgggctcggccggcttgatcggcggaggcgccgccgccgcttcgggcttcatgtgaggctcggcttcggtctcggtctcggtcgcgggcccggcgacatcggcggagaggccatgttgcgtcggcgccgcggcgagccgctcgaaacggcgaagcgcctcgagccggttgagcgcatcgagatcgcggcagacgccaaagcccctgaagccggcgaagttgcgcatctcgtcgtagaccggcaggcccgcgagctcgaccggcaggcgctcgccgccgtcggccggccagctcaccgtgatgccggcccaggtgtcctggctttgcagcgcctgtgcgacgcgcccgtcgggatcgagcgcgaagtcggccgcgatctcgcgccagggccggccgaagccggcggccgtgcgcgggccgatcaggccgatgaattcgtcggagagaagcacaaagcggccctccgcatccatctgccagaggaagcgcagcggatgctgacgcggtgcgggcggctcttgctggcccgaagacggcttgcccgaggaaggctcgaccatgccgccggtgatcgactcgccctgcggcgacacgatggccgcgctgcggttttcaaccggagtgttttcggtcgaagtgctttcgatcggaatgttttcaaccggggcctcgggcgcggcggatgcgacaggcgctgccgcctcgctgtccggctgcgcgtgcgcgatcgtctccgccggcgccgctatgtcctccggctcggcgaaggcgtcgaacagtgcgatgtccgacggcgcctcggcggacggagcaggcgggggctccggcgcagcggcggagggcgcggccggcgcaatctcgtgcgagggctgggccggctggctgtgcgcgacgtccggtgccgccgcgggcgcggcatcgcgcgccgcggccgggttggcggccggctcgatcagcgcgaccaggccgatatcggcgcctcggccgacccgctgcagcaccatctggccgatgccgatctgcgtcgcggcgcggccttcgcgcagcgcgtcgctgcgggcccgttcgaggccggcctcgaacaggtcgcggaagccgagcagggtgcgggcggcctcgctcgcgccgacgaacaatccgtccggcgcgaacgccgccatcggcaccttggcgcccgcgaccagccgatgcagccgctcgaccagcggcatggtgcgcagcgccgggtctatcgcggtgacgagcacggcgtgactgccgtcggcgaaatcgagccgggcgcaggcgcaggtcatcagcgtgccgagccgggcgccgaagccacgcagccgttcgagccgcacgctcccgcctgccggcagctggcgcgcgagacgggcgatctggcggcgatggctgtcggcggggccgaacaccctgtcggcgagggcggcgctgttggccgcgccgaacagttttgcgccgaccggattggcccacagcacgcgcgcgccgtcggtcgaccacagccaggtggccagcggtgaggtcgcatgcacggccagccgcggatcgcccacacctcgcaactggaaatccgaacgaatcatcgggccggcttgtcactcgcgcatgctgtggcggctgccggaatgacagccttaagaaagagttagtatcgcccgcggctgcgggcaggtccacggccgccgggcccgaaaacgccccccaagcgccgataaccttaatggtgccaggcccgcaagccgcagcgatgcggcatccaagggattcgcggggccggctccgccgtcattccggcgcgcgcgcggcgcgaacccggaaatccatccatcctcttgctctgcggccgatggattctcaggtgcgcaattgcgcaccatggctccgtcgcttcgctccggcctcggaatgagggcgatggagcatgtcccgcgccgccctcaacccccggtccccccataccggaacctcacccttacctagattaaatttccgcaacgcacccgtctgccgcgttgcaatgcacaatgttgacatgataggcagccatagtgctgggcgctgggcgagccatctcattcgtttcgcgtttccagtctttcgtacccgctgaatgcgagggcccacggtcggggccggcgggcgcgccagaaggctcactccatttttcaattagcgtgagggaccaacatgacaggtgcgactgatccgttttctgcctcgatcatcccgttcgaggttcccgagcagatgcgtgcgttcgccgaaaagggcgtgtcgcaggcccgcgagaactacgccaagttcaaggacgccgccgaaacccacaacggcaccgtcgaggccgtgttcacctgcgcgtccaggggcgcgagcgaatacaccgccaagctggtcgagttcatgaaggccaattccagcgcccagctcgacttcgcccagcagctgttcggcgccaagtcgccgaccgaagcgatggagctgtggaccggccacgcccgcaagcagctcgagacctaccagtcccaggccaaggagctggccgagctcacccagcgcgtcgccgccgagacggccgagccgatcaaggccagcgcctccaagtattatccgcccgccgcctgagcgccggggccggtttgaacggcatgatccggaaaagtgtgtagcggttttccgatcagatcatgccaaacaatggaaacccgggccgaaacgcccgggttttctttttgaaatggtgcactcgaccgcgcccggcgctccgtctcccaaagggagaggtcggatcgccccccggcgatgcgaagcatcgtccggcgcgatccgggtgaggggatccgctctcgcgttggaccgcgctccgccccgcatgcgcgcgccgagcgacccgacctcttcccgccggggagaggtgaacgacgccccgccgatccactcgttttctcgcagcagtgacgggcaaatatcgggttttgcggccttgccaaaaacccccgttgcacctagtttccgccccgtccagccccctcggcaccggccctctgaagggcgtcctgaggcgcggctcgccaggatgcagttgtagctcagttggttagagcgcctgtctgtggaacaggaggtcggtggttcga

SEQ ID NO: 197 - DNA, 70981 bp, Bradyrhizobium colbertium
  misc_feature (4275)..(4284): n is a, c, g, or t
  misc_feature (63587)..(63596): n is a, c, g, or t
cagatggaggcgccaccaccgccgatggatgcgccgccaccgccaccgccgccaccgcgagcgccgccggggctcagcccctgcgcaaagctcggagaggtcatgggtagaacgagcgccagcgctgcggcagcactcaaaactttcaaagtgttcatggttcaactcctttcccgcaagcaaaccccatgagtgggcaggagttcctgggaccatgccagtttgcgcgggaattgagcctcgcgcgcagccgctgtacccggcatgaacggatcgcgtccgatttgcggcaatacctgtcgcagcggcacatcgtgagccctgtcgaactggacatttcgtcgcccggatggcatcaggaccccacgaaagcagggcccttgccgcatgaaacagttcttcctcaagttcttcacctggtggaatggccagaccttcggcacccaactctggaccaggcggtacggagagctggtcggcgaggacgagcagggcaaccgctactaccgcacccgcggcggagccatcgatccggcgctcggtttcgagcggcgctgggtgatttacaacggctacgcggaagcgagccggattccgccgtcgtggcacggctggattcatcacgtcgtcgacatgccgccgaccgagatcaactatcagccgcgcgagtgggaaaagccgcaccagccgaatctcaccggcacggcgaaggcctatcgtccttccggctcgacgcttgccagcggccggcgcccgaaggcaaccggcgactatcagccctggacgcccggttagctttcagccacccgcaaccgccatcgtgccgaagcggatgcacatgcatccgcgccatgccgctgtggacaatgggaacagcggggatgccgcgtgcgccggcgttgctttgacgcgggcgatggagctcaatgatcccatcttgcggagatgggagaccatcgcgttcggttcgggcaacagctcgcgactgtcccgagatgcagcggccgccgaggaaggactcgaccgggagataggcccccggtcttgaagctccgaaatcgcccgatgtgaatgtgcagccgccgtgagacaggaaaggccgcttgggaaaccgagcggcctttttcttttaggacctgcatgctcgttccccaacgttgcacgctgcaccgcatgccagacacgagagcgagtctacatcacgcgctcggcagcccgcttgaccgcctcgagtcgccgcgcctggttctgcgcgccgcgcgctccgagcaacgccatcacctcggcgggtgcggtgtcgggcgaacccgaattgaatggcggggctggattgtattccatctggagctggatcgcttccgccatggtgcgattgaccatgatcgacaccagcgtcagcgcgaaatcgatcccggcggtgacgccgccgccagtgatgcgattgcggtcgatgcagacgcgtgtcttcgtcggcgtcgcgccgaactcggcgagcatgtccattgcgctccaatgggtggcggcgcggtatcccttcaagaggccggcggcgccgagcgccagcgatcccgtgcacaccgaggtgacgtatttggcgccatcagcctgccggcgcaggaaatcgagcacttcctcatcgttgagcaggtcgttggtgccgtggccgccgggcacacagatcacgtcgagttgggggcaatccgcaaaggtcgtggtcggcgtcagcgtcatcacggagtcgctcggcaccggttcaatccgcttccagatcaggtgcagttttgcgtcgggaaccatggcgaacacctgcaagggaccagtgaaatcgagctgggtgacgcgcggaaacaccaggaggccaatctgaagcggggacgacatagacagggtccttcaattgcgagcttgacgcgggcaggatggcatggtgcctttctgtccggaatggcgtaattccctcactttcggacatacctatgatcggcatcctgatcttccccgacttccagctgctcgatgcggcaggcccgatctcggcgttcgagatcgcagcgcgctgcatcggcaaggcgcctctcattcgcgtgctggcggcgaagcccggactcgtgcgcagttcgtccggagtcgagatgatggcgcgtgacctcaagtcggccagcacgatcacgacgctggtcgttgcgggcgggaccggggtggccgatgccgcgcgctgcgacgccacgcgcgctttcgtgcaacggctcgcaaggcgcggcgtacgcgtcgcgagcgtctgctcgggcgcctacgtgctggccgaagcaggcctgctcgacgggcgccgcgccaccacgcattgggggcgcacgcgcgatttcgtctcgcgctttcccaaggtgaagttcgagccggaccagatctttacccgcgacggcaatgtgtggacctcggcgggaattaccgcaggcatagacctcgcgctcgcgatgatcactgaggaccacggcgaggagatcgcacgacagaccgcgcggcagctcgtgctgtaccaccgccgcagcggaggccagtcgcaattttcgtcgctcctggagctgaagacgccgagcgggcgcttcggcccgctattgtcctgggcgcgcgaaaacctcgatgcgcctttgacggtggaagatctcgccgaccgcgccggcatgagcgcgcggcacttcgcccgcgcctttgccgccgagaccggcacgacaccatccaaggcggtcgagcgattgcggctcgaggccgcccgggagcgcgtccagtcctcccgcgaggcgatcgagctcgttgcggaaacgaccggcttccgcgatcccgagcgcatgcggcgcgccttcatccgcgccttcggccagccgccgcaggcgctgcggcgcgcggcgcgcgcgggctagcagccgtgtactcctgaactggcgctccgtgcggaatggccaggcctgcttcgctcaggagcgggctacggcgatggtcacttatccggcttttcgcgcacgatggcgccggtcttgggatcggcgtggaattccattttctggccgttcttgacgccttcgccttcccactggccgtcgtcggcttcaagcttggtgacctgtgaatagccggactccatgaccttggatttcacctgctccatcggcatccagtcaggtccgggttgatcggccctcgctgccgagcccatggcgagcgagccgagaaccagaatcatgacaaacttcatcgcgaacctccttgcggtgagaggcttcaaccggggtcctgaactgatgttcctcccctgcgtcggtgcgacgcgaacgagcgagcgtcagccttggtcgtcccgttgagcgcgtctacgtccgcagtcagtcgccttgcgatcggcatcagcatgtacggcgcaaggtggatcgggaactgtgtcatcgcgaaataaagccaggtgctaggcggcaatgcgccggccgtcgccgccagcatcaatccgagattgcgctgtgagaccatcagcccgagcgccagcgcgcgctcatacccaatgcggcggaacagcagtgcggtgatggcgagcagggtgaaatagatcgcgaaggacagcagcgcgaggcccatggtgaacagcggctggcttaccaaggcgccggcgacgtcgcccatcaccgcggaggcgaacacaaagaggatgatgatgttgaagccgtcgatcggccgcttcgcgcgctgaatcgcctccgcgccaaagacccagcgggtgacggtcgcggccagcagcgatgcggcgaggatgccgaggagcttgaggccgagcgtcagcggcgagatgctgagcattccgtcgagaaacagggctgcaaacagtgaagcggtgaagggaacgagcgcagtcgatgtcaccagcgtgaccagcaccaaggtggcatcgagccccatcagcgcggcgagtgccggcgaggccatcatcggcgaggccatgccctggagcatcagcgcaagagcaaggccgggggagtggctcgtcagtcccattgcatgggtgatcagcccgacgatcagcggaacaccgatcatcgtccaggccgtagccgttacgaccagcgccggcctgcggagatggccgtgcagcgcggcgaaatcgacgcgcatgaaggagatgcagagtagaaggacaatcgcctcggtgacgtaagggcgcagcaacgccccaagtggcggcaccgcgactgcgatgaacgcgacggcggccaccgcacgggtgccctggccgcnnnnnnnnnnggaagagcgaagatggattggagaacggaagtcatcttgagtgtggcatcagtccaacccgtagcccgaatgagcgcggcgatatccggaagaagctattgccgcggtaagagcggtcccgcaggttgctgcgctcatgtgggaggggactgctgtcagcccaatcctttcagccaggcgccgatctcgccgacagcaacattggcctttgccagcagcttgcccatcgtgaagaagccgtggaattggccgggatagtgcttggtcgtcacgggcacgccggcctgcctgaggcggtcggcgtattcgtcgccttcgtcacgcaggggatcggcaccggcggtcagcacataggccggcggcaggccggcaaggctttgcgcgcgcgccggcgaggcgcgccagtcgtggatgtcggccgcgctgttgagatagtgatcgcggaaccagcggatcaccgagtgggtcaggagcacgctggtctcgggctcgctgtgggagccgtgcgtcatggcgaaatcggtcgccggatagatcaacacctggcctgcgagcgcagggccgccggcatcgcgcgccgcgagtgccacgaccgcggtgagattgccgccggcgctgtcgccgccgatcgagaggcgcgaggcgtcgatgccgagctcgcgcgcgttcccagcgacccattgcgttgcggcgacggcgtcctctgcggcagcgggaaatttgtgctcgggcgcaagccgatagtcgatcgagatcacgatcagcgcaccttcgaccgcaagctggcggcagacgacatcgtgagagtcgaggtcgccgatcacccagccgccgccatggaagaataccagcgccggcgacaggccgtcgcgctggcgcggttctttgggcacgtagaggcgggcggggatcacgccgtgcggcgccgggatcgccagcggtgcgacgcgggcgagctccggcgcgtcagggttggtggcaaagcgggcctgcgaataataggcgcgtgcttccggagctgtcagcgtctcgtaggcagggcggccggcctcctggaatgccttgtagacggcagcggcatcgggatcgagcacaacgggcatgaacggggacctcggggtttccagttatcattgggtgtcattttcgggcgacgcccgccctggcctggtgaggggctcatgactatcccatccggcagctggcctggccagaccgcgccgggaagggcagggatgccgccctttccccgccgtattcggcgtgttaaccggagggcctgcgagcggcggtatcccctgtagaatgtccaacaagcccgattcgctgttgaagccgcgcgagatgtttcgaacctttaccctgacaggccttgcggcactgctggccgccaccgcactcacggtcgcgacgccggctcaggcgcagatcggcacgattttctccgacccgccgccgctacggccgccgggcagcattccgcgcggccagctgcagcagatcccggaggacgacgaggaggtgccggaactgccgccgcagggccgtgtgctgccgtcgcgcccgatgccgctgcccccgggccgccaaggtaacgtgatgccggggccggtcgagagccagccgctggccccgccgccgggctccaccctcgcgccgccgaaccagccgccttccgcggcgatcaccccgtccggtccgcaaggcgtccccggtcagcgccagccccagcagaagggcgcgccgggcactgtcccgcagacgccggcgagcctgcagccgggcgacgaggtcgttaccgagccgccggcccagaagatcgcgaacaagaaggcgaccttttcgggcctcgacaagatcaccgggcgcatcatcaatttcgacgaggagatcggcgagaccgtccaattcggtgcgctccgggtcaagaccgacgcctgctatacgcgtccggccacggaggccgccaacaccgacgccttcgtcgaagtcgacgagatcaccttgcagggcgaggtgaagcgcatcttctcgggctggatgttcgcggcgagcccgggcctgcacggcgtcgagcatccgatctacgacatctggctgaccgactgcaaagagccgcagcagaccatcgcgactgcggcaccggacccggcggccaagccggcacctccgccgcccgcacagaagaaggccgcgcccaagcaggcgcagcagcgtgcgccgcagccgctgccgccgatccagcagcagcaaccggcaccgccgccgcctccgccgccggagcaacggccaggtctgttcggtatccccgggttcgggcgctaaccccagctgtcgatcattgccgcgaggcgatgatctcgagcgcgcgtgcgccggggatcggctcaccggcggagagtctcaggaaatcgccaggctcgcccgcgagcgccttgtcgagcagcgcggtgtagcgccgccgcgaaatctcgactgcgccgaagctcttcagatgctcggtgacgtattgggtgtcgagcagctcgaagccgccgtaaatgagccgcgcgaccagatgcaccagcgccactttcgaggcgtcgcgcgccgtgtggaacatgctctcgccgaagaaggcacgtcccaggctgacgccgtagagccccccgacgagatcgtcgccctgccaggcctcgacgctgtggcaatggccgagctcgaagaggccgccatagaggtcgcggatgcgcttgttgatccaggtgtcctcgcgcccggcctgcggcgcggcgcagccggcgatcgtcgccttgaacgcagtgttgacggtgacgcgaaacgagtcggagcgcaccgtgcgcgccagccgcgaggcgacgcgaaatccgtcgagcgggatgacgccacgcaactccggctcgacccagaacagggtcggatcgtcggcgctttccgccatcggaaagatgccgcaggcataagcgcgcagcagcacggccggcgtgatttcagacggggcggagtcgcgcgaagtcatgcgccatcatagcaggatcgcattgcggttgcgatgggtggcgcggcagggcgcgaggtcagcttgcggcggcggtgctggtcttgccggggactgcgggcacgcggccgaatttcagcacgatccgggttccggaatgcgcgggatcgcgttcgaccgtggcgtcgagcttggaagccatggccgcgacgatgcgctgacccatgccggtggaacgcggatcggccttgacgttgtcgcccacgccgtcgtcggagatcgagagctggagatcgtcgccccgcgagatcagctcgacatggatggggccggcgccgtccggataggcgtacttgaccgcgttcatcaccagctcgttgacgatgatgccgacggcgaccgcgcgatccggatcgatctcgatcggctcggccttcaacgtcaggcgcgacatccggttgccctcggcggagcggcggagatcctcgagcagcgagtccagatactggttcaggaccacgctcttcaggtcctgcgaggtgtagaggcggcggtgcacttgcgcgacggcggcaacgcggcccatcgcattggtcagcgccgccttgacctcgtcctgcgcggcggagcttgcctgaaggtgcagcaacgaggcgatgatctgaagcgagttgccgacgcggtggttgacctcgcgcagcagaagctcgcgttcggcggcaagcgccgcgtagcggtcgcgcgaggcgtggatctcggcctcggcttcctcgcgcgccctctgcaattcggcctggcgcagcgcgccgtcggcggcgacatgcagcagcgggatgaaatcgccatggacgtccttgaccagataatcggccgccccggccttcagtgcagtcaccgcgatgctggaatcctgcgacgccgtgacgaatacgaccggcggcgcgtccgggatcgccatgatctgctcgagcgtttccagcccgtcgaggcccggcatgtactggtcgagtgccacgacatcgatgctgtcttcaatgctgccctgggcgccggcgcggcggatgcgctcgaggccttcctcgccgctcgcggcatggacgaccctgtagccgcgccgcgtcaggccgcgatcgaccaggcgcgccagcgcgtcgtcgtcatcgatgtagagaagtgtcggcgtgctctggttcatgtggcggctggcgggacctggatgaccgagaagaacaggccgagctgccggatggcattggcgaaattctcgtagttgaccggtttggtgatgtagacgttgcagccgagctcgtagcaacgcttgatctcctgggaatcgtcggtggtggtcagcaccaccacgggcgaggccttcagatatttgttctccttgatctgcctcaggatgtcgatcccggtcatgtctggcagattgaggtccagcaggatcaggagcgcattgcccttctgcacgagcccggaaccgtcggcgccgaacaggtgcagcatcgcgtcggtgccgttggcgaacgagacgatttcgttgttgacgcccgagcggcggatattgcgctcgatcaggcgggcatggccctcgtcgtcctcgatcatgatgatggtgacaggctgggtcatcgatctgcgttccggttgttcacattccaggcgatgggcagggtgatggtgaaggtgctgcccgcgttcagttccgatgataccgacatggtgccgccgaggcgacgcacaagtgcacgcacatgcgcaagcccgatgccctggccgggcttgtcctgggttcccgcacggcggaacaggtcgaatatccgctggtgatccctcggatcgatcccgcggccgttgtcgctgatctcgaagatagcgtaaccgagcttggtccgcccgctgattctgatctcgccgggcacgcccggcttgagatatttgaccgcgttgtcgatcagattggagaagatctgctcgagcgcgagacgatcgctcacgatgtccggcagaggctcgaggtgaatctcggcccgggcctccgccgcctggtgcgccactgtcgagacgatggccgcgatcagctcgcgtgtgtcgatcttcaccggctggaattcgcgccggccctcgcgggtgaggttgaggatggccgaaatcaggcggtccatcttggcgatcgacgacttgatgaagccgagcgcttcggaaaaatcctccgagagctgcttgtcggcgccttcgagcgcgatctcaccgggtcctgcgggcgccggcggcgtcccatccccacgagcgcgggcgaggctgctgatacggcggaagatgtcgccgccgagctcctcgagctcgctggtgaagcccatgatgttgacgagcggcgagcgcaggtcgtggctgacgatataggcaaagcgctggatctcgttgttggcttcgcgcaggtcggcagtgcgctcgtcgactacggcctccagattgacattggcatcgcgcaagcgtgcttcggcctcgtcacgggcgagcgccgagcggcgcaccagccaaatggagatcagcgccaacaccacgacgagcccggagccgatgccggtcatcgatgcggccagagtctggctgcggtcggagttcaccgttcttagccggaacagccgttcctcttcccgaatcattgccgtcgcgactttggcaatcgcggcagtggtatcggtggagccgacctcgcggaccaccgctgctgccttgtccggatgaccctgacttatgaaatccatctcctgagcgaactggccgagccgggtctcgatcgccgcgctcaacttctcgatgttcgcacgttgtgcagggttgtcgccggtcagacgcgtgagcctgtcgagcgccgggatgattgccgccacggccttctcatggtcggccttgaagtccgtcgcttgcgtcagcaggtagccgcgggcggtgctctcggcacgccggatttcgagcagcagagcgttgatctggttctgcgcctcgatcgtgtgaaccacccattcggcgtcctgccgggccttgttgaccaagtagaccgagccggcgctgatcgcggtcagcaccaaaaggcccgccgaaaacagcaggacctgccaaaacgcccgccgtcgctgggcctcagccgtcacgacaggtcacctgtaagttcagtggaattcaaaacgcccccttggaactgcccaaccgtccagaacgcgattgggccccaatagttcctcgggaggagaattatctctgggcgggttccatctttccggcgagatattgctccagccagtggatgtggtagtcgccgttgatgatgtcggcttcacggaccagggcgcggaacagcggcagcgtggtctcgatgccctcgaccaccatctcgtccagcgcccggcgcagccgcatcaggcattcggcgcgggtcttgccatgcacgatcagcttgccgaccagggagtcgtaatagctggggatcgtgtagccctgatagaccgcggaatcgatccggacgccgaggccgccgggcggatgatattgcaggatgcgccctggtgacgggcggaaggtctgcgggttctcggcgttgatgcggcactcgatcgcgtggccgatgacctggacctcgtcctgcttggccggcaggtcgccgcccgcggcgatgcggatctgctccagcacgaggtcgatgtccgtgatgctctcggtgacgggatgctccacctggattcgcgtgttcatctcgatgaagtagaactcgccgtcctcgtacaggaactcgatggtgccgacgccgagatatttcatctcgcgcatcgctttggcgcaggtctcgccgatcctggcccgcgcggcggcggccaatacgggcgatggaccttcctcccagaccttctggtgccggcgctgcagcgagcaatcgcgttcgccgagatggatcgcgccgccgcggccgtcgccgaggatctggatctcgatgtggcgcggcttctggaggtatttttccaggtagacggaggcatcgccaaaggcggacttggcctcattggccgcggtcgacagcgcgagctggaggtcggcctcactgtgcgcgaccttcatgccgcggccgccgccgccggcggccgccttgaccagcaccgggaagccgatctccctggcgatcgccatcgcgtcgtcattgggaccgacagcgccctcggagccgggcaccacggggatgccgaggcgcttggcagtcttcttcgcttcgatcttgtcgcccatcaggcggatgtgctcggccttcgggccgatgaaatgcagattgtgctctgtgagaatttccgcaaagcgggcgttctcggagaggaagccgtagccgggatgcactgcgtccgccccggtgatctcgcaggccgcgagcagcgcgggcacgttgagatagctgtccttggagggcggcggcccgatgcagacgctctcgtccgacaggcgcacatgcatggcatcggcatcggcggtggagggcaccgcgacggtcgcgatcccgagctccttgcaggccctgaggatacgaagcgcgatctcgccgcgattggctatgaggatcttgtcgaacatattgtcctgcagcgaatggcgagtggcgaatggcgagtagggaaggctgacgccattcgctattcgctattccccattcgcgtcactcaataatcaccagcggctcgccgtactcgaccggctggccgtcctcgaccaggatctgcgtcaccgtgccggcgcgtggcgaggggatctggttcatggtcttcatggcttcgatgatcagcagcgtctggccgacagagaccttggtgccgacatcgatgaacggttttgcgcccggctccggcgcccaataggcggtgccgaccatcggcgaagtcacggcgccgggatgcttcgacagatcggaggcggctggggcggacgcggcggcgcttgctgccaccggaacggcggcgggagcgggtgccatcggcatcggcatggtcgcggcaacgctgatgttgcgcgcgacgcgcaggcgcaggcccgcccgttcgatctcgatctcggtcaggcttgtctcatcgagcagcagggccagctcgcggacgagcgcggaatcctcgctggaaaactttgcggctgctttgtcgtctggctggcgcgccatgttgtttgatccgaatgttctgttggaagggggcgtcaggcgttgggcctgatgccgagcttggcggcaaggccctggatggcgaggcggtagccttcgatgccgaaaccgcacagcgacgcgaaggccgcgcgcgcggtgtaggaatggtgacgaaagctctcgcgggcgtggatgttggtcacatgcacctcgaccgccggaatctgcaccgcgagcagcgcatcgtgcagtgcgatcgaggtgtgtgaatagccgccggcattgatgatgatgcccttcatcttgcgccggtgcgcctcgtggatgaagtcgatcagctcgccttcgcggttggactgccggcagtcggccttgagaccgaagctcgccgccgcgtcccggcacagcgcctcgacgtccgccagtgtcgcatggccgtatttttcgggctcgcgcgtccccagcatgttgaggttcggcccgttcaggacgaggatcgtgtcggttgcaggttcggccattccaatcccggcggaggtgcttcggcgtggcgggttataggtaacaaagcgcgtgaggggaagccttgaagggcctcaggggagggatcaggcgcctcatccggtgtgcaaaaacttgtgcggaagccacggaaattgcttgttaaccagtcgaaaacgtggatgtcggccgaacgaaaagggggcgggcattgctgcccgccccctgaggctgccggtatgcgcccttagacgttcaggacggccacgatctcgtaggtatccggattgatgatcacgatctcttcccggaccaggacgtacttgtagctccgccactccggatagatcgtcacgacccgggacggcagggagtgaagggtgatgccctcccgcggaatgcgggtgccgaccgagatcgagaagttcacgttcgtcaccggagcgacgcgctgctcgcggatgaccgaggtgatctgggtccgctgctcggtcgagagcttggcagcggcgccggcctggccgaccgtcgtcgaggacgagccctgaccctgcgcattctggttggtgctcgcaccggtgccctggcgggtctcggcgttgttggtcgaggcgccgctcttgctgccctcagccttcatgtccttctggtccttgctgccggacttgctggtgtcctggctcatgctcttggacttgtcctgctgcgacttgtccgtctggccctgtgcacggtcgtcggtgcgctggcccttggtgcccgacttgtcgtcggccgcgttcttgttcgtcgcgccggacttgtcctccgaagcccgaccggacttcatggtgtcggagccgccggactggccgacagtccccttgtcgtggctcatggagtcgcggcccatcgagccgccgcgatcggcgccgccgccggagggctgcgactgctgcatctgtgcgccgccggcgccgccaccgctgtcgcggcccatggtgccctgtgcattcgccaggccggtgcccgcaacgagtgcggccgcggcaaccgagatcataaagcggttcaacatcgaaattctcctcacgtgttcattcgcgtcattgcccgcgccgacaacgaaaggagatttgagttgttccggaacttcggctgttccgcggcatttgtttgttgaacgccagatgaatgactttgcacgaagcggccagccttcggcgaaagaaaaaggccggcttttctgccggccctcgatgttctcggtaatcctacaacgtgcgatcagcaagtcgcctttccgcagcgtgcgatgctgatcttttccttgagggcttcgacaccgacggcgccgattacgatctgcttgccgatcacgtagctcggcgtgccgttcatgcccatcgcttcggcgagcttgaagttctcctcgatggtggcgcggacctcggggctggcgatatccttctcgattctcgcggtgtcgaggccggcttccttggccgcctggatcgcgcgcgccttgtccgcggcaccgcggccgttcagcagcctctggtggaagtcgagatacttcttgcccgtgggatcctgcatgcgcacggcgaccccaacctgggccgcttcgaccgaaccctggctcagcaccggaaactccttcagcacgaccttcagcttcgggtcgctcttcatgatgtcgagcatgtcgcccatggcgcgcttgcagtagccgcaattgtaatcgaagaactcgacgaacgtgacgtcgccgtccttgttgccgagtacgacctggcgcggcgagttgaagatcgcgtccgcgttctgcgcgatgctggcctcgtgcttccgcgtctcggccgctgtttggcgcttgctgagctcggccatggcctcctccagcacctcgggatggctgacgagatagttcttgacgatcttctcgatgtcggtgcgctgcgcatcggagaagctgtcggccgacgcaggggcggatgcgccgaacatggcgagcgcgaacagcgcgggagcaagcaggcgcagcgaaagcatgggcaaatcctctatccaaagcaggtgtcgataaaacgtcgcgaactcaagctcgatgtcgtgacgtcgtgtaggggcgtcggttacgttacgtcagttgcgcggcggctttgccgccacgatgtcgtcggccttgacccatccgggcgtgccgacggcgaaacgggttttcgcgcgcgtagcaagctcgcgggcagtcttgttgtcgccgcgcaggtaagcggcctgggcggaggcgagatccgcctcggcatagtctcccttccggccataggccatcgcgagctgggtatagccgagcgccgcctctggctctcgtgcgaccgcggcacggagaatccggacggcatcgtcggtgtaggccctattatcggttccaaccagagcctgcccaagtaacatctcgatgaggggggcattgttcgaaagctgcgccgccttgcgcaggggagcgatggcctcggccggcttgccgctctccagaagtgcctggccgcgcacctcgtagaagtaggggttgttcggctgcacctggatcagtgcgtcgatctgagcgagggcgctgcgcagatccccgtgcagataggtgctgatcgcacgggcatagcgcgccggcaggctgtcgttggtctgcggatagcggcgatacaccgtctccggccgctccatgaaggcggaaatcttggcgcggaccatgtcgtgccggagctgcagcgcgggatcgtccttcttggtccagtacgggctggagctggcgagctcctgaagcgcggcgacgcgctcggccggcatcggatgcgactggagatagggatcggcgccgcgggccgcgaacaggctctcgctggtgaagcgcttgaacgtctcgtacatgcccctcggcgattgctgggtcgccgtgaggaatttcacgccggcgcggtcggcgttctcctcctgctggcgctggtaggacaacagcgtgcggcggatcatctcctgcggagctgcaatggcggccgcgccggcattggcgagcccattgttgccggcgccgctgcgctgcgcgctgccggctgcgatggcaccggcacccagcagcatcgcgatgatcatctgggtctgggcggcggcgagctgctcgcgcagcttggagagatggccaccggccagatggccggtctcgtgcgcgagcacgccgatgatctggttcggcgtctccgactgcaggatcgcgccccaattgacgaatatgcggcggccgtccgcgacgaacgcgttgaacgagctgtcgttgatgatcaccatctggatgttctgcttctccagacccgcgacgcggaggatcgggcgcgtatattcgcgaagcaactgctcggtctctgtgtcgcgcaggaccggcggtcccttggcccgcgcccgcgcagacgagaatggcgtcagcgcgatggcggcggccgtcacgagggcggtgagggcggaggccttccggcgcaatgcgatctggagcaacatcaagcggtcttggtcaaacggtcttggtcaagcagttgcgtgattggtttggcgattggcggcggaccggatacgcgatatgcccttgtaagccgtgccctttatgagccgtacaatgcggccagtctggggcgcaagcgccccgtttttcggaccggacggtcggttcgccagcgaatagcagaaatcgatgcacgacgcgacattgaggaaccggttggggcaatggctcgagccctcccgccgcagtgatgttcccccctttatggtgatggacgtcatggccgcggcggcccgaatcgaggccgccggcggccatgtgattcacatggaggtcggccagcccgcggccggcgcgccgagcaccgcgatcgcggccgcccatgccgcgctcgaggcgggacggatcgattatacctccgcgctcggtatcccatccttgcgcgagcgcatcgcgcggctttatcgcgacacctatggctgtgatctcagcgccgagcggatcgtcgtgaccactggctcctccggcggcttcattttggctttcctttcgatgttcgagcccggcgatcgcgtcgccgtgaccgtgccgggctatcccccgtaccgtcacatcctcaccgcgctcggctgcgagccggtcttgatcgaaaccacgaacgagacgcgccacgcgctcacaggcgaggcgctgctcgcggcgcatcgcaaggcgccgctgaagggcgtgctggtgggcagtcccgccaatccaaccggcacgatgatgtcacgcgaagcgctcgccggcctcatcgcggcggcggaagatgccggcatccgcttcgtctcggatgagatctatcacgggctcgactatgcgtttccagccgtcacggcggcggcgctgaccgagcacgcaatcgtgatcaactcgttctccaagtatttttgcatgactggctggcgcgtcggctggatggtcgtgcccgagattctggtgcggccgatcgagcgactccaacagaacctctcgatctcggtgccggcgctgtcgcagatcgcggcagaggccgccttcgacggcgcggccgagatggaggcgatcaagcacggctatcaggaaaaccggcgcattctgagcgagggtctgccgaaggcaggtctcagcaagttcttgcccgccgatggtgcattctatctctatgccgacgtttcggatttcacctcggacagtttcgcgttcgcaaagcagatgctggagcaggcacgcgttgcggcaacgcccggagtcgatttcgatcccgttcacggccgctcgttcattcgtttctcctatgcgcgctcgccaggggagatgcgtgaggcagttgaccggattgctgattggcttaaatgactgcgacagtttttcttcacccttccggagttcagcttgtcagaccgttccgtcccatccgccgctgcgccacattcccctctcgccgccttgatgtggccgacccggccaggcgaatccgtcggcgcgctgcgcgccatcgtgctggtcgcgctcggcacggcgttgatggcgctgtccgccaaggtgaatctgccgctgccttatgtgccgatgacgttgcagactctggtggtgctgatgatcggggccgcctatggctggcgcctcggcagtgcaaccatgattgcctacctcgccgagggggcgctcggcctgccggtgttcgccgggccggtgggcgggattgcgccgctggtcggcccgacagcgggctatctgttcggcttcgtgctggctgcattcgtgaccggctggctcgccgagcgcggctgggatcgcagcgtgttgctgctgtttgccgcgatggcggttggccatgtcgccattctggccgccggcttcggctggctggcttttggcctcagcctcggcgccgcgaaagcctggcaggtcggcatcgtgccgttcattgcggcctcgctcgtcaagaatgcgctgggcgcggcgttgctgccggcagcgcgccggatcgtcgagcgccgcgggtaaagacgcgctacaaccacactggcggacgatgaagcaaaagggctgatcgagatcctcgatcagctttcttgtgagggctagaagcgctcgggccggtacggcgtgggatcgacggccggcgtctcgccattcatgatctccgccagcaggcgtccggtcgcgggtcccagcgtaaagccttggtggccatggccgaagttcatccagaggcctgggtgacgcggagcgcggccgagcacggggagcatgtcgggcgtgcagggcctcgtcccgaaccatggatccggttcgacccgcttgccgaggtcgatcagctcgcgcgcggaggcttcggcgctggcgagctgcaccggtgtcgccagcgcgtccgcgccggtcaattccgcacccgtggtgatgcgaatgcctttggccatcggacccatggcatagccgccagtcttgtcgatgagcggcaggtcgagcgaggcgccgccgctgtaatgcatgtggtagccgcgcttgcgcaccagcggaatgcgatagccgaatttgtggaggaggtcgggcgaccacggcccgagcgtcacgaccgcgtggggagcatcgatgcgcccctggtcggtgtcgactgaccagccggtcgcggtctgttgcagcgagcgtgcatcaccgagcacgaccctgccgccgagccgctcgaacaactcggcataggccgtgaccagcgcgccgggatcggaaacggtccaggtgtcgagccaatggatcgctccaggaagatcgtcgcgcaaaatcggctcggccctggcaagctcgctgccggacagcacgcgaaagttcacgccgaattcgcgctgatcttcctccgcagccttgagcgcgagattcaatgacgcggagtcgcgaaacaacgcgcggtagccggcgcggcggatgaggttgtcggcgtgcgcctcgcggatcaagacgtcgtgctcggccgtcgcataggcgatcagccgtgcccacgcctcgatcgcctcgcgatgccgcttcggcgccgaatgccaccagtagcggagcaggggctcgacgtggaggtggagtgaggagaggctgtagcgcacgtcgttggtgcggccggtcgcgatcttcaacagtgaagcgaagtcgcgcggcatcggataggggcgcaccgcttccgcctggatcatccccgcgttgccgtagctggtctcgcggcccggctccctgcgatcgaccagcgtgacggcccagccgcgctgctgcagatgcagtgccgcgctcacgccgatcatgccgccgccgagaacgattgcactgttcatttgacctcaccaaccaaaaaccgcccggtttggccgggcggtttgatctcgatttcgcttcctattcgccgccaccgccgaagcggcgcgaccaccagccggcgcggcgcggggccgcgggggtttcgcttgcggcttgcggcgcgggttcggccgccggtgcgggcggagcgacctgctcggctgcctgcgcaaccggcgctgtcggctcgctccggccgttcgacaggaagctcaccttttcccggaccgtcgaacgtcggcgcgtggccttgtcgtcggccggctcttctgccgtcgcggcagcaggagccggctccggctccggcttcgcggccacctcgatctgcgcctcgaggtgcggctcaggctgcgcgatttgcggctcagcggtttgctccgcgatgtgctcggcttgaccgtgctcggcttgggcgtgctcgacctgcgcgatagagggcgcagcttccctggagaagccgtcaaaatcggcgaccgcgtcggcagcttccgaaggctggccggtgccgagttcgtcgttgatggagccggcaaggccttcctcgccgccaccgcgacggcgacgtccgccgcggcgaccgcgccggcgcctgcgatcgctgccctgctgctcgccgcgggcggcctgttcctcgccctcctcgccgtcctgctcggcctcggtctcgtcctcggcttcgccggcgatcatcgcaggctcgggcagcgtcggggccgtatcctcgcgcaactcgccctcgcgctggccaccgcggccgcgccggcggcgacggcgcttgcggcgctggccgtcctgctcggaggcggactcgccggccgcctgctcgtcggcaagaccctcggtctcgtcggtttcgacctcggattcagtctcgatgtcgaagccatcttcgtcgtcataggcttcttcggcctgtggcggcgggctcgcggcggcctgcgcagcaagcagggccttggcggcttcgagcgtatggacctgctcaccgcggtcgatcacataagcctgtgggccgctgacgccgggatcggcgatgacagagagcgtgaccttgaacccgttctcgaggtcgcgcagatggccgcgcttgtggttgagcacatagagcgccacgtcggtgcgggtgcggaccacgagattgtgggtcgcgcctttcatcaggatctcttcgaggccgcgcagcagctgcagtgccaccgaggacaccgagcgcacatggccggtgccgccgcaatgcgggcatggatcggtcgagctctccagcacgctggcacggatgcgctggcgcgacatctcgagcaggccgaaatgcgagatacggccgacctggattcgcgcgcgatcctgcctgaggcaatcggacagcttgcgctccaccgcgcggttgttgcgcttctcgtccatgtcgatgaagtcgatgacgatcaggccggcgaggtcgcgcaagcgaagctggcgggcgacctcttcggccgcctccaggttggtcttgagcgcggtgtcttcgatgtggtgctcgcgggtcgagcgacccgagttgacgtcgatggagaccagcgcttcggtctggttgatcacgatgtagccgccggagcgcaattgcacggtcggcgagaacatcgcatcgagctggctctcgacgcccatgcgcgagaacagcggctgaccgtcgcgatactgcttcaccgcgccgacattggcgggcatcagcatcttcatgaaatcgcgcgcctcgcggtagccagcttcgccggcaacctgaatctcgtcgatctccttgttgtagagatcgcgcagcgagcgcttgatcagcgagccttcctcatagacgagggtcggggcctgcgacttcagcgtgagatcgcgcaccgtttcccacatgcggatgaggtattcgaagtcgcgcttgatctcgggcttggtgcgggaggcgcctgccgtgcgcaggatgatgcccatgccctcgggcacgtcgagatcctgcaccacttccttcaggcgcgaacggtcttgcgcgctggtgatcttgcggctgatgccgccgccgcgggcggtgttcggcatcaggacggcgtagcggccggcgagcgagaggtaagtcgtgagcgcggcgcccttgttgccgcgttcttccttgacgacctgcaccagcatgacctgccggcgcttgatcacttcctggatcttgtactgacggcgcggacggaaggtgcgctccggcacttcctccagcacgtcgtccccgccgacggattcgacgacttcctcttcggcttcctcgccgtcctcgtcctcttcatcatcatcgtcgtcgtcatcatcatcatcgccggctgcttccgcggcttcggcctgcgacgcttcagtgctctcgccggcggcgtagacggcatcggccggctccgcggctgacgttaccgcttccgccagggcctccgtgggtgcctcggaagctggtgtctcggagacatgagcttcgaaggcgtgagattcctggggctcggcaacggcttcggtcgcaagcaccggttcggcgccgacggccgcgacaggcgcgggcgtctcatcggcatggtcatggtcgtgatgatcgtgctcgtggccattgccaacgtcgccgtggtggtgctcgtcatcatgatgatgattgtcgtgatcatgttcatgatgggcgtcgtgctcgccgtgatgctccgcgtcggcatgcagatgctcgccctcgtgcggcgtgccctcgccatgcgggggctcgccctccacgcgctgggccacgggatcggcgccggcatcgaggccttcgacgatgtcgctgcgcacgcgttcgccatgaccgcggcggcgggcgttgcggtggcgtgaacggcggcggccgtgcgaccgattctcgctttcttcctccgcctcccgatgggcctgttcctcggcctcgatcagcgcctgccggtcggcgaccgggatctggtagtagtcaggatggatttcgctgaaggcgaggaagccgtggcggttgccgccatattcgacgaaggcggcctggagcgagggttcgacccttgtgaccttggcgaggtagatgttcccgcgcagttgcttgcgttgcgcggtctcgaaatcaaactcttcgacgcgattgccgcggaccacgacgacccgggtctcttccgggtgggtggcatcgatcaacatcttgttgggcatgtcttaactcttggcggcggcgggcgcgataaaccgtgggcgcgtatcgcgccgccgggtgacgcgacggtccacctgattcgggggtgaggggaaggccgaaacgccgtctctcgcgccgtgccgaaccggaagcttcaggaccaatgcgacgcgcggcattgtcactccgcagcgttgcgaatggtccttcagatttcgtcggcacagtctggcgcatcaagcgtcggcccgtatgaaacactggacggtgaggccgcccttcaatcagttgctgctggccaggcacggcgcgagcgcgctcgccttggggatcacgaaccgctcccttgggatcaagggaccgggtaatgggttacgtcgctgtcagaaccatcccggtacatgagtggtaacgcgggaccgttctaccgccggcgcttgaccccgctccacctcgctgccgcgcaccgcgctggtctggagggaaacggaaaacgctggaattcccaaaccttgagagttccggcgctgcaccgggaggctgaatgcgacacaaccggaaatatcggccgtcagcattccgtacatacgaggaatgagccagccgtgcaagggagcgtcgcacggcggtcacactcagcgagtttcgcgcgtccgtcattaaggagcgattaaccctgtggttctattgcgttaagagggctgctcggaggcacggaatcggtggcgagccgcacaaatcgacggattttgctgggaggcgtgttgctgtgcatcgcggcattgccgtgtgctgattcctcgcgcctcgttgctgcggaaagccagcagcaacccgctcacgcagcagcgaattttccggtcgcgtcggccgcccggctggccggcgacggcaagcacacgcgcttcatcctcgacatcgaccaggccgtcaccttccgcgcggtcacgctggccgacccctaccgggtggtggtggatgtgccgcaagtcaattttcggctgccagccggtaccggcagcggaggacgggggctcgtcaaggccttccgctacgggctcgtgatgccaggcggctcgcgaatcgtgttcgacctgaccgggcccgcgaagatcgccaattcttacgtcgtggaggccgccaacggccaaccggctcggctcgtgctcgagctggaggaggttgatcgcaccgcctttgcctcctcgtcgcagccagaaagccgtcctgaactgcggcccgcaatcgcggaatcgccgcctgccgccgctcccagcgcgccgacgccggatgctccgcaacagaaggccgacggccgtccagtggtggtgatcgatcccggccacggcggcatcgacaacgggacacagtcgagcggcgagagcgagaagaacctggtgctggctttcgggctggcgctgcgcgacaagctggagaaggccggaaaataccgcgtggtcatgacgcgggacgacgacaccttcattccgctcggtgaccggaccaagattgcccgcaatctgaaggcggccctgttcgtctcgatccacgccgatgcgctgccgcggacggagggcgacgcgcaaggcgcgacgatctatacgctctccgacaaggcatccgacgccgaggcccagcggctggcggatgcggagaatcgggccgatgcgatcgccggcttcaacctcgcggaagagccgaccgacgtcgccgacatcctgatcgacctcacgcagcgggaaacccgcactttttcaaaccgtttcgcccgccttttgatgactgaaatgaagcagacggtgcggatgcacaagcatcccttgaagtccgcaggcttccgggttctcaaggcgcccgatgtaccctcggtcctggtcgagatcggctatgtctccaacaagggggacctggaacacttggtctccgagggatggcgatcccgcgccgtgggctcgatggcccaggcgatcgacgggttcctgaccaagcggatggccacggccggcacctcgaactgaaagggttttccctcccgacccaaaggccctagtttggccacagcggacgctttataaaaccgccgcagagggttccggaatcggcgagaatcccgttcggcgagcgtcttgagtccggcatcgatgtgattgcgtaaagccggtgaattcgcgacgtgaggttggcgcctgtttggggtgccaaagggctggtactgggctgatccagagtttgaacggataaacagataatgcgcttgctggtgcggttcatgggcttcctgttcgccgcgggaacggtggtgttccttgtcggtgtcggggccgtggcaggcctgatctggcatttctccaaggacttgccggactactctcagcttcaggattacgagccgccggtgatgacccgcgtgcacgcggtcgatggctcgctggtcggcgaatacgccaaggagcggcggctgtacctgccgatccaggccgtgcccaagctcgtgatcaacgcgttcctcgcggccgaggacaagaatttctacgagcatggcggcatcgactacaccggcatggcgcgcgccggtctggtttacattcagaactacggctccaaccgccgtccgcagggtgcctccacgatcacccagcaggtcgccaagaacttcctgctcaccaacgaggtctccttcacccgcaagatcaaggaagccttgctggcgatgcgcatcgagaagacctactcgaaggacaagatcctcgagctgtatctgaacgagatctatctcggtctcggcgcttacggcatcgcggccgcctcgctggtctatttcgacaagtcggtgaacgagctgacggtggcggaagcgtcctacctggccgcgctgccgaagatgccggccaccctgcatcccgtgcgcaaccgcgaccgcgccatcgagcgccgcaattacgtcgtcgaccgtctgcttgaaaacggctggatcaagcaggccgacgcggacaaggcgcgcaaggagccgctggcggtcaccagccgctccaacggcgcccacaccttcgccggcgaatatttcgccgaggaagtccgccgcgacatcttcgagcgctacggcgagaagaagctgtacgagggcggtctgtcggttcgcaccacgctcgatccgaagatccaggtcatggcgcgcaagaccatggtggccggcctcgtgagctatgacgagcagcagggctatcgcggcgccatcagcaagctcgatatttcgggcgactggggcgtgaggctcgctgagatcaaatcgctctccgacatctcgccatggcgcatggcggtggtcctggagaccagcgagcagtcggcgcggatcggcttccagcctggccgcgagctcggcggcgccgtcagcaagcagcgcgagaccggaatcgtcacggtcgacggcgtacgctgggcacggcccctgcaaggcggcaccaggggcaagactccaacagcggtgtcgcaggtgctccagcccggcgacgtgatctatgccgatccgctctacaaggacggccaccccgtcgagggccagtaccggctccgccaaatcccggaagtctccggtgccatggtggcgatggatccctggaccggccgcgtgctcgcgatggtcggcggcttctccttcgatcagagccagttcaatcgcgccacgcaggcctatcggcagccgggctcgtcgttcaagccgatcgtctattcggccgccctcgacaacggctatacgccctcgacggtcgtgctcgatgctcccatcgaaatcgaccagggtcagggcgccggcgtgtggcggcccgaaaatttctcctcaggcaagttccagggtcccgtgacgctgcgcaacgcgctgcggcagtcgctcaacacggtgacggtgcgcctcgcgcaggacatcggcatgccgctgatcggcgaatacgcccgccgcttcggcgtctacgacgaactgccgaactatctctcctacgcgctcggtgccggcgagaccaccgcgatgcgcatggtcacggcatactcaatgctcgccaatggcggccgccgcgtgaagccgaccctgatcgaccgcatccaggaccgctacggccacaccatcttcaagcacgaccagcgcgaatgccgcggctgcgacgcgccgggcggttggaagaaccagcccgagccgcagttgatcgaccgccgtgagcaggtgctggatcccatgacggcctatcagatcaccgagctgatggaaggcgtggtgcaggctggaacggccaccgtgatcaaggatgttggcaagccggtcgcgggcaaaaccggcaccaccaacgaggcgaaggatgcctggttcgtcggcttctcgccggacatcgcggtcgcagtctacatgggctttgataagccgcgccctctcggcaggggcaatgcggcgaccggcggccatctcgctgcgccgatcgtgcgtgacttcctcaagctcgcgcttgccgacaagcctgcggtcccgttcaaggtgccggctggcatcaagctggtccgcgtcgtcgccaagaccggcatgcgcgccggccccggcgagaccggcggaaccatcctcgaagccttcaagcccggcacggcgccgccggacaattattcggtcatcggcgttgccgacgccgacggacgcggcatgccgctctcgcagcagcagcagccggattccggcttcctcattcggccgggcaccggcgggctgtggtaggccgcggataaggccgacgatcacggttccggcggttgcgctttgcggccgccgccgctacatccccctctcgaactgcacgcgggattccgcaagacagagaacaacatgcgcgccgaaatcgaacggttggtagaagagatcaagcagtcggtcgggctgctgaggaggcatctttgacgtcgagaaatcgacggcgcgccttgctgagctgaacaagctcgcggaagaccccaatctctggaacgatccccagaaagcccagaagctgatgcaggagcgcacctcgcttgaggatgcgctgtccggcatcggcaaggtcgagcaggagctcgaagacgatatcggcatgatcgagctcggcgaggccgagggcgatgagggcgtcgtcgccgaagccgaagctgcgctgaagaacctcaagaaggaggtcgcgcggcgcgagctcgaggcgctgctgtcgggcgaggccgatcgcttcgattcatatctcgagatccatgccggcgccggcggcaccgagagtcaggattgggcgcagatgctgctgcgcatgtacacgcgctgggcggaaaatcacggtttcaaggtcgaattcctcgaagagtccgagggcgaagaggccggcatcaaatcggcgacgatccaggtctccggccacaatgcctatggctggctgaagacggaagccggcgtccatcgtctggttcgaatctctccgttcgattccaacgcgcggcggcacacctcgttctcgagcgtgcaggtgttccccgtcatcgacgacagcatcaagatcgacatcaaggaatccgacgtgcgcgtcgacaccatgcgctcgggcggcgccggcggccagcacgtcaacaagaccgaatccgcggtgcggctgacgcatatcccgacgggcgtcgccgtggtctgccaggccggccgttcccagcacaagaaccgggcccaggcctgggacatgctgcgcgcgcgcctctacgagatcgagctgaagaagcgcgaggagaaggccgccgccgaccaggctgccaagaccgacatcggctggggccaccagatccgctcctatgtgctgcaaccgtaccagatggtgaaggatctgcgcacgggcgtgcagacctccgacaccgcgggcgtgctcggcggcgatctcgatgagttcatggcggcgacgctggcgcagcgcgcgttcggcaccacgaccggcgagatcgaggacgtggactagccatgccccgtgtcgccttcatcggattggggcgaatgggtcacggcatggccggccgctatctcgatgccggcttcacggtgacgctgtggaatcgcagcaagtccaaggcggaagacctgatcgcgcgcggggcgcactgggcgacctcgccggaggatgccgcgatcgatgccgacgcggtcgtgaccatggtcgccgacgacgaggcctcgcgtgcggtctggctcgggccgaaaggcgccgccaagaccgcgaaggccggcaccatcgcgatcgaatgctccaccgtctcctacgaccacgcgcgagagatgggccgcgagctgaacgcgcgcgggctcatctacatcgactgccctgtgaccggattgccggatgcagccgcggccgggaagttgactctcctggccggcgccgacgcagccgatctcgaacgtgcgcggccctatctcgaaccgatcggctcgaccatccgccatttcggcccggtcggtgccggcacggtctacaagctcatcaacaatctgatgggcgctatccagatcgccggactcgccgaaggcatcgcaatcgccgagcaggccggtctcgacatgaacctcgtgctggaatcgatccaggctggcgttgccgcaagcccccaggtgcagcgtcactccaaacgcatggtcgcccgcgatttctccggcgcgaccttcacggcagcgctgcggcacaaggatgccgcctacgctgtgaagctagcggagagcctgctcgccgataagccgatcgttgcacgagcggcggtcgaggcctatgcgaaagcgaaggcggcgatgcctgacgacgatgaggggcggatgatcgagctggtgtcgcggcggaagtagcgggctcacgaacctgctgcctgaaatcgggtgggaagatcgatcgcggtggactagatctgtctctccgtagtcaggccagggttcgtcgtgctcatcaacttcacgctcgcgccactcgaaaagatcatcccctggggccagccggggagctattgccttcattggtttggtctcactttcggcgagtattggatacaagccggtgaagccacactcttcgaatacagcgaccatgcccgggctgccggtgcagagcgctattgcacctatcaagtcgtccgcctctacgaggacttgatggacatgcttccctacatactcgagccggttcctgatgcgctcgtgccgtacatctccggcgacggggccggaattctgcgaagcgcccacgaggcctggtgcgagagagccgatgacgtccccgatgaggatggcctttttgactttgccgacgttgcaatcatgtgggttggaaagcgtcgtctggacagttcgtacctggctccatcggccaacatcgcaatctggtccgatgaagagcatgtgcacatcgagtgggataatcgcgatcgccaactcggtggatcgccggcgtggtcggcgagcctcggctcctatcgcgtgtcgcgaggcgaattcatcgaagagatgaactcgtttcacgttcgcctcatggagcagatggcggcccggatcgagcaggtggcatcaggccaacttcgatccgagatacagatcgacctggcagcactggcgagagagcacgaacaacggacgtgctcgctcgacgctgccttgaagatcgttccggcgacggactggcaacaggtcgaaagagctgtcggtgaaatcctcgttgcgcgaaacgggctgtaggcccttctagaggccaggcgccctgaatttcgccgccggctttgctgtctcctgccggcctttgtgatcgttagcttgtcgatgagccgcgtatgaccatcaatgccaacaggatcgatggtcgggactggtcgctgcttgcggcgctctccattctctggggcggttcgttcttcttcaacggcgcggctctgcgcgaattgccgccgctgacgctcgtgttgctgcgtgtcgcgttcggagcggccattcttgcgccattgctccgcatgcaggggatcggctttcccaagagcatggcggagtggacgccgttcgtcgcgatcgggctgctcaacaatgtcatcccgttctcgttgatcgtgatcggccagacgttcattccgagcgggctggcgtcgatcctgaacgcgaccacgccgatgttcaccgtcatcgtcatggcgatggcaggcgaagagacgttgcagatgcggcggattgccggcgtcgcattggggatcgtcggcgtggtcatcctgcgcggatggggtattgaggcaaggcctgggcaggggctcggcatcctgctctgcctcggcggcgccttcagctacggtcttgcagcgctcgccgcgcgccggttgctgaaaaactcagccccgctcggaacggcgacatttcaactgatggcttcaaccgtgatgatggcggtggtcgccggcactgtggagcggccctggcaactgccgatgccggcccttgcgacctggcttgccgtgcttggcctcgccacgctctcgaccgcgcttgcctatatcgtcttctttcagatcgtgcggcgctcgggcgcgagcaacgtgatgctggtgacgctgctcattcccgtcaccgccatccttctgggatggctggtgctgggggagccgatttccatgcgtgcgatcgtgggcgcgatcgtcatcggcagcgcgctgctcgtgatcgacggacgtgcggttggcctgctgcgccgcggcgcatgagctcttggccaccagtcgcttccaatggctttcgccccgacgttccgatgagagaagcgcaggctcaacccgcgctgagccggacgccagcgcgcaagaatttttgcggatccaccgcttcgccttcgatgcgggtctcatagtgcaggtggggaccggtcgaacggccggtcgagccgacgagcccgatgacctggccgatcttcactatctcgccgaccttgacgttgatctcggagagatggccgtagcgggtggaaagcccattgccgtgatcgacctcgaccatgcggccgtagccgccggaccagccggcggaaatcacctttccaaaggccgtggcgcggaccgggtcaccggtggcagcgcggaaatcgaggccggtgtgcatcgcgggccggcccaggaagggatcgctgcgcacgccgaaaccggaggtgaactctacctcgccgatgacgggcttgcggtaggggaccaacgccagcgtgcgattgagacgatccatctcggcgcgtgtggtgttgatacgatggagctgcttctcgaacggtccggcattggccgtcagcttgatgggcacgaacggcccgcccatcgcggtgcgcggcacggcggcttcgagatgggcaaggttcaagccgagatcgctgaccacgccgcgcatccgccgcatgcgtgagtccatgctttcctcgacggcgctgagcgccgccatctggcgccgctcgacctggtcaagcgagttcgtgagccggaccagcacgttctcgaagctttgattccgggcaaattgactgctcggcgctgccaccacggtcggcgcgcgcgattcgaggcgcgcttcccggtccggcggcgccacgaagatgacggtgtcgctgatcggcgatggcttcggtgtggtatgggttgcgtcgccgcgctgtggggccgagcggggaatcgagccagtcacgtcgggcatggccccgagcgccgtggcccgggactccagcgccgtctggcgcttcatgatctggtctagcttctggtcgaactgctcctggtcaagcagctggcggctggtggtgcggtcgaccctggcgcgcagctcggcgattcgatcttcataagcgtattgcatctcggcctggcgggcgatcagccgggtcagaacgtcgtcgcggaaggcaaaataggtggccgtcgccgccgaccacagccccagcagcaccacggtgccaacgacgatccagaatacgacgggcccaaagcggacctgcttgccggcatggacgatggtgtaggcatcgtcggtggcgggcaggggaatcgcagttgccgccgccgcagcagccgggcggcgctggaaggctcgtccgtgatcgtgagggtgatgttgggggtactgcgagtattgggcagaacttttcgacatcggcactcccgcgccggtcggatgggttccttgcggctcaattgccgcagcaatctgggccggtcatggttaattttccggaaatgggaacgcgcgaattcgacggactggttaaaggcttcttgccgcctccagcacgtcgtcggcatgaccatcgacccggatattgcgccagattcgtgccaccttaccgtcggccccgatcaggatcgttgtccgaagaactcccaggaagctcttgccatacatggacttttcgccccaggcgccataggcctcgagcacctcatgtttctcatccgagatgagcgggatggcgagcttgtgcttgtcgcgaaatttctcctgggccttcaacgggtcggcggagatgccgagcacggcagtgccagcggcagagaaggcttcggcgaggcgagtgaagtcgatcgcctcgcgggtacagccaggcgtatcggcacgggggtagaagaacaggaccagtttgcggccggcatagtccgccagtgtgacggtgtcgccgccgtcgcgcggcaggctgaagccgggggccttttggccttcggccaggccggacttcgcccgagcgggtgggggagacgatttggacgtatttaactgtttcgatgcggccttatgtgatcctgcttttgctatggtcccggttgatttgcttgccggcgtccgctgtgttttcgcggaccttgtttgagtcgatgcctgcgtttttgcggtcttctttttggcggtcgggctgccggaggacgttttggacgatttcttgcgggatttcttggacatacgccttcctttcgacgctttcggcgggtcaaccgaagcggtattgcagctctcgtccggcgtgctggaatcgcgccctcggctgggcaagtttggcggcgccggagtatggttacaaggaattccacgcaccaccccactgctcgttgaacgcgctcccggggcgaaatgacgaacagcaggaatattcgaggtatggcggcagtgccggcgcagggggcttcgcgtcctgtggacggctgcggtcccggcggcgctcacccctacgacgggcgcttgtatcaagaggcaatggcaaggaatacgtcgccccaggactacaaccggaattttgatcggcgcagcggccaatacgagccgcaggaatgggacgatgccgagtgggatccggatcaggaagcggcggcgggccatcgcgcacgccggctgctggcgcgttccggttcgggtttccatcgtttcggagacggattcggttcattgcgccgttggatgggtggaggccgctggctgaagcgtctggccgttgtcgtcggcgccgtgctcgtcattttcgtcggctgtttcggtgcgctgtggtggcggctcggcgccggtccgatcaatctggatatcgcaacgccatggctggcggccgcgatcgaagacaatatcggtcacggcaacacggtcgaggtcggcggtacccagatcgagcgcgccggccgggttcgcatcgccgtacgcatccgggacatcatcgttcgcgatcgcgatcaggccgtggttgccagcgcgccgaaggccgaggtgaagctgtcgggtgcgggtctgctgatggggcggctgcgcgccgaaagcctcaatctcgtcgatgccgagctcgcgatccgcatcgcgcctgatggcactgtcaccgtgtccgccggcgacaccaccaagccgcttgcgaccggcgtcgcgtccaagaaggacgcgggcctgccgccgacattcccccgcaacggggttcccccgccgccgttcgctgctcagccaacgagtcccgaagcgccgcaggcctcaccgcaggcggcggggcagagcggcatcctccaaagcctcgactggctcgacagtctgagcatgacgggactcgacggccagaacctcaacgagatcggcctgaagaacggcaatctgatcgtcgacgaccagcagcgcggcagcaaatggtcgttcgagaacatcaccctcagcctgcgccggccgagccgcggcggtatcgcgctcagcctcggcgaggagggcgcgcgcccgtggatgctgcgcgccacgatcggccctgccgagaacggcgtgcggtccgtcgacatcaaggccgacaaggtctcgacctccaacatcctcctggcgctgcgggtgaaggacctcacctacacggcggatatgccgctgacgggcgagctcaagggcgagctcggccgcgacggcgtgccgaccttcttccgcggcaagatcgcggtgggtgccggcaacatcatcgacaccgatacgcccgactatccgatggggatcgactcggccgagatcaacgtcgagtgggacgccaaccggcgcgtgctggtcgcacccttcaaaatcctctccggcgcgaaccgcctgacattgctggcccatctcgagccgcccaacggcaccaggaatgactggcagctcggattcagcggcggttcgatcctgcttggcggcatcgataacgagccgccgctcgtcttcaaccgcattgcgatcggctttcgcttcgacaccgatcacaagcgcctcctgctgacacaggcggatgtctccaacggcgagatcggcgttgccggcactggcgccatcgattattccggcgagccccggctcactctcggctttgcgggaacgccgatgtcggcttccgccttgaagcggatgtggccgacgctgatcgtccccgaactgcgcgaatgggtgatcgagcggatcgagcgcggaacgctccagcgcatcgagatcggcgtcaactcgccgacgaagaacctgccgcgcaagggaccgccgatcccggacgacggcctgtccgtcaacatcgtggcgagcggcgtcgcagttcgccccgtggatggcatgccggtggtgcgcgatgccgatctgagggcgcgcgtgaccgggcgcaccgcgaccgtgaacatcgggcagggcgttgccgatacgccctcgggccgcaaggttacgatctcagacttcgtgttcgaggtgccggacatggcgcccaagccgtcgccgtcgcgaagccggttccgcgtcgatggcccggtgcctgccgccgctgaaatgctcgccaatgaccggctgagcgatctctccgcgacggtcatcgatcccaacaccagcaaggggacgttcaccgcgaacatccagctcggcatgccggtcaagggcgagctgaccaaggccgacaccacctattccgtcaccgccgacctcaacggcttcgccgccgagaagctggtgatgaaccagaagctggaggcgaacagcctcaagatcatcgccaacaaccagggctaccaggtcaagggcgacgtcaagatcaacggtcaggcagcctcgctggactatcgcaagccggctgagggcgacgcggacgtgaggctgcaggcgacgctggacgatgccagccgcgcgcgcctcggcttcgatctcagccccgccgtcagcggatcgttgccgatcaggctgtcgggcaagatcgcgagcggcgcggatcagaccacgaagctcggcgtcgaggccgacctgacgtcggtgcggctcgacaacatcctgcccggctgggtcaagctgccgggcaagtccgcgaaggccagcttcaaggtggtgccgacggcgcaatcgacgcgtttcgaggacatcctgatcgagggcggcggtgcctcgatcaagggctcactcgaggtcgacgcgaacggcgatctcatgaacgcgaatttcccgatttacgcgccgacagacggtgacaaggcctcgctcagagttgagcgcagccaggagggcgtcatcaagggcacgatgcgtggcgacgtgttcgacggccgcggtttcctgaagtcggcgatctccggccattccaaggaggacaagagcaagctgaagaacgtcgatttcgatatcgacgtgaagctcggtgccgtggccgggttcaacggcgaggccatgcgcagcgtcgatgccaagatgtcgaagcgcaacggcgccgtgaaagccttgacgctgagcggcaagatcggccgcgacacgccggtggcagccgatcttcgcggcggccgcgcgcagggcagtcgcgaagtgatctatctccagaccaacgatgccggcgcgctgctgcgcttcaccgacacctacaccaaggcggtcggcggccagatggtggtggcgatggagccgccgacatccgagccgaacaccgcccgcgaggggctcatcaacgtgcgcgacttcacggtgaagggcgaggcgcagctcgagcgcgtggccgccggcgcgcccaacggcaccggcaacggagtctcattcaacgcgctccgtgccgagttcacccggcagaacggcgcgctgacgatccgagacggcgtggtcaaggggccgatgatcggtgccaccatcgagggctcgatcgactatcccggcaaccaggtgtgcatgagcggcaccttcgtgccgatgtatggcgtcaacaacatcttcggccagatccccctgttcggcatcttcctcggcggcggcaacaacgaggggctgatcggcgtgacctacgaggtcgtcggtacaccggccgcgcccgtgatgcgcgtcaatccgatctcggcgatggcgcccggcctgttccgcaagatattcgaattcaacaccggcaagcagaactcgccgttcgatgaattcccgtcgcagtcgaacgacggctcgacggcatcgacccgtcagctgtcgagcggctgcagcgtctcgcggcggcagtagcgcgatccagttgcagccgcgatgcaaggtgcgctcctctcccgcctgcgggagagggctggggagagggggcctccacagagcggctcccaacgaggagaaagccctcacgcgacgcttcgcgccgacctctcccgcaagcgggagaggtgaacgagcggctacgccgcgcgcacgccggccaggaacgtgccgacttcgccggagagctgctcggcctgttttgagaggctcgaagctgctgccagcaccatgccggcggcgttgccggtctcgtttgcggcggtggagaccacgccgatattggtggtgacctccctggtcgcctccgccgtctgcgagacgctgcgcgcgatctcggcggtggcggcgccttgctcctcgatggcggcgccgatcgaggtggcgatgcggctgacctcctcgatggtggcggtgatgccgccgatcgcgtccacagcttccttggttgcgccctggatctgggcgatcttgtcgccgatctcgcgggtggcttccgcggtctggctcgccagcgacttcacctcggaagcgacgacggcaaagccgcggccggcttcaccggcacgcgcggcttcgatggtggcgttgagcgcgagcaggttggtctgggccgcgatgctggagatcagctcggccacatgctcgatctgctgcgcaccgtccgacagcgcgcggacgatggtgtcggtgcggcgagcgctgtccacggcgcggccggtgacctccgcggactgcgcgacctgacggctgatctcggtgatggaggaggagagctcctcggcggcagctgccaccgtctggacgcgctggctggcctcggtggcggcggagccgaccacggcggcgcggcggttggtgccctcggcagtcgaggacatcgacttggcggtgttctcgagctcgccggaaccggaggccatcaggcccacgagctggccgacggaggcgtcgaagcgatcggcgagggcgatcagggcgtcgcgcttctcctgctcggtgcgggccttgatggcgacctgctcggcttccagcgtgcgcgcggtcagcgcggtctgccggagcacttcgagggtctcggccatgcggccgatctcgtcgccgcggtcggtctcctcgaccggcttgtcgatggctccttcggaaatctcctgcatgcgattcttctggcgatcgagcgcgccgagcacgtcgcgagcaatcagccaggacagcgccgccatcaacaacatcaggccgccgccgatcgcggccagctccagcgtcaagccgcgcacgtcggcgtcgatatcatcgacgtagacgccgtagctgatggtcacgttccatggtgcgaatttgcgcgcgaacacggtcttgcggaccggctcggtctggccggggcgcgggtagagataggaggtcacgccgccctgcgcggtctcgctgcccgccttgataatggcgtcggcgatcagcacgccattggaatccttggcgccggtgatcttgccttcgagctgctgattggcgccgttgacgaccagggaggtgtcctcattatagaccaccgggtagccttggccgccgttgaagctcatgcggcgaccgcgctggtggaacatgctcttggcctcggccggcgtcagcttgcctgctgtgacctcgtcctggagcgactgtgcatagttgtagagcagctctaccgcggtccgcatctgctcgacgcggtcctccatcatgcggctcttgctgagcaccgacgatacgccgatgatggccgtgactgtgagcgccgcaaggcagaccatgctggcaagcttggtgcggatcttcaggtgactcagcagattcatcacagcccctacggaatggttgttattgctcgcatgggtagcatgaagttcttaccaatcatgaacgtaggcatggccggcctgccgcgcgggacggctgccgcaggcttatgcgcaaccgtgcaggcgaatctgctcttgccggcaggcggcggccgatccggagtcgaaaatcgacatggaccttggtagccaaagagacaggttggacaggcaatgaatcgattcgttcatcgcgccgtcatgtccctgctgctcgtcgcggccctcgttctgatctggaatgtgctgggcgcgcgctaagcggcaccggaggtctgccggtgccgccgtgcttagcgggataagttgagtgtgtcagcgcggtgcgggctgcgccggtgcagcacttatttcttgcccattgcggcgtcggcgctgatcgggccgccgccagctgccgagagatacaggcacgcgaagcagaagagtatcgcgagagtgccgttgttcagcaatggcaggaacaccggggtttcgcccctgaacatatggcccatgaaataagcgaaatccatttcaccggacaggatgaaggccgacagccgcgagaacaggccgatcatcagtagtgcgccaagcaccagttcaagcgccccggccgcgccgtaaagcgacatcagctcgactttggcgaacatcggaacagccggaaacttgaacagcttggcgacgccgtactgaaacagcaacaggccggtgatgaagcgaaacaggctcaggagaaccggctgaaagcgggtgagatagggaaagtccattggtttgtgccctccatccaatgcgcgacttggaccgtattcagtttcgtctcgcaagccacttgggatcaatgcgccctgacattttcgtcatgtcggacaaaacatcgcagtagcggtcgttgatccgcacgcgccgcggtttttcgaacgtgttcacctgtggtcggtacgtactattccggtgatgtccggggatgcaggttacgtaggggagacctactcccgcaaggcgggaacgaccaggaacggaatcatgccgagcacgacgctcgcaagcgcgaagatgagcaggagatcgtagccgtgagtcgcatcgtgaatcaggccgccgctccatgagccgaacgccgagcccaggccgctgccgatcgagatcgtcccgaagatggtgccgacgcgcttgccgcggaagatcttcatcgcagttgcggtgatcaggggcccgcgggagcccatcatgctgccgaagcagaccacgaagccggtgagcaggacgacgttcggatagtactgcaggagccagagcagaacgatgccgaggatcgagatcgcgtagctgagcagcaccgacgggcggcgtccgatcaagccgtcgagcgcagaaacacccagcatcccgaacaccagcacgacgccggagaagccccaggcggtcgcggcctggagcggcgggaagccggcgtcgatcagataggccacgatctgcgccgcgatggcatacatgccgaccgcggtgaagaagaacgtcgagaacagcgcccagaaggcgtggtggcgcatcgcgctcacgagcgtccagccgttgtcgacgaagtccggatcgctcttcttggccacatgcggcgagccggccgcgaacaggcgccaaggcaggagcagcagcggcaccagcagggcgagcgcggcaagaccgtagacctggtaggtctcgcgccagccgagatgatcgatcaggagttgcgaggccggcagcagtgccagcacgccgccgcccattgccgagtagaccaccgccatcgcggtcggcagccgcggcccgaaccagcggccgagcaggatcgagttgggcacattgccgatgaaggcaacgccgatgccgacgcagatgccgatcgaaagctggaattgccagagtgcttgcgcatggctcgcgctcagaaaggccgaaccgagcaagagcaagccgagcgcatagacgatgcgtggtccggaatgatcgaacaggcggccaaccaggggggcggtcagtccgctgatgagccaggtcagtgaatagatcgaaacggcctgggcacggtcccagccgagatcttccgagatcggcttgaggaagaccgtgaagctctcgctcagcccgcgaccaagaacagccagcgcaaagcacaggcagagcacgacgagcgcgatgcggactgcgtcctgcctggtgcttccgacctgttccttgctcgcttccgctgtcgtttccttgggcgcgttctggtccattgccatcagggagcgcgcttatgcgcgccctgacaagcagtgaaaagctcatacgcctatgcaggcttgatgaggacgtgattcttcttgccgaaggacagcttgatcacgccttccggcgtcagattgtccgccgacagcgccatcttctcgtcggcgacaggcgcatcgttgacgcgcaggccgccgcccttgatctgccgccgggcttcgccgttggaggcgacgagacccgccttgacgaaggcgttgagcacgccgagaccggcgtcgagctcgccgcgcggaatttccaccgtcggcaggctctcggcgagcgcgccctcctcgaaggtgcggcgcgcggtctccgcggcttcattcgcagcttcgcgaccgtgcagcagagcggtcgcctcggtcgcgagcaccttcttggcctcgttgatctcggagccgccgagcgcttcgagctttctgatctcggccattggaagcgtcgtgaacagcttcaggaacttgccgacatcggcatcctcggtgttgcgccagtactgccagaagtcgtagggcgagaactggtcggcattgagccagaccgcgccttgcgcggtcttgcccatcttggcgccggacgcagtggtcagcagcggcgtcgtcagcgcgaacagctgatgcgtgcccatgcgacggccgagatcgacgcccatgatgatgttgccccactggtccgatccgcccatctggaggcggcagccggtgcgcctggcgagttcgacgaagtcataggcctggcagaccatgtagttgaactcgatgaagctcatctcctgctcgcgctcgagacgcagccgcacggagtccatggtcagcatgcggttgacggagaagtgccggccgacatcgcgcagcatctcgatccagttcagcttggtcagccactccgcattgtcgagcatgatggcgtcgctcttgccctcgccatagcgcagcaccttggcgaacacgccgcggatcgaggccttgttggcctcgatctcggcaatggtgcgcatggcgcgcgtctcgtccttgccggagggatcgcccaccatggtggtgccgccgcccatcagcgtgatcggcttgttgccggattgctgcagccagtgcagcatcatcatggtcagatagttgccgatatgcagggagcgggcggtgcaatcgtatccgacataggcgatggcctcacccttggcggcaagcgcatccagcccctcgaaatcggagcactggtggatgaatccacgttcctgcagggtattgaggaaatccgatttaaatgcagtcatctgtcggcgtgcctgacaattcttggtttactcttttgggggcaatttaagggtcttccgcgggaacccgatgtccgcccgccacttggcgctgtggcattataagatgtgtccctctggcacaagatcggcatgccggaggggtctttcaggacgctgatcccatgatgttgacggcactcggcttgatgagcggcacctcgctggacggggtggatgtcgcgctgatcgagaccgacggaaagcaggtgaaggcgttcgggccgtccggctaccggccatacagcccggccgagcgcaacgtgttgcgccaggcgctgagcgaggccgtgcatctgcagcagcgcgacgcccggccgggcattctggcgcaggccgagcaggccgtgacgggtgcccatgccgaggcggtggccgccttcctggcgcagaaccgcatgaggccggaggacatcgatatcgtgggcttccacggccagaccgtgctgcaccggcccgagaagcggctgaccgtccagatcggcgatgcgccgttactggccagggcaatccatatcccggtgatgcatgatttccgtgccgccgacgtcgaggcgggcgggcagggcgcgccgctcgtgcccgtctaccaccgcgcgctggctcattcgctgggaagcgaaggaccgatcgtcgtggtcaacgtcggcggcgtctccaacatcacttatatcgacggcaacgatgcattgattgcctgcgataccggccccggcaacgcgctgctcgacgacttcatgtaccgcaccatgaatcaggcgttcgatgcggaaggcaagttcgcggcgctcggcaaggtggatgaggcctggatcgcacgggcgctggaactgcccttcttcgcggcggccccacccaaatcgctcgatcgcaacgatttcgctgcactcaagctcggcgccatcgagccggccgacggcgccgcgacgctcaccgccttcactgcggctgcgatcgcccgcgtcattccgcttttgccccggcggccgcggagctggatcgtctgcggcggcggcgcccgcaacctcaccatgctgcgtatgctgcgggagcaggtgggctcggcaagggtggaggcggccgagacgctcggctgggcctccgacgccatcgaagcgcaggctttcggcttcctcgcggtccgcggcatgaaaggcctgccgctatcttatcccactaccacgggtgtgccgatgccggtgaccggcggggtgatcgcgcgtccctgacgcaaggctagatcaatgcaactgcatgcaacttgacgggtagatgcaaatgcatctacattgaatgcagttgcatctaaccgccgggatcgcccatgaccgtttcgttgaaactgatcagccacaagctttgcccctacgtgcagcgcgcggtgatcgcgctgaaggagaagggcgtgccgttcgagcggatcgacatcgatctggctgacaagcccgactggtttctgaaactgtcgccgctcggcaaggtgccggtgctggtggtgaccaccggggagggcgaggtcgcgctgttcgagagcaacgtgatctgcgagtacctcgaggagacgcaagccggtgcgaagctgcatccggcggatgcgctgaagcgtgccgagcaccgcgcctggatggagttcggctcggcgatcctcggcgacctctgggggctggaaaccacgagcgatccggcgacattcgaaggcaagcgccaggcgctggttgcgaaattcaggcgtgtcgaagccgcgctcggcgccggtccgtatttcgcgggccgcgcattcagtctggtcgacgcggtattcgcgcccgtcttccgctatttcgatctgttcgacgaactaaccgagcacggcatcttccaggacgcgccgaaggtcagggcgtggcggaccacgcttgcgcagcgtccgagcgtacgcagcgctgtcgacgccgactatccgcaattgctgcgcgccttcctcgtacggcacgacgcgcatcttttgaagcttgcggcctgagcgcagcgcgctcaagccgaatccctcagcgcacgttcgccaggcgcatgtcgagatacgccgtgatggtttccatcagcggctcgagcttggcgtcgaagaagtggttggcgccggggatgatctgctggtcgatgacgatgcccttctgcgtcttcagtttctcgaccagcgtgttgacgtccttgggcggcaccaccgcatccttctcgccatgcacgatcaggcccgacgacgggcagggcgcgaggaacgagaagtcgtaaaggttggccggcggcgcgatcgagatgaagccctcgacctcggggcggcgcatcaggagctgcatgccgatccaggcgccgaaggagaagccggcaacccagcaggcgcgcgcttcgggattgatcgtctgggcccagtcgagcgcggcggcggcatccgacaactcgccggtgccgtggtcgaacgaaccctggctgcggccgacaccgcggaaattgaagcgcagcacggagaagccgcgatgcgcgaacgcgtagtagcactggtacacgatctggtggttcatcgtgccgtggaactgcggatgcggatgcaggatcatcgcgatcggcgcattcttctgcttggccggatggtagcggccttcgaggcggccagcagggccggtgaaaatgacttcgggcattggtgtctcttgattgatttcctggagagatgatccctagcaatcaaccgattgtagcctcgtcggcagatgccgacggaagcgcgaatgaagggtgagaaggcgcgccttgcggtgatgcgctaagagcgcgcggtgacttgacggagcgcgttctaacataggcagagggtcaaaaagcaagcatcttgaacatcccccaatgggttcaacacgttagcttgtcatgaccgcgtcacggcgcccgctcgctcggaatcgggttgccaattgcgcgcccgcggcccatgtcgggtcggcgcgaaacgccgcccgcgatgcgaggtaacaaaatactcaatgcttgcccgggtctatctcgattggaacgcgaccacgccgctccgttcggaagcgcgggctgctattctggctgcatacgacctgatcggtaatccatcctcggtccatgccgagggccgggaggcacgacgactggtcgaggaggcgcgctccgcgctggcgggcgcggtcggcgctcagccgcgcaacgtcgttttcacctccgccggcaccgagtccaatgcgcttgcgctctcgccgggcctgcgggggcggtctggcggacctgtcgagcggctgctggtctctgcggtcgagcatgcttcggtgctggccggcggccggttccctggcgacaagatcggcctcatcccggtcacgcgctccggcgtggtggacctcgatcgcctgaagatccagctgcaggatggcccgccagccctggtctccatcatggccgccaacaacgagaccggcgccctccagcccgtcgctgaggcggtaagcatcgtccacgcggccggcggcctcctgcacgtcgatgcgatccaggcgctggggaaaatcccattcgatatcaatacggtaggcgccgaccttgccaccttttctgcgcacaagatcggcggccccaagggtgtcggggccctggtgatggctgaaggcataggcggcctcgagccggtcctgcgaggcggcggacaagagctcaaccgccgcgccgggaccgagaatgtcgcgggcatcgccggcttcggggcggcggtaaaggctgcccttcaggctctggcgaaggatgtggagcgaatggcaagcctcagagatcttttggaaaatggccttcgcggcatcgccggggcgacggtctttgcggacgatgtggcgcggttgccaaacacggtgctcttcaccgcgccgggcctgaaggccgaaaccgccgtcatcggcttcgacctggagggcatagcggtctcctccggctccgcctgttcctcagggagggtccagccatcccacgtcttgtcggccatgggctatgatcccgctgtggcccagggagcggtgcgtctcagtcttggctggtccacccaaccggaggacatcaatagggcgttagaggcttggcgaaagctgggtaataccctacttaagggctaagcgacgaaacacggcttgaacggttctaagcccgtgctttccgcagtgaaatatcgtaatactcgtccgagtttgatccaccgcggtccttgaaaccgcgagcggaggatggaatgccagccgtacaagagacggtcgagcgcgtgaagcgcatcgacgtcgaccattatcgttatgggtttgagaccctgatcgagtccgacaaggcccccaagggactgtcggaggagaccgtcaagtttatctccgagaagaagaacgaacccgcctggatgctccagtggcggcttgaggcctatcggcgctggctgaccatgcaggagccgacctgggcgcgcgtcgactatccaaagatcgatttccaggatctctattattacgcggcgccgaagccgaagaagacggtctcctcgctggacgagatcgatccggagatcctgaagacctacgagaagctcggcatcccgttgcgggaagtggccatgctcgaaggcgtcgagcccaagccgggcgaggaggacccggcccgccgcaagatcgcggtcgatgctgtcttcgactcggtctcggttgcgaccaccttcaaggccgagctgaagaaggctggcgtgatcttcatgccgatctcggaagcgatccgcgagcatcccgaactggtgcagaaatatctgggctcggtggtgccgacctccgacaacttctacgccacgctgaactcggcggtcttttccgacggctcgttcgtctacgtgccgccgggcgtgcgctgcccgatggaactgtcgacctatttccgcatcaacgagcgcaacaccggccagttcgagcgcacgctgatcattgccgacaagggctcctacgtctcctatctcgaaggttgcaccgcgccgcagcgtgacgagaaccagttgcatgccgccgtggtcgagctcgtggcgctcgacgatgccgagatcaagtactcgaccgtgcagaactggtatcccggcaattcggaaggcaagggcggcatctataatttcgtcaccaagcgtggcgactgccgcggcgccaactccaagatctcctggacccaggtcgagaccggctccgccatcacctggaagtatccgagctgcatcctgcgcggcgacaattcgcgcggcgagttctactcgatcgcgatctcgaacggcttccagcaggtcgatagcggcaccaagatgatccatctcggcaagaacacgtcgagccggatcatctccaagggcatcgccgccggcaggtcgcagaacacctatcgcggcctggtcaccgcgcaccgcaaggcgaccggggcgcgcaacttcaccgcctgcgattcgctgctgatcggcgacaaatgcggcgcgcacaccgtgccctacatcgaggccaagaactcgtcggcgacgttcgagcacgaggcgacgacctcgaagatctccgaggacgtgctgttctactgcatccagcgcgggctcagccaggaagaggcggtcggcctcgtcgtcaacggcttcgtcaaggacgtgctgcagcagctgccgatggagttcgcggtggaagcgcagaagctgatctcgatctcgctcgaagggtcggtcggctagcaccggcctcgtcctgaagaggccgcggaacgcggtcgtctcgaaggatggattaccggaaagattgttggcctcaatccttcgagacgcgccttcggcgctccctgggatgaggggatagatggaaaaacatgatggctttgcttgaagtgaaagacctcaaggttcgtgtcgaggagcgtgagatcctccacgggttgacgctgaccgtgaacgagggcgaggtgcacgcgatcatggggccgaacggctccggcaagtcgacgctctcgcacgtcatcgccggcaagcccggctatgaagtcaccgacggccaaatccttttcaaaggcgaggacctcctggagatggagccggacgagcgcgccgcgaagggcgtgttcctggcgttccagtatccggtcgagattcccggcgtcgccaccatgaacttcctgcgcaccgcgctcaacgcgcagcgcaaggcgcgtggcgagagcgaatattcgacgcccgacttcctgaagaaggtccgggaagtctcgaaatcgttgaacatcccgcaggacatgctcaagcgcggcgtcaatgtcggcttctccggcggcgagaagaagcgcaacgaggtgctgcagatggcgctgttcgagccgagcctgtgcatcctcgacgagatggattcgggcctcgacatcgatgcgctgcgcattgcggccgacggcgtcaacgcgctgcgttcgcccaagcgttcgatggtcgtcatcacccactatcagcggcttctgaactacatcgtgcccgacgtcgtgcatgtgatgtcgagggggcgcgtggtgaagagcggcggcaaggaattggcgctggagctggaagcgtccggctacgcgcaattcgaggccgcgtaaggattggttgcaatgaacgttgctgtggcaaagaccggaggtggccgcgcggtgagcgatctgttcgccagcgccgaaggccggctgccgggttcgcccgaagtgatcgcggcgcggcgcgaggcattcgagagctatgagcgtctcggcctgccgcatcgccggatcgaggaatggaagtataccgatctgcgcgcgctggtcggcgaggttctgcccctggcagcgatccccgatgcgggcgcgctgaagcgcgccgcggaggcggtgaaggcgcatgcgatcgagggcgcccgcaaggtggtgctggtcgacggcgtgttcgcggccgatctgtccgacgtgagggcactcgcccccgaggcaggcttcaagaccctgcgtgagacgctggagaaggatgccggcctgctgaagaccgcgagcaccgatgcggtgatcgcgctgaacgccgcgatggcgaccgacggggtcgtgctctcgatcgctgacggcgcgcaattgtccgcgccgatccagatcatccacatcgcgactgccgcgtcggcatcggccttcacccgctcgcgggtcgcgatcgggaagggcgctcgcgccaccatcgtcgagacttttgtggcggcggaagcgaaggcctaccaggtcaatgacgccgtcatcgtctcggtcggcgacaacgccgacgtcgcgcatatccggctgatggacgatgcgcccgatgcggtgaacatcacgtcgcagttcatcacggtcggggccaacaccaagctgaacctcttcagcatgaccagcggcgccgcggtcagccgtttgcagggattcatcacgctggcgggcgagggcagcgagctctcggtgaatggcgtgaacctcctgaaaaagaccgagcacggcgacaccacgctggtggtcgaccatgccgtgccgaactgcgtcagccgcgagaccttccgcgccgtgatcgacgatcgcgcccattcggtattccagggccgcatcatcgtccgtcccgacgcgcagaagaccgacggcaagatgatgacccgcgcgctgctgctctccgacgaagccgaggcggacaacaagccggagctcgagatcttcgccgacgacgtctcctgcggccacggcgccaccgccggcgcgctggacgacagtctcctgttctatctgaaggcccgcggcctgccggagaagcaggcccaggcgctgttgatccaggccttcgtcggcgaggcgatcgagcagatcgccgacgatggcttgcgcgagcatgtgatcggcatggccgagcgctggctggagcggcgctcatgagcacgcatccggcagtcaagaacggcgcttatgacgtcgcgcgcgtgcgccaggatttcccggcgctcgccatgcaggtttacggcaagaatctggtctatctcgataacgccgcatccgcacagaagccgcagtcggtgctcgatcgcatgacgcaggcttacacgagcgagtacgccaacgtgcatcgcggcctgcatttcctcgccaatgcggcgacggaagcctatgagggcggccgcaccaaggtggcggagttcatcaacgcgccccgcaccgaggaagtgatcttcacccgcaacgcgaccgaggccatcaatctggttgcctcgtcctggggtggcccgaacatcaaagaaggcggcgagatcgtcatctcgatcatggagcaccattccaacatcgtgccctggcacttcctcagggagcgtcagggtgccgtgatcaaatgggcaccggtcgatgacgagggaaatttcctcatcgacgagttcgaaaagctgctgacggccaagaccaagctggtcgcgatcacgcagatgtcgaacgcgctcggcaccatcgtgccggtcaaggacgtcgtcagaatcgcgcatgcgcgcggcattcccgtgctggtcgacggcagccagggcgcggtgcatctaccggtcgacgtccaggatctcggctgcgatttctacgtcttcaccggccacaaggtctatggccccaccggcatcggcgtgctctgggccaagtacgaccacctcgtcgcaatgcgcccgttcaatggcggcggcgagatgatccgcgaggtctcgcgcgacgtcatcacttatggcgatcccccgcacaagttcgaggccggaaccccgcccatcgtcgaagccgtcggcctcggcgccgccatcgattacgtcaactccatcggcaaggagcgcatcgccgcgcacgagcacgatctcaccacctatgcccaggagcggctgcgcgagatcaactcgctgcggctgatcggcacggcgcgcggcaaggggccggtgatctccttcgagctcaagggcgcgcacgctcatgacgtcgccaccgtgatcgaccgtcagggcatcgcggtccgcgccggcacccattgcgtgatgccgcttttagagcggttcaacgtgaccgcgacatgccgggcctcgttcggcatgtataatacgcgggaagaagtcgatcatctggcacaggcgcttttgaaggcgcgggatttgttcgcatgagtgacacggccgaagtcaaagctagtccgatggagacccagtcggcgctgccgcctgaggagaccgagcgtctcaccaacgagatcatcgcggggctcaagaccgtgttcgacccggaaattcccgccgacatctacgaactcggcctgatctacaaggtcgagatcaaggacgaccgttcggtcaacgtgttgatgactctgacgacgcccaactgcccggccgcaggcgaactgccgaccatggtcgagaacgcggtcgccagcgttccgggcgtcggcgtggtcgacgtcaaggtcgtctgggagccgccgtggtcccccgaacgcatgagcgacgaggcgcgccttgtgctcaacatgtggtgacggcctcagcccgcattgaattcgctccgcaacggaccacataaacaacatgacccaggtgacaccagcatcctccactccgaagccgcggcggccgcgcccgcaggtgatgcggctgacggatgccgctgcccagcgcatcaccgaactgacccaacgtgcagactcggagatcgtcggcctgcgtgtcggcgtgaagaatggcggctgcgccggccagtcgtacacggtcgaatacgcccacgagatccgcccgaccgacgaggtcgtcgaggacaagggcgtgaagatcctggtcgatcccaaggccgtgctgttcctgctcggcaccgagatggactacaaggccgacaagatgcaggcccagttcgtcttcaacaatcccaaccagatctccgcctgcggttgcggcgaatcggtcgagctgcggccggccaagatcgacgggtagaccgcctccgcggaggtcgtatggactgcttcgctcgcattgacgagaatgctatgagggtttgcttgcttgcgcaggaaaacccccgatggaccgagaattcctgaccgacctgttcgccgatttcggccccgtcaccatccgcaagatgttctccggctacggcatctccgccgacggcgtcaatttcgcgctggccctgcgtgccggcctgttcttccgcgccgacgagatgaccatcccggacttcgaggccgagggctccaagccgttccagtatcagacgcgcgccagaaccgtgatggtgaactcctactgggagcttcccgcacgcctgttcgacgattccacggagcttgcgcaatgggcaagggcggcactcgccgcagcccggcgcgccaaggtgaagaagcagccaaaagcgaagaaggcggcggcgaagaaatctgctgcaaagaagcgtccgaccaagaacgctgccaagacgacggcgggtccggtggacaaagcaactcgcgcgccgaggcttgcagagcgtaagcggaagcgtcgttcaagagtgtgatgctggagagctggtgggcgccgtagcctttgctcaggctacatggtctcatccgacgagatgtcacgccacccgggtgtgcgtctcggccgcgtattccggatcggattcgcagatgacgcggttgcggccgttgcgcttggcggcatagaggcaggcatccgcgcgctcgatcagcgcgtcggtgtcgtcgccctctttcagcagcgagacgccgacggagatcgtgacccggccgaggatctcgccggtcgatttcttcttcagctctttcgccatcacagcgcggcggatgtggtcggccaccgtgagcgcctggcgtagcgtcgtattgggcaggacgaccgcgaattcctcgccgccatagcgggcggtgatgtcctggcccttgatggtctgcttcagcgagaggccgaccagccgcagcacctgatcgccggtgagatggccgtaggaatcgttgaacgacttgaagtgatcgatgtcgaacagcagcagcgacagcggctcgcccgaggcgagtgcgccctgcacggccatgccgatcatgcggtcgaaatatttccggttgccgaggcccgtgagcggatcggtcaggctctcggcgcggatcgcttcgaggctctgctggagattgctgatctcgttcttcgacagcgtcagccggtcttccagcgccttgttggcttcgcgcatctcgctggtcgagcgcagcagcgcctcgacgatcgccttgacctgctcgcggctcttggcagacgacagttcttcggtggcgcccgacaggttggcatcataggcgccggtcatgccgagggcatcgcccaagaccttcatgacgtcgtcgatctcgccgatgacgcgcgcgccaaccttgtcgatgcggtcggtggtcttgatgtgggagagataggtctcgtagatctgctcgagatcggcctcggtcagcttgccgctgcgcgccagcgtctcgttgatgatcttgttgagcggagcattgtagccggtggcgtagacgtaccagatctcgtaattgcggggaattgccgtctgccgaagcgatcggatctgaccgagcgccacctcggcgaacgccatcgtgcgttcgtgttcgtcgagcaccttgatcacggaacataccccacagcggtcggcgcgccatcgaccgtagcaatacttaaactatggtcgtaggctaatggacgatcgtgaacgccccgtaaatttacgtgcacgactgcgtccaaaaaattgtgtgccgggttcgctcaaccgaaacccggaacgcgtcgcgcctcaggctcccgcaggggagcgaaccggccgcagcagaaacgccggcagatgcgagtgatcgcccggctcggtatcgacttcgcgctggcggcgcggctcgggacggccgatcgagggcacgtgcgccgtactggcctgctggcgtgtgtccgcccgacgcttgtcgtcggatcgatgccttggctcggcgagctggcgcgactccgacgagctccttgattcggaagaatgtcttggttccgaagaaattcttgcctcgccccgggcctcgcgcggctcgtggctgcgttcacgatcccggccgcgctgcggcttgccacgcccgccacgtgaacgttcgcggccgcgctgctcgcggggacgctcgcttgcctcggagggctcggccggggcttcgtaatcgccttcgacccgcggaatgctctggccgatcagcttttcgatcgctgccatcgatttctggtcgagcggggtcacgatcgagattgcggtgccggtacggccggcgcggccggtgcggccgatgcggtggacgtaatcgtcggcgtgatggggaacgtcaaagttgaagacgtggctgacctcgggaatgtcgaggccgcgcgctgcgacgtcggaggcgaccaggagcggcagttcacccctgcggaactgttcgagcgccgcggtacgggccgactgatccatgtcgccgtgcagggcgccgacgctgaagccgtgcttctgaagcgatttgtgaacgatggcgacttcgcgcttgcgattgcagaagatgatcgcgttcttgagatccttggcgtcgcgcagcaggcggcgcagcaactcgcgcttctcgtgcgcctcgcgtccggcgggcacctgcgcctgcgtcacggttacggccgtcgtggcgggcttggagacctcgaccttctgcggattatgcaggaaggtttcggtgatgcgccggatttccggcggcatggtcgcggtgaagaacagggtctgccgggtgaacgggacgagcttgcagatgcgttcgatgtcgggaatgaagcccatgtccagcatgcggtcggcctcgtcgatgacgagcagctcgacgccggtgagcaagaggccgccgcgctcggtgtgatcgagcaggcggcccggggttgcgatcagcacgtcgacgccgcgcatcagcttggcgtcctgatcaccgaaagagacaccgccgatcaagagggcgacgttgagcttttggccggcgccgtagcggtcgaagttttccttcacctgggccgcgagctcgcgggtcggctcgaggatcagcgtgcgcggcatgcgcgcccgggctctgcctttctcgagaatggtgagcatcggcagcacgaaggccgcggtcttgccggtgccggtctgggcgatgccgagcacgtccttgcgtgcgaggacgtggggaatcgcctgttcctggatgggggtaggggtggtgtaaccggtggccgctactgcggcgaggactttttcggacagtccgagatctgagaaggacattgagcctctggtcgaaaccgccgttcggaatcgagggtaataaggctggtcgcgttccaccccgaaacggcgcgctctcaaagaagctgggggtgctgacacacgcgaacaaagcgcaaggctcaggaatcgctcttcgatctgagccgcgtcgacccggaacataggcaggaattggccaaagtcaatggagcgggcgcgggaaggccctaaaaaacctgaggtttttgctcaaactacgggcgcggctcgggttttccgaggagccgggagtgcgtccgcagcggccaggacggggggttaacgccggtcggtggtccccgcccggaagtcgccgggcgccatgccataggcagcgttgaagacccggtaataggtcgccaggctctcgaagccgcacgatgccgcgatgtcggcgatcagccgctccggcttctcctgcatcaggcggcggctctgctcaaggcgttcctccgtcaccgtctgcgagaagctcttctcggctgtcttgaacagcatgtgcaggtgtcgcacggacaccccgagcagatcggccaccatggctggggcgagattgggatcctgcaaatggtgcgcgatcaggcggcgggcttgcgagaggcgggccgtccgcagcgcggcctgtccgcgcctgctgccgggccgcacgacaccgcgctccatcaaagccagatgccctaaagcttgaaccaagggcgtctgaacggcagagccagcatcggtggcggcaccagcgatctcgccgagatcggcaaagcaggcagcgagcaggggcgccagagcggggtcgaaaaacgttcgtggcgcaagttcgcgcatgcggctgtcctgtgccgggatgttgctcaacgggattttcaggatgcgcagatggaagcccccggcgccgagcggcgcggtgcggtagggcaggttggtatgactggtagcgaagctgccgttggcaatcgaaaaggcgcttgcgcgaatgccgccgaaccagccgccactgccgagctgctgatagacgcagatcgcgtcacctggggcggcggcgatgtcggacgtgctgcgctcgaccgaatagggcgatgccttcagctcgacgaggctggcaccgccgagctggcgcagcgagaattcgccaacgaagtccgcgcgccgttcgcgcgcgagctcggccgtgacgccgaacaatcccttggcgcgcacctcgcgccaatagtcgaagcgatccctcggctcgacctcgtcggtacaccagcgaaacacggcagctcctcgcttccggcgaaatggtccaagaagaagcagatttcgccgaagtccgccatggccggacggagcccaggcccttgaaccgtcctcacgcctgggtcgactatcacacagcggcagggggtcaaatgaactgccgttccaacggatcggcggcagggccgtcctgcaacaggaattttgcgatgacgcgtcggcttttcggaattctggcggccattggcctcgcggcgggcctgagcggcttggcaggtcccgcttatgccgagaagcgcgttgcgctcgtcgtcggcaacaacgactacaggaacgtcccgaagctgctcaaggcggtcaatgacgctcgcaccatgggcgacacgctgaagcagctcggcttctcggtgatggtcgccgagaaccagagccggcaacaattctccgagacgctgctcgccttcgacaaggcgatcgagcacggcgacactgcgttcttcttctacgccggtcacggcttcgagatcgcgggacagaactatctgctgccgaccgacgtgccggcggcgacggaagggcaggaagagctggtgcgtgacgcttcgatcctggccgaccgcatcgtcgagcgcctccagaacaagaaggcgcgcacctcgatcctggtgttcgatgcctgccgcaacaatccgttcgagcgcaagggcacccgcgcagtcgccggcggcggcgggctcgcgccgatgacgcagctgccggaaggcgtgttctccgtgttctcggcaggcccccgccagaccgcgctcgatcgcctgtccaacgacgatgccaatcccaattcggtgttcacgcggaccttcgcgaaggaactgctcaagcccggcgagaacctggtgcaggtggcgcagcgcacccgccgtgccgtcagcgagatggccgagaccgtcaagcacaggcaggtgccggtttatttcgaccagatggtcgacgacgtgttcctcagcggcatggcgaaggataccgccgcgcgctccgacgatccgccgccgcagaaacttgcggcgctgccgccggtatccgttccgcagctgcccaaggaggagacgctcaacgcgccgatcgcgagcttctcccggcacaatggcggctggagcgtggtgttctccttcgccgatccgaccctcggcatttcctggcgtatggccggcaagggcgatttccgcgagaccggcttcatcgacacgctcgatccgcgcacgcgcaagcggatgccgaacccctcgatcgagctgccgccggatgcgcagcccggcaccatcgaggtccgctatgtcgatcagtccggcgacttgcaggggccgttcccgatcaggttcgatcccgaggctgcgctgatccgcgatcagcgcaagattctcgacatgacgtcgacgagctggctgtcgttccgcgagttcaacggactcctggtctactacacccacctcgtgtcctaccgttgcgcaatccgtgaggtgcgcatcggcatcgacaccgccgttcccaaccaggtgctgaagatgccgccttgtgacatgcgcgaccctagcgcgatcagcgccgggatgccgctctacatgaagctcgcgccgagcacgcagactgtctcggtcgagttgacctatcgcgatggcagcgtgtccgagatcaagagcttccggagcgtcaaccgcagcaacaattgatgggctgtgcagccggcggattggggttaggaacgctcggctgacggagtggacgaactttaatcgacgggccaaggtgaaagtgctagagccggggatgacaaaattcatcatcgtcgtgcttcttacgacgtttccggttctggcccaaacgactccagttctcaccgtgccgccgcccacggaccgcgagcgcgtccaagcggatcgtgcgaaggcagccgaggacgagaaggtggctccgatcacgcgcccttgggatcgcgacgctgacggcaagcgcccatgggagcggaagtcggcaaagccctagtcacgcgaacgtcgatctccgctgtgcatcggcgacgccgcgcatgcgatgtcgccggtcggcggcgtcggcgtcaatctcgccgtgcgggacccggtcgcgaccgcaaaacctcctggcagacaatctgcagcagggctgcctgtccgaggacgagctcgatgccgtgcgccgccgccgcgagcgtccggtgaagatgacgcaacgcatgcaggtggtcgtgcagaacaacatcatcagcggtgccttgcagagcggcgaccggccgctgaaggtgtcgccgatcctgcgcctcgtcaccgcgctgccatggctacgcggcatgccggcgagcttgcttgtgctcgtggcgcggcccgagcatgtgcattcgaaggccgcaagatttggcgcagcaatttagtagggataacgtcgcattaaatggcgtcccgcgcgttgcgtgcgtgcaacagcgcagatggattgtaggaccgcggcaggccaatccggcgcattaacttcgttgattcaaatttgagtaagacctgcgtgtgaccgtgcgcccatcaaaggacacggggtgtaccatgcgtaataaattgattgccgccttcgcctgcacgacggctctggtttcgaccggcgcggcttctgccgccgatctcgctgcgcgctacacgaaggcgccggcctatgtcgagccattgttcacctggaccggcttctatgtcggcggccacatcggtggcgcctggaccaaccagcagttcatcaacaacgggaccggtgcggcgttcggcgacctcattccgggcgagggctatcgccagcgcggatcgggcatcatgggcggcgcgcagatcggctacaactggcaggccaacaattacgtgttcggcatcgagggcacgatttccggcctcgacaacaagggcacggtcgtaaacaacgtgtttggcgccgcggacgacgtgttctcctggcgcgccaacgtgctcgcgaccatcgtcggccgcgccggcttcgccgtgcagaacaacctcttctacatcaagggcggctatgccggcgtgaacaaccgcctctcggtcaccgacacagtcggtgtggcgacgggttcgggcggacaaacccactgggccaacggctggactgtcggcgccggctgggaatacggcgtcacccgcaactggatcgtcggcctcgaatacaactacgctgccttcggcagccagacctatcagctcggcggcacctccggaaactacacgttcgatgccaagccgcgcgacattcagtgggccgtggtgcgcgcgagctacaagttcgacgcacccaccatctcccgctactgagcacgtcgacgcaacgcgaccaacgatcaagaaaagcactgcaaatttcaaaagccccggccaggccggggcttcttttttgcctctgccggattgcaggcaggcgcggcgtcaggccatcacggagaagccgccgtcgaccggaatcgcggtgcccgtgacgaaattcgaagcaggcgaggcaaggaacacggcgatgccggcgaagtcgtcaatgtccccccagcgccctgcgggcgtgcgcgccagcacgcgctcgtggagccccgagacctgctgccgcgcgccccgggtgagatccgtatcgatccagcccggcaggatggcattgacctggatattgtcgggcgcccaagcattcgcgcaggcgcgcgtgtattgcacgatgccgcccttgctcgccgcataggcggtcgcgaagctcgcgccgaagatcgacatcatcgagccgatgttgatcaccttgccgttgccggacgccttcagcgccggataggccagcttcgagcagacgaaggcgctggtgagattcgtgtcgatcaccttattccactcgtccagctcgagctcgtgcggcggctttcggatgctcatgccggcattgttgacgaggatgtcgatgcggccgagctccttgacgacccgatcgatcatggccgcgatcgccgccatgtccgtcacgtccgtggagacggcgatcgccttcacgccgcgctgccggagatcggccaccgccgcggcggacttggtttcgttgcgcccgacgacggcgatgtcggcgccggcgtcggcaaggccgcgcgccatgccgaggccgatgccgccattgcctcccgtaacgatcgcgaccttgccgctgagatcgaaccggctggatgtcatgctggtattccctggtttcttctatggattgctctgccagatcagcaccagcccgaagccggccatggctgcgccatagcccgcccattgcaactggttgaccatgaagctcgatcgcggccacggaacggtgcccgtgccctgtccgatccagagcagaccgacggctgtcgcaagcaggcctgccacaagcagaaatctgcgcaagcattcctcccatcgtccgcttccgtcgcgcgtggcggcgaagtgccgccaaccgcgaggcttagggtgcacagtaaccgcagcttcggtgtggatacaatggcgccaccggtcccggctggcggcgggaagggagcgtgtccgtcaaaggcaactcgctgcttggcaatcagtgccgatggtcggctggcgaaacccggctcgcgggacgcggtattgcagtcaagcgttggtcgccccgcccaaacgaaaaagccccggcgatgccagggctttgacgttcgatcgtgaggtcaaatcagatcagtacttcgcgacgaccggaccggtccagttgaagcggtagaccagcgaggtcgagatcgtctggttccagtggttcgtacggatgctgttgccggtcggaatgttgccggcatcgaacagctcgtcacgagtggtggcgttgtagaaggccgaacgatactcggtcttcatgaaccagccgggcgaggtgatgccgaagatgttcaggctgttctcgacgccgccgccgatgaaccaaccgtgacggtcatacccgtcgaggtggataccggccggagtgccggcgaggttggtgaaattggtgcgacaaaagtgggcgccggagtaaccgccgttgacgtaagaaagaacattcggggcaaccagccagccgaggcgaacaccagccgcccaggaggtctccagcttctggtgaccggtgaggccaaagatcggatcctgcacggtgccgcggatgctgccgaactgaccgtcagcaaacacaccggcaacccaggtgccgctgaactgccagtcgtagccggcgccgaccgtgccgaaccagcccgagccgccctggcgctggtcgatcgtcagcgggactgcgccgacggtggtctgcacgtgctgatcttggttcgaaaggccgccgccgccgccgccgaagatgtagaannnnnnnnnnttggcaaccggggccgccatcggagccttcgcgtagggacgggcacccaggtcagccgcggaggccgaaccggtcatcgccgcgaccgcggacagagcgagcaaaatcttcttcatgtcaaaatccccaacttggtctgtcgtggcgcgagcgcacttaagtccgtgtcatctgatgcccgaactatagacggttctcgccgaaatgctgttgccgggtgggcacagttaccggaaaacggcggtgctggggtaacccgggccctctcgatcgaacagaaaatagatatgaagaatcatgtagttatgagattttcgcagttcttgtttcggataacgtctcgttagcaaagtcggcctcgtccgaaatggaggcaatcctgccttagcctcggcgcctatgagccgttggacgaatcgccgtgcggcgctttcggggaatcaacgaaagcgcctgcgaactgccaggcaagacagcccggcccccgaaacaaaacagccccggctggccggggctgttttggcgtgctgcgggctgggttgaggtctcagacgtccagtagctcctcgctggcaaattcggccttgtccgagatgaaggcgaagcgtgcctcggctttggtgcccatcagccgctccaccgaatccgcagtcgtgtcgcggtcgtcggccagcagcaccaccttgagcagcgtccgcttggccggatccatggtggtctccttgagctgcgccggcatcatctcgccgaggcctttgaagcgattcacctcgaccttggcgttggcgttgaacgcggtcttgatgagctcgtccttgtgcttgtcgtcgcgggcgtagaccgatttggtaccgtgcgtcagcttgtagagcggcgggaccgcgaggaagaggtggccctcgtcgatcagccgcggcatctgccggtagaagaaggtgatgaggagcgatgcgatgtgggcgccgtcgacgtcggcgtcggtcatgatgatgatgcgctgatagcgcagatcctcttcgcgatattgcgcgagcgtgccgcagccaatcgcctgcacgaggtcggagagctgggcgttcgcggtcagcttgtccttgccggcggaggcgacgttgaggatcttgccgcgcagcggcagcacggcctgggtcttgcggtcgcgcgcctgcttggcgctgccgccggccgagtcaccttcgacgatgaacagctcggagccttcggtgccggcgtcggtgcagtcggcgagcttgccgggcaggcgcagcttcttgccggcggtttttcgcgcggtctccttctcctgccgccgccgcagccgttcttcggcgcggtcgatcacgaaatcgagcagccggttggccatgttcggattgcccgacagccaatggtcgaacggatccttcatcgcctgctcgacgatgcgctgcgcctccgcggtggcgaggcggtccttggtctggccctggaactcgggctcgcgcacgaacaccgacaacatcacggcggcgcccaccatcacgtcttccgaggtgacggacgccgcgcgcttgccctgaccgacgcgctcggcgtgatccttcaggccgcgcagcagcgcgctgcgcaggccggactcgtgggtgccgccatcgggcgtcggcacggtgttggtataggaggataggaagccgtccgcatccgcggtccaggccaccgcccattcgcaggcgccgtgcgcgccgttgcggcccgacttgccggagaagatgtccgggtgcaccagcgtgtcggcgtggatcgccgcggcaaggtaatccttgaggccgccggggaagtggaacgtcgcttcggccggcacgtcctcgacgcctttgagcagctcgggcgcgcagttccagcgtatctcgacaccgccgaacagatacgctttggagcgcgtcatcttgaacagacgctgcggcttgaacgcagccttgggcccgaaaatgtccgtgtcaggcttgaagcgcacgcgggtgccgcggcgattgttgaccttgccgagatcctcgagcttgcccttggggtggccgcgctcgaaaatcatgcgatgcagtttctgcccgcgcgcaacctcgacttcgagccgcgaggagagggcgttcacgacggagatgccgacgccgtggagaccgccagaggtctcgtagactttgctgtcgaacttgccgcccgaatgcagcgtgcacatgatgacttcgagtgccgacttcttcgggaatttcgggtggggatcgatcgggatgccgcggccgttgtcggtgacggtcaggaacccgtccgcactcagctcgactccgatgaaggtcgcatgccccgccagcgcctcgtccatcgagttgtcgatcacttcggcgtagaggtgatgcagcgccttctcgtcggtgccgccaatatacatgccgggtcggcgccgcaccggttccaggccttcgagcacctcgatgtcggccgcggtgtagtcggcttctccgccgcttccacgcggcgccgccttgggcgcgcggggtttcggctcatcgccgccaaaaaagtcatcttttgctttgggcttcaactgcttggccatatatcttgatacgttctgagggccgcattggcggcgaatcggtcgggccgactatgccacttctgacgtggaaaggttaccgggggccggaccgggcggtgtgggtgggagacaatcccggcggttttacgccgcaggccggccaattcccggcaatttgacgttccgacctcgccatgtgggcttttgtgacttgatgtcacacaagtccttggcttaccagtccttttcatcgagcagcaccttgagacggggcgggaaggctatttttgatggagcagtatgcgcacgccctcgctgaattcgtgcgcgttcaccaggcctgggcggcgccggtcgtgttcctgctcgcattcggagagtcgcttgcgttcgtctcgctgctcgttccggcctggggtgcgctggtggcgatcggcgcgctcatcggggtcagcggcatcagcttctttcctgtctggatcgccggcggcctcggcgctgcgctgggtgactgggtctcctattggttcggctaccgctacaaggagagggttgcccagatgtggccgctctcgctctatccggatctgctgcccagaggagaggcgttcgtgcgtaactggggcatacccagcatcttcatcgggcgcttcttcggtcccctgcgcgcctcggtgccgctcgcggccggcattttcgaaatgccttattggactttccaggccgcaaacttcgtctcggccctgatctggtcggccgtgctcctgctgtttggcgacgtgctcgccaagatcatggaatggatctggcgcgtgatctgacggtctgaaccttgacgggaactgcgcctggccctatagccgcgcaccatgatcaacgccgcgaccatcctgttcgcccgtcgccgccgccgcacttcagcggttagggcggtcgatcgcgtttgagatcatcgtctttgccgctggatccgatccgcggcattctctctcctgtcagcgcgatctgatccggcggcttcctcaggaggcccagcaggagactacgatgtacacgccacctttcttcaagcaggaccgcgccgtaagcctcaaatttgcggagcagcgcggcttcggcaccatgtgcgccttcgacggccacaagcccgtcgcttcgccgctgccgttctatctgacctatgcggctgacgggacgccgcaggccgcgttccatctcgcccgtcacaatccgctggtaaagctggctggcggtgatgcgtcatggctgctcgcggtcaacggtcccgatgcctatgtatcgccggactggtacgtctcgccggaccaggtgccgacctggctatatcagtcggtgcatctgagcgggccggtgcggctgctgtcggacgaggagctgtcggtgcaggtcgacacgctcagcgacaagttcgagagccggctgttgccgaagaagccctggacctcgggcaagatgacggcgggccggctcgaggcgatgaagaaggggatcgtgggcctggtcatgatggtcgaggaggtcgagggcagcttcaagctgaaccagcacaaatccgacgccgactatgcagccattgcggacgcacttggtggcggcgatgccgacgcccggcagatctcacaactgatgcggcaagccaagccgcaagctttcaaagccgacacgaacctgctcgaagggagcacgccatgagcctcgctgacaccacgaaagccccgaccaccagcgcggccaagaagcccgcgaccgtcttcgtcgacggcggctccggcaccaccggcctcggcatcagcgagcggctgaagctgcagagcgatgtcgaggtgaagaccattgccgacgacaagcgcaaggatcccgcggcaaagaaggcgctgatggaggaggtggacctcgtcatcctctgcctgcctgacgatgccgccagggagacggtcgcgctcatcgacagcatggggccgtccggtccgaaggtgctggacgcctcgaccgcgtaccgggtcgcgccggactgggcctacggctttcccgagctgacgccggaccaggccggaatgatcaaggccgcgagaaaagtctccaatcccggctgctatccgaccggcgcgatcgcgctgctgcggccgatcgtcgatgccggtctgttgccgcaggactatccgatcaccgtcaatgcggtgagcggctattccggcggcggaaagtcgatgatcgcgagcttcgaggacggcagcgcgccggccttcgagctctatggcctcggcttcgagcacaagcatctgccggagatgcagctctatgcgaacttgacgcggcggccaatcttcattccctcggtcggcaattaccggcaaggcatgctggtctcggtgccgctccagctcgacacgctgccgggcaagcctggcggtgccgacctgcagacggcgctggccaagcgttacgccggctcaaagtacgtcaaggtgatgccgctgcagaacgaggcgaccaagagcggccggctcgagccggaggcgctcaacgagaccaacatgctcgagctctacgtcttcgccagcgacaagtatcatcaggctgtgctggtcgcccggctcgacaacctcggcaagggcgcctcgggagccgctgtgcaaaacatgcggctgatgctgggcctgccggaggagtgagagacgtctcgctccgtcattccggggcggtgcgcagcaccgaacccggaatctcaagattccgggttcgcccttcaggcgccccggaatgacaccaaggggaagcgagcttcgcagctaaactaccccgaagatcgccagcgccagcacggcctgggcgaggaagccgacggtgaaggccagcgtgcggaacaccgggatgcccagcgcatagacgatcatgtgtgcgacgcgtgaccagaaatagacggcgcaggccagcacggtccatttcgtggaatagtcgatcgcgttcaggatcagcaccagcggcgcgaagatgacgaggttctcgaccgcgttgtcatgtgcgaacatgagccggttcgcccactccgcctgcggcttgtcgccgcgcgagggattggccatggcaccgctgagcccgcgaacctgacatcggttgatgatgtagggaatccagaggacccccgtcaggatcaccgtcaatgtcagccagaacaattcgcgtgtcatgagtgccgctcccctctgtcgtcgctgtgcctgtctatacgaaagcgcgcaagattgcgccacgcgcaagcaagcttccgttatgcgcgaaccctgacatagctgccgggtgcgtcctcgatcggtgggaaggcttcgctgccgaccgcgcgcgccgggacctcctcgggatcgagctcgcccagccattggcgccagtccggccaccacgagcccttgtgctcggtggcgcccttcatccactgcgcgatgttgacgtccttgatgttgtcgttggtccagtactgatacttgttcgaggcgggcggattgacgacgccggcgatgtggcccgacccggacaggacgtacttcaccgggccgccgaagaattgcgagccgtacagcaccgattcagcgggcgcgatatggtcctcgcgggtggccagattgtagacgggcactttcaccttggagagatcgagcaatgtgttgtcgagcaccatcgtgccggtggagagccggttctccagatagcagttgcgcaaataataggaatggttggccgcggtcatccgcgtcgcgtccgagttccagtgcagaaggtcgaacgcgctcggctgctggcccttcaggtaattgctgacgacataggaccagatcagatcgttcgagcgcagcatgttgaaggccatcgccatcttcgagccttcgagcacgccggcggtcttcatgtcctgctcgagcgcggagatctgctcctcgtcaacgaagacgaggagatcgccggcatgggtgaagtcgacctgggccgcgaagaacgtcgcggacgatacccgctggcggcgcttctcggcgagccaggccaaagtggtcgcgagcatggtgccgccgacgcaatagccggcggtgtgcaccttcatctcgccggtgaccttctcgatcacgtccatcgccgtgagcgggccttccttcatgtagtcttcccagctcttcttgccgagccgcttgtcgggattgacccatgagatcacgaacacggtgatgccctggtcgacgcaccacttgatgtaggatttctccggcttgaggtcgaggatgtagaatttgttgatccagggcggcacgatgaggagcggtgtgcgcagcaccttctccgtcgtgggcgcatactggatcagctgcattatctcgttctggtagatcaccttgcccggtgtggtcgccatgttgacgccgacgactagattgtccggattggactgacggatcttcagcatgcccttgccggccgcaatgtcctcggccagcatggtcagaccgcgcgcgaggttctcgccgctgctcgccacggtctcgcgcagcacctccggattggtcagcacgaaattcgacggcgacagcgcgttggtgacctgctggacgtagaactcggccttgcggcgcgtatgcggatcgagcccctcggcatcgcgcacgagctcctgcgcccatttggccgtgagcaggtaaaactgcatgacgaaatcgaagaactggttcgacttccattccggatcggcaaagcgcttgtcgcgcggcgagggtgcgatggcgggctcggcgtcctgaccggccatgcggcg

SEQ ID NO: 198 - DNA, 10848 bp, Bradyrhizobium colbertium
gagagggcggagagatcaagcaaagctcggctggatcagccgcgagatcgggaaggtgtgcaaattggaaatgcatgctgaggcgccatcgccgaccgcaacgattgtcatgcatgatcaagggcggcaacgattgatcgacggcagtcgttggcgctaaaacgagcgcacgctgggacgcctcggaggaccgatgacatggctgcgctgaaacttgcgatcggcaacaagaattactcgtcatggtcgatgcggccctggctcgcgctacgggccaacgacattcctttcgtggagacgctgatcccgctttacaccgatgatcccgccgacaaggaacagatcctgtcattcagccgcgccggcaaggtgccggtgttggtcgacggcgacatcacggtctgggattcgctcgcgatcatcgaatacatcgccgagcgctatccggaagtgaagctgtggcccgacgatgtcgctgcgcgcgcgcatgcgcgctcggtgtgcgccgagatgcattccggcttcgccgctctgcgcaacgaatgcggcatgaacctgcaccggccgatccgtcccgtggcgctgtcggccgacgccaagtccaacatcgcgcgcatcgaggagatatggcgcgagtgtcgcacccgctatggcgcgacgggtccgttcctgttcggccgcttcggtgcggccgacgccatgtatgccccggtcgtgcatcgcttccgcacctacgccatcgaggtggcgcccgacaccaaagcctacatggaaacgatgatggcgttgccggccttccaggaatggacgcgtgaggggctcgccgaaacgcttcggatcgcgaagttcgaggactgaccggcgctggccggggcagaaggctggtggctggcggccatgccgccggagagctgcgacagcctgcgacatgccgccgaacgagcgccgccggtggtatcatcggcccgccgcctgtccagctatcaccctgaaatgccagcaaaatttgagcgtttgccattccggctcggcgctggccaaaacggccgggcgcgtgctatacagccgcccgggtttccggccggccatcgcagtgggacactgggcgaggcaggcgctgtttgagtaatggagagggtgttgaagcacaaattccctgtgggatcgcgcgtcctgttcacggccagcaatgttgcgcgccccgctgcgagtggctcgtatgaggggatccgcctgctgccgacagaaggcgacgactgccagtaccggatcaagagctcaaccgaagccttcgagcgcgtcgccaaggaaagccagctcgcgctctcctgaggctgcccgcacctgcgcattggtgccatcaggaatttgtgtcctgccgccgtcaaaaggcccgcttcaccttcacatggtgagtcggggcagttgccgactcgcggtgctcgcttgaccattcgctctttgctcgcgtgaggggacgccgcgcatgaactgggcatgggccacttcgctcgaacaaatctggatctcgccggccttcccgatgtggatgacgctggcggccgccggatttttcggattgatcctgctgatcacgctgatgcgtgccgacaggtcggtcgccaacggcgcgctgactgtcattacgctgctatcgatcgcgatcgccggggcggccaccgtgcgcgtccagggaccggaagggcagcccgctccagccgaagcgcgcgcgcaagtggcggtgacagcaagcctgccggcgctgtcctgcctcgacgatctcgccggcgatgccgtcgctgcgggatgtgagaaggcgctgttcggcgcgccggatgccgccgctgcggccgtctcctacacggccgccaggattgatcggctgaccgctcttggcgacgtcgccacggccgagccgggcctgacattggacatgaaggtgctgcgcaagtcgctcgagcgtgatcgctacggccttgtcgcgcatgtgctgatcacgcgcgatggctgcacgccgttcgattgcgccgcgttccgctcgctgaccgaccagcagcatgtcgccgccaacatgagctctcatctctacgacacgctgatcgcgcgctatgcgccggcctggaatgcgccggcagcggcatcgggggtgccggtcaccgccgcccttaccgggctgccgccgtcgctgccgacgggcaagccgaccaatgcggagttcccgagcgcttcatcgacgccgccggtgagcatcatgaatccagagccgacggcaacgacgcggcaggcggcgcccgccgcaagtgccgcgccggccccgcgtgcgcccgccccgacttcggcacatgctgcagcgcctgcggcaccagcaccagctgcggctgcgaagaagccaccggcaccgaaggcggcacgggctcccgccccaccggttccgctcgcgcctccgccgccaacgacggctgcgcccgcggctgcggataacgagtagatcggcatttccaatgccctgctgcccggctaatgcttgggcatgccgctacatctgatcaagctcgccgtcggctgcgactccgtcaaggaactgaaggagtgggtggccgaacggatgcagaccgccaagaagaagggtctgccgcaacatcacatccacatcacccgcatggtgcccaagcgcgacgccgagatcctggcgggcggatcgctctactgggtgatcaagggcgagatcgccgcgcgggaaaagatcatcggaatcgagccgttccgcgacaaggacggcattggccgctgccggatcgtgatgcagccgaaggtgatctcggtctcgccgcggccgatgcgaccgttccagggctggcgctatctcaccgacgattcggtgcctgccgatctcggcaagtccgcagccggctcgatcgcggcgatgccggagccgatgcggcgcgaactgcgcgagctcggtctgctctaagcatggtcccggaaaagcgcgcagcgattctccgaaaagatcatgctcaagcaataagctgcttcagaccgcgatattgtcgatcagccgggtgctgccgagcttggccgcgaccaggatccgcaaggggccgtccttgcgcgaggtgaccggcgccagtgtctgcgcatggcggagctcgtaatagtcgagcgcaaagcccgccgccttgatcatctcggcgccgccggccatcgccggcgcaattgaatcgccggcacggatgcgaccggcgctctccttcatggcacggtagaggaccgtggcggtctgacgctcctcgggcgagaggtagacgttgcgcgaggacatcgcgagcccgtcgcgctcccgcacggtgcgggagccgatcaccttgacgccgaggtcgaggtcgcgcgccatctgtgtcacgacccgcaactgctggaaatccttctcgccgaagatcgcgacgtccggccggcactgcgtgaagagcttgccgacgacggtggcgacgccgccgaaaaagtgggggcggaagcggtcctcgaggccggccagcgccggtccttccggcacgatgcgggtggcaaagccctccgggtacatggcctcgacgcccgggtgccagacgatatcgacgtcctcggccgcgagcttggcgatgtcggccttccaggtgcgcggataggcgccgaaatcctcggtcggggcgaattgggtcgggttgacgaagatcgacaccacgacgcggctggcgcgccgcttggcgaggcgaaccagcgacacatgtccgtcatggagggctcccatggtcgggaccagcgcgatagtggcctttctgctgcgaagattgtctatggcgcgtcggagtgcggggaccgtgcggacgatcaaggggggtgatgacatcaggactcgacagtgttgagaatcggcgcgggcgcatcctggcgcccgccataaccttaacaaggggcgatggtggacgccatgcatccggatgcggcacagcatcccgcgcgacatcgcactcagtcttggcaagtggatggatcatagacgaaagacggcgacgcgattcatgatgaagccgggcgcgctgccatttgcatgacctgtcacgcatttcacttgaccgcagacgcggtcaactcgaagatattcattgagggtgttgaggagcgctatgcttttgcaggctagccaaggccaatccggctcggcgcatgtggttgtgctcggcaacgagaagggcggctccggaaagtcgaccactgccctgcatatcgccgttgcgctcctgaaagccggccagcgtgtcgccaccatcgacctcgactgccgtcagcagagcttcacccgctacatcgacaaccgcgcggcctgggcgcgtcgcaccaagctcgacctggaactgccggtgcatcgctgcatcaagctcggcgagaccatgcagatcgcggagaacgaaaactcggagttccagcagttcatggaagccgtctcggcggtcgagagcagcttcgacttcatcgtcatcgatacgccgggcaccgacagttatctaatgcggcttgcgcattcgatggccgatacgctggtgacgccgatcaacgacagcttcctcgatttcgacgtgctcggcaccgtcgatcccgccaattacgcggtgaccggcgagagccactatgccgagatggtccgcgacgtcaggcgcaagcgccgccagctcgacggcgcaaccaccgactggatcgtcgtgcgcaaccgcctgtccatgctcggctcccgcaacaaacagctcgtcgccgagggtctgaaggatttgtcgctgcggctcggctttcgctacgtcgacggcttcgccgaacgcgtcgtctaccgcgaattcttcccgcgcggcctgaccgccctcgacgagatcgacgaggccacactcggcatgcggcccaatctcggccatcttaccgcgcgagaagaggtgacgagcctgctgcgccagctcaggctgccgcttgacgagcgcgggcgccgccgcgcggccaatcgtgccgagtggttcagccaggtcgaccagccgctagaggtccacgatatcctcggcgcttgaggccggcggtacggggctacttccaggcgagcgaggcgaccgcctgccgcgggaacccggcatgcgaccggcgcgttttcatcccacgttgactacgaaattgaacccaatcgagactggttgcgtcggatggtaagctgcacctgacgtggtggtatgacgatgaggtgctcataaaacgtgtgcgacgcacaatcgaagggctgcgaattcacactatttagccttcctgtcacgctgctgtgacatatattggggaataggcgagaaggggccgaagagctccggaagaacacgattttcaacagggattcaggccgccagggcctcaggctgaggacgaaaatgaagcgtggaattgccgttctggtttcggtcagtgctctctgcggcatcgcctatttcacggcgagcaagtgggcgatcaagcacgagacagtcaccttctacgatgcctcgcgcgacaatcgtccggtgcccgtctacgtcgcggtgcgccgcgacaaggaaatgcaggccaatgccggcatgatcaagctgccggttgccgtgatcaatcatggcaacaccgtcaagaataccgagtacggcttccttgcgaacattttcgctgcgcggggctacatggtcttgagcccgcagcatgacttgccgactgatcctccgatggtgacaaaacccggcgagctctacgtctgtcggctgccccagattctgcgcggtgtcgccaatatccatctcgcgatgcatgagatgaagaaggttcaacccaacgccgactacgacagggtgacgatggtcggccactccatggggggcgacatcacgatgtactttgccaaggagtatccggacgaggtcaagcgggtggtcacgctcgacaacctgcgcgtgcccttcgtcaccgccggcaagttcaagatcctctcgttccgctcccaggatccgcaattcaagaccgacgctggtgtgctcccgacggacgaggaatgcgagaaggcgggtatccaggtcgtgaagaccgaattccagcacaacgacatgcgcgacaccggtccggatgtggccaagagttcgatccagagcatgctcgacaagttcctgagcgcgaccgatagcgacgtggcgccggtcgacacgcaatcctcgccgcccaagatcctcgagcctggtccggtcgccctgatggcacccgccaagagctgacgcagaagaactgccgttactgctcgattgtaacgatcgcttaagcctccgctggcgccgcctgcggaggctttgcacattgaccggacgggatgcgctgaccacattatcccattacccagggtgcaagcagcgatgtcgggcgaacccatcaaaccacgcagtcgcgatgccgtcagggcgcaagcagacggcacgcttccgcgtgtggggacgtccacctcggaggacatcgcggcctttgttgccaaggcgcgggcactgtcgccgcatgcaccaggcgcgaaggggcggctgattttcgcgctggatgcgaccatgagccggcagccgacctgggacatggcctgcgcgctccaagctgagatgtttcgcgaggccgcggctctcggcagtctcgatatccggctggtgtattatcgcggcttcagcgagtgccgcgctacgggttggatctccgacagcaccaagctggcggcgctgatgagcaagatcgattgccgcggcggcgatacccagatcggcaaggtgctgggcgaggcccgccgcgaggcggttgcatccggcgtccgggccgtggtctttgtcggcgacgccatggaggaagaaatcggcgagctctgcgcaaaggctggcgagcttggcatgctcaaggtgcccgtcttcatgtttcaggaaggccatgatcccatcgccgagcagacctttcgcgaggtcgcgcgtctgaccggcggtgcctggtgccgattcgatccgggtgctgccgcgcaactgcgggagctgctgcgggcagccgcggcctatgcggcgggcggacgcgaagcgctgctgcagctggcgaagagcgcaagcggcgcggccaagctgatcggccagatgaagtagcatctggcgcggcccgcgacgtccgtgtctgcgatgcaatttgcgcgaagcgcgactatattccggccatgaccctgattgccggcgctgtcgctgttatcacactttacctgctgctccagatgttccgctccgccaatccggcggcgctcgcgcgtgtcgtcaagttcggtggcggcgtgcttgcgctggcggtcgcagccttcacgggtttgcgcggcgaactggcggttgcgattccgctcggaatttttggcgccgggctactcggctggaccccgttggcgaatgccggcttcggcaatgtcggaggattgttcggcggcggcgcgacgcgcccgtccggtcaggcctcgcgggtgcgctcgcaatttctggacatgcggctcgaccacgattccggccagcttacaggtcagatcgtcgcagggcctcacgccgggcgcgatctcggcgagttcgatcttgctggcctgctggaactggtcccgaccttcgacggcgaaagcgttgccttacttgaaagctatctggaccgccggtttcccgcttggcgtcagaacgcgcagagcgatgcggcaggggggcagcgccgcacggcggcgagcggcaaaatgacggcggaggaggcctatcagatccttggcttgcagccgggagcgagtcgcgacgacatcagccgggcgcacaagtccctgatgaagaaactccatcccgaccaggggggctcgacgtatctcgctgcccgggtaaacgaggccaaggatactctgcttcgcacgcataacggctaactccggcacaacgctacaaacgcccgtaccgcgtgagctccgtttgctctgtcttccgtcgccccgatgcccgccgttgccggcgtggtcgatcccttgagcaaagtcttaaccgtaaatccttgacgagaggttttcgcgcagcagccgaggcttgcgccgtacccccaaaacaaaaatgcccgcgcaacgcgcgggcatttttttgaggaatggaggagatcagttgcgcacggtgatgcaagagatctcggcgcgctttaatgtgcggcagaccgcttcggcctggtcacgctcgaggccggcgaagcgggcacggtagagcttgcgattgtccttggcgacaatcggctcggtgaacgggtctgccctgctcagcaggccgcgggcggagctgcgcgcggcgtcgatgcgctgctgagcttcggtctcgctctcgagcgctccgacctggacgatccagccgctgtgagtgacggccggcttggagttggtgctcatttggaccgggtgtgacgccgggtcggcagacgcgagctttggagcggcgggagcgggagcagccgcggtcgcggccgggagcaccccaaggatgccgttgccggtgccgaagcccgccggctgccgcggcagctcggcccggaccatctcggccttcggcgcttccggccggctcaccggctccggcctgttgatgagatcggccctggcgacgaccgcgccggaggtttccgcgacctcggagcggggcgggatcgtgctggtgaccggcggcgcggcctggacggcgacctgggccggggcggcggaggcgaccttcacggcgccggccttgacttgaacggtcttgacgcgaaccggcttcattggctcggaggagccgggaatgatggagagcggctggctcgagatcacgccgttggtgagcggcgctggctcgaccttggactccgtcggccgaacttcgggcttggcagcttcagatctggacggggcgggcggtattgcggcagtcgcagcggccaacgtcgatagacgtgcggcaaggcgcgacggggcagcctccgaagcaggggccgcgacggcctggacctgcggggcggcgcggggtgtatccgacgcatcggcgatggtactgacgtcggcgttgttgcgctcggtaacggcggcgacggtgtggacggttgcgcccttctcgaggttctccgcgagaaggttgcgcatgatggcgtcgcgtgagccgccgctgcggccgccgagcacgacaccgatcaggtgtcggttgccgcgacgcatcgaactgacgagattgaagccggaagcgcgggtgtagccggtcttgatgccgtccacgccctcgacgctgccgagcaggcggttgtggttgcggatcgactgtcctcgccagttgaacgtcgaggtcgcgaaataacgataatagcgggggaagcgctcctgaatggcgcgaccgagcgtggcctggtcgcgcgcggtcgtgacctgctcgtcattgggaaggccgttggcgttgcgatagaccgtccgggacatgccgagcgagcgcgccttgcgcgtcatcatctgggcgaagtcgttttcgttcccggcaatcgcttccgcgatcaccacggcggcgtcattggctgagcgggtgacgaggcccttgatcgcgtcttcgacgcgaatggtctggccggcacgcagattcagcttggtcggatcctgatctgcggcgtgctgcgagacgggcatctcggtgtcgagcttcagcttcccggattcgagacgctcgaacagcaggtacagcgtcatgatcttggtcagggaggcgggatggcggattgcgtcagggcttgttgcctggagcaccgcaccggaattgccgtcgacgatgatggacgcgaatttcgggctggagctctccgacacgtcgcgctgcaccttgtggtgcgtataatggcgccggtgacgccgcgcctcggcagcgtcagtggtgaggatgatcgcggtggtgaccgtaagaagcccgaaaacgccaacccgcgcccaacgcgaggaagacaagtttttacgaagcatggaaccccgtccccgtttctgacttgatcaccggctcgtgaggcgaaattgtgcccaccggacccgggatctttacctgctcaggccgtccttccgctgttgtccgtcgcggaggacgttggacccgagccgctgttctggctaaggcgatgttctgaaacggctttagccgctcgcggaagtgaacacgtccagggaatcaaggtagggggccgcggtttccaaaagcttaaggaactattgcgggaaacctccgcaatcgctgcgatttgcgtcgacatttgtgcgttgcacaaagattcttgacttttttgtgcgttgcactatttttgggcgtggtcagggagccggggcttcccgacgcgagccagggaaaaggattccgacatgttcaaggttgaagattttcagaactacgggaaagagcagttcgagcagtgcgttgcctccgcgacctcggtgcagcacggcctccaggcgatcgccagcgcttatggcgactacactaagaagtcgttcgaagacaccaagtccttcgtcgagaagctttccggcgtgaagtcgctggacaaggccatggaagcacagaccgatttcgcccggtccgcctatgagaccttcgttgcggaatcgcagaagatcgccggcctctacagcgacctcgccaagcaggcgttcaagccggtcgaaaccatcgtgtcgaagttcaccccggccgcgaactgatccgctcaacacgctcctagagccaaaagcccggccacactcaggctgtgtggaaagccgggcaaatcggc

SEQ ID NO: 199 - DNA, 7958 bp, Bradyrhizobium colbertium
agcgatccggtgcgacccggtctagcgaagcgaaagaatggatcaaaggtgcataaccactctgctggcagcgcatcaacattcgtggcaatgcgccttgctccatctagcgtggacgcaacatgagcaatttgaccccgaacgtgaggttcacaagcttcaggaccccccatcgctgtggccagaagacgcgcatgccaatcgcttggatttcgtgctctctgagcccacaattccagcgaactccacagaacatcatgattgccagcctcgtacacaatcggcttcacgcccttctgcatccaccgagcttgagcatcctcatacgagccggattgcagcgcgtaagccccgctgaattgaccgggagagcggttgagcgcctcaagcaaatattgcattggcggatcgtcggctgaatatccaacgaacacgacgaaataccgctccagtacttcctttataaagtccgacgcccaccgttcggatagataggcacggccaaactccgcactcgaaataataaggccatcaccagcggcgtcggtatagtccggagtgacatgcccatggaggtgaatgatcccgcggaactcatcaccgcgtctggggtctggtagtcgcggatatctcgaaactggaatcgatttctcgcaatcctcaaacaataggtcgaagttggtagttatcagtcgaaccgttccatccggcccacgtgcgaggtcgatgagcacgcggtgcgccgtcaaatccggagtcccttccggtttcaaagattccgcgatcgcgcggtgtatatccttagcccggaagtcccgctccattaagccaaacacgcgatcggccgatattagtccacctaccccttcgatagctggactatttgcaatggcgtcaatcaccttgcgtgcaggattatctgctgagacaagcaaccggtctgcaacgtcgcgagccaggcctataaagtcacgcagtcctgccttagctcgcgaaacaccagctccacagaagaagacaacccgtccttcgtcgcgagccacgaggagttcgccgggaaagtcgggtcctttggccgaaaatcgcaccgttctattccctgtctcgaagcaatccgaatcgatgcgaattgccaatacgtgtcagtgtaccaaaatcgcctcgaagcctttaatccatctcctacgggtttgtttatggttgaacagtcgatgatttcctgcgctccgttcttgccctcatagcgactgcggaccgcggaggacccgaagaaaaatttcataagcatgcacgcggcaaatatttctcttcttgaccgcgcaaaaaaattctcatcgatcgatacacacgtcacgcccaacgcggcgctattgagcaatgcagatgcagcactcgacgctttcagcacgcgagttggaggaatcgtttgtggggtcatgtgattgataagaaaaacaaaagacggaattggccgcgggccgccatcaccattccgatatacacggtggcgtttggtcagcatgtattaagtagctgatatctaacaataatcgtgctgaccattctttggtcagcatggagagtttggtcagcatggagatggtcagcatgctccatgctgaccaaggcttggtcagcactcccacccctatttttatagggtttcgttcatgctgaccaaaactccccgtgtatataaaggtcagcaagccccaacagcggacgtccggctctttttcgcggcttctgcaaagggccatcagcggaagtccggattcgcgcgcgggggcgaggcctacctatcaatgggcgagaatgagcgcacgacctcatatatgcccggctcaaatttcgcgatcgtgagcgcctcttcgagaaagggtagcggtccaggatcctggcgcatggactcatagtcttccgcgctgcgccactgcgcatacatggtcactttcgtgccgtcgaggctccgatgaagggtcgaggaaacaaagccaggtgcccggctgacgaattcatcggttgcgcgcgtgagcaaaacgaggagccggtcctggttggcgggatctaccgtgaagacatttattaggctgatcatacggtcggtcctttcttttgttgcctgatgtcttgcctatcacggggggagtccaataggacggtcaccatcttcagcctcacgccggatttaccgcccgaggtcgttgttggacgcaaatgacgcgcccctgagagaaccctatcaaaccagaggtgggccgcaccgggtcaaggccattgatgcccgttgcgggtcacaagccgccatcgcgcgtagcgcggcaatgtccgcttcggcgcctagccgaagtcgatctcggggccgggaagggaccacacgtaagcggaacccttgccaaagccgctgcgctcgctcctaacgccaataccttcgaaggcagcgcggcggacggtgcgccaactatggccccgctcttccgcccggtcctttaatttgtcagacggcttaggcccgcttgccaattcgtcctctaggaacgtgatcgccgcttcgagggccgaacccttctcctgttcgccaccgttgtccatctggcggaagacctgcccggcggacatctccgtttcgccggtccatttgatacgcggcaccttcagcacaagcccggcggcggtcgtgacggtcgtctcttcaatctcatatgtgagtcccggcacaggggcgccgatgttgctcttacccttgacaaagaacttgcgggcggtttccttcctatcccgcatctccggcgcaacgaaccacccacagcgcgcaatcgcggtgaacgcctgcgagtcgagcatgcgcgtgagcggggcattgccgccgctattcttggtaagatgggacaagaatagcaccgccacgtcatggcgttcggcgaggtggccgagtggactcaagacggaacggacttcggacgccttaaatgtgtcggtcccattgcgcccgccggcgcccatgtaggaattgattggatcgattacaacaagcgcaacgtcgttgcaggtccgaataagctccgccaaaccgggcagatcgttggcaaggttgaacatgcgctcaggccgacccttcaagggtttgaccatcatctgcacaatcattaccctcgaaacatcggcacctgcagcctttaggcgcggaacgatggtgtccccggcgtcatcctctgcggccagtacgatgaccgagcccggcgccggctcgccggacttatcgggccatgcgacccctgttgtgacgcgagcgatcaaatcaatagtaatttgagacttgccctgatcgggtggcccggcgaggaagttcagctttccgcgcgcaacccggttcggccatagccagttgatcggctccggttcgacctcacttgcgagttgataccgaaccccgctatcggtcctatagactgttgcattcttcgggcagtcttcaaccgattcaaaatcccatttcagcgcggggtcctcctcaaagtcttcatcaggcgtcgcgcgaccgaagatgacattcaggttctccgggctgataccgttgtccaatagtcggcgccgcaaggtgccagcgccacggccgcccggcttgtcggcggtaaacgagtcccatctaagttcgttcgcgtcgcggtgttcctggcccgcatagttcgggtcttcctgacaccaatcaagaaagaattctttgacgtcgtggtcgttgttgctgagcgtgtgcagcgccatcgcgacttcttcccattcggggttgccggggacgatgtgcgcggggtctgcatccttgagcatcaattcaacgtcttcaagcccgatagtgtcgaacccttcggggggctcatcgctgggcgccgtctcgtttcggcgtagccgcggcagcgcctcgtctaacgctgccatcgtatgcggctgctcgtattgccgcgcctcaatgattcggctgacgaacggcttgcccttctgatgcttgaagccgggcatgcgcagcacacgcggcacatcgcaaacgctaggatcgccgccgtatgctttcgcaaggcgctgaaccatctgcttcgctgcgacgaagtcgttcgtgggttcaatgatgaaaatgcattggtgcttgcccggcgaggtctcgataatcacgtgaggctctaggccgcggagccactttttcggcagcggtgctgtgtcaagatcaagtggcagcgccaagaccttccggaagtttgcgcgtttggtgcctttgccatctgaaagattcagggtgtaatagatggcgaagcccttattgttgaggcgcttcagcttgtcccacagatccggcagcgtgccgcggtgacgcaagcgaatggggcggctggtgagcgctttcttcgcggcgtctgtctcggggatggctcggaagtccatgatggcgccggcgtcgccacgaagagtctcgattagctccaatcccgccgtgagtgttcctttgtctctttgaccgtttcccggcatactcatctgctcaactccacactgccttcactgccccgaccgcgttgcatccgcggctggggtttccttttgagtcgccggggagcgtttcgtctatgatctgatgcgatgtccctcaaaagcttctcgaatagcgcgtcgtcgaagctgttgttcagccgggcgtgcaggagcgccccaattaggcctagctcttgcttcgatacgttccacggccactcacatgccttttcggcgaagtacatggtcgggggacagaagacccctgccagcttctgtagtggcgtgtggccggcttccgcgcgaaggcgctgcgcacgtttcaagacagctagaatgaattcccgagtcatagcgcatcagccaaagccaaacgtgttggcgatgtcgtgggcggcctcacgctcatcagcgagcttctgagcagcctcttccgccttcagttcgtcgtagccgatgcggtatagttccaactcaaaggcggcacgcatttcatggcgagcctgccagcgccgccaataggtggccgccgcggcgtggttcgcttccgggatgtcagccggcttgccggtcttgctgccatagcgccggcagataacttcgagcgattcgtcatgggcttcgcgctgataagccatctgatcgtcgaaccagggcttccactccgccggcacattctccggggtttcatcgggagaccaagctcggaaacacaggtacttgacgcgcgactcgggaacacgtgcgcgcatggcgctcaccggcccttcatgacgcgagcccgactcgcaataatcgtcgagatacatcgtgtcgtattctggattgaacggctgggtgaagctcttcattaagccgctgtgcagcaatgccgggcgtttcaatgccttgcgatgccatgcctctgtttcggcttggctgtgatgcgcagccaaaatagcggcttccttatctgcggccgtctcgcaaaagcgtagagcatccgcctgccacagggctgcatactgttcttcatagcggtagcgggcctttagccggcgccggtcgaatttgttcgcgacacctgcgacagagccatcaacgctgccaaagcaacgcgcgagatatcgcttacgttgggaccccaggagggcgggccattctgatgcttcggacatgatcgtgactcgttggaggggcggaagcggggagcgctgcgctttccggttacttagtgcgatcagcgggcgccggattgttccagcgctcgaagattgcgacgggatcaagctcgcaagccggcttcggccgttcgccgcgaccataggcggcattcgccatccgttgcaggcgcgactcagtcttggcctgcccgtcgtcgcccttgaaggtcagctgctcaaggtccgcgattgctttcgcaacgtcggcctctttgacctgtcgccaactatgctggcctcgcgcaccattcgtgtatttctgaattgccttgtcggccggttcacggccgcgggcagcaagcgccgcaaggtacgcccgcttcagcggcgccatttggatttcgtctgacatgttcatagtcctcttagatgttgcacaacagtttcaagccgccccgctatcccgtcgcatttcatccccgccgaaaggcgctttggcgtgacaacggaccgactgactcgaccgcgcggggacaaggagccgcgtggcccgccgccggatggtaagttcagccaaaacccatccgacggtcttccccgacgcagaagcaaaggatcgaagaaaccttgcgccgggaattggttgatcacgcgaattcgatatccaagattgcgagcggactcgccgccaagcgcggaccggtgttgatgccgcgagcccggccggttcggtagatgaactcagccttccgctcgatttccaaaatctcagcttcgatcttcttcagcatggcgggccgatcggcgatgggaatggcgttctcagcgtcgtggccggcgagagccattgctttcagccgctcacgaatctcagtgccaaagacagcaaagatcaatgtagcggtgtcgttcagccgagagaggccgccagcaccattcggaatcgtcagcatcggcaattcgagagacggtgcggaaaagcggcccgatgaaaattcgttgggagtgtgcagcttccgaagagcgtgctcaatgcttgccgacgcgccgggaaggacgcgatcaatcgcggacgcgatgacagaggcgggtacgtgtgcacgtctgacggcttccgcttcatcgagcttggcggcgcgagcggcccgacaggcctcatgctctgcgaccagattgtcgccaagctcgcatttgaagttgtacgacttcagcggcctaaggacgttggcttgggcgaagtccttgcaagcctgagattggttgcccggctgtaagcggcgtttggcctcgaagtcctcgtcaagggcgctcaattccagcttctttgccgcgaccgtttcgtcggcggccctgtcaatctcctctgacgggatttgagcgcgttcgttgttccgcttttcattctgtgcccgcgcaatttctaatcggatttccgcggcccgctgttgtttccgctcatactgtgcgtattccaactcaacgaggtcgtcttcgtgcttggcgatctgctgcgctgtaggcggaagattgtcgatcggcgctttgacagccgaaccggggttgctcgaaaagtgggtgatctgttcggtgggcatcggacttgctccggggtttgaatgtcgatgaagtcagccgtacacgcccaaaggtcttcgagtcttaccctgttgttgggtagtcactgcgtcgaggatgtgtctgcatctcaccagcaagtccctaaggtgggctgcgtgacgtgcttcgtcggcgcgaatccaattgacgatttccttgccgtggtcgcgttcgccggtatcaagagcgccggtaaagcctttctcggaagcgctgccaaagccgtggatgtgctggacgcacgcaagacgaacatctctgtctgaaacgctcaggctttcgcgaaacatcgtagccgttgcgaaggcttgggatcgtctcgttggagccgatgcctttacgctgaacaagaaaggcaaagcgtcggcggctgcggcgagtccgtccgtatcgttgaatgcgacgaaccggcgcaaagcatcatcaatctcctgcatgttgacggtcatggccgcaccacacggaaggatgcgcggcgacgttccgcttccacctgtctgcgtaacgcagtttgctccgcctctcgccgcagaacttcgtcaacgaaggcggcgcgagcgtcttccaatgtacggggtgggttcatggccgcaccacctttcgggggcgcgtcggctcgcgcgttagtgtggcgaggtcccaagcatcgagttcgtcggcagcccagaagcggtcagcgcc

SEQ ID NO: 200 - DNA, 69073 bp, Bradyrhizobium colbertium
  misc_feature (18954)..(18987): n is a, c, g, or t
  misc_feature (62478)..(62487): n is a, c, g, or t
ggcccgggcgggtaacggagaccgtgttctctggcattttccagcccttggagcgctggcgctggatgcggatcggcgcgctcacagcagaccacccttgcgcaggcaggcggacggcgggcccatgcgatccaagatttctgtccgggtctccgcggggccggtgggaatgatccactcgcggccgcgccagctgtagcgggcgtagttgatgtcgccgtcccagccggagtgctggtagtggccgaaggtccgggccatgcccaagcaggtgaggatacggatggtgctggcgagctttcggatgaagtgcttcatgcggtcaacgtcgatggccacaggcagcctccatgatgtcgaaatcctcctgctcgaggtccatcagggtgcggggcgggtgctcctcctcgacgtcgccacggccttcacaggcggtgcacatgccgtggtcgacctcgcccatgtgcgggtggccacagccgggctcgtagaccacgccgtagcgaatatcgcggccttcgccatggcaggccgggcaggggatgatgacgatcatggctgtgccctcatgccggcggcgatggtctcacggatgatctcccgctcgcgccagcggcgcgcggaggcttcatccgggaagcggtggacggtgtaggtggcctcgcgagcgccgacgatcgcgcccgtgcggatcgctttcggcgccaacatttctggaacgacgcgcaccacgaaccgctcgtggggcggggcgtcctcgtaatgctcgaggcggtaccgcatgcggagcttctcgaaggccagcatggcctcgtcgagctgggcggcggtgggctccggaaggggcttgggcttgcgcctggcgctcatgattccgctcctgcgcgctgctcgtgctgccacaggcgaacggccgagaccgcgccggtgtagtcggcgccctggcactccttgtcgtagacgacgaggtattgggcgacgtaatgggtggtgtggcgattgaagtcgaggccctgcgccaacgcgcgggccgcggcctcgccgaccatggcgggagtgagggggcggcggttcatgacagccgctcccggatcgttgcggcgatgatttcccgcgtgtatttggtccagttgtcgaactcttcgagcgcgtgctggggctggtcgaagttgatgctggcgaaggtcagcaccacgagattgccgacgcaattcatgacggtaccggccttctgctgttcgagcagcggccagactatgccggccaactgattaccggcctccgcgtgggcgtcgagttcagctgcggtgggatcgctcatgacgccaccttcgcggcgatcggcagaaagatgccggcgacgatcatgaagaacaggccgatgccgaatagctcgcccggcgtgttcttgtgcaatctcttggtgatgagctgaccgaacgcgatgagcgaaaggaacaggcagcccaagccgatcagccagaacgggagcgatgcgaggatccacatggctatgccactcccatctctttggagtggagcacctgcgagaactccttccgctcgtccggcgcgctgtccgccagcgtgacgagattccgcaggaggtcgttcgcaacacccatcgcgaagctgacatagtgctcggggtccacgcgctcgaacatgtgcgcggccagatgcgacgttgagagcgaaaccagcgcctcggtgatgtgctcgggatcggtctggcggttgctctcgcctgcacgccacgcgaacaggtgcgagctgatgtcgtgctccaagcgggcgttgcaggcatcttgatcgacgccgcccatcttgggctttgcgcgctccttgatggccgcgacctgcttcaggatgtcttccggatcgatcatgtgcatggctatgcggcctcctgggtgaggggatagagctcggccagcacttcgagatcgagcttggtgccggccgggagcgggatgcggatgagcgagcgcacgtcgctggggccgacgaagcggcctccatcgtcgtgccagatctgcgggcaggggccgttgaggccctgcacccagacaaggtaggcggctgttttctcagccatggctcatgagcctttcgtcttcgggggacaggggaaccgccatcgcgtcgatgtcggcgacggacaggccggcggcgcgcgccgcgcggccgagctgcaggatttcatcgcgctcgcgggctaggcgctgcttgcgcatgcgcgctcggtggcggtccgcttcattggctgcctcaaagatcgccacgcggcactcagagcagtaggcgttgcgatgatgcacggagcctccgccgcaccttcggcagcgcttgatgaccgcagccttcatcagcggaggtcctgctggatctggcgcacgcgcttgtcgatctgctcggccttgtccatgagagccttgaacgcttcggcatgcattctcacgacctcacatcgttctttcatctcgttgagcagggtctgcgcctcgttgatggtggccctgatctcctcgttggagccttcggggccgaacatctcgtcgcgcagttgcttcacccaggcgcgcggcacgccgagatcggtcgcgaccttcgcgtcggtccagccggggccatagccgatcttttcgtcgacgtagacctcgttgagcttctcgaacacgatgcgcctgtcgtcccgcgacatggtgcgcggggcctcgggctccgcaggcttcactggaagcgtcacgaccttgttctcctcgttcttgcgggcctgcttggccttgatggccgaatagcaaccggggcagcggtgctgttcggccttcttgccgatcagccagcccatctcctcgagcttcttgatgacgaactgctgctcgagctcggtctgatcgttgggcgtgccggtgaaggtgttcacgcggatggtcttcagcacgccgcaatggccgcaggttgcgaaggcgccgcgcaggtgccggttgccctggttgaggggtttgattgcgaacgtcacggacggcccgcctttccgcagaatccgcggcgctccggatcatccacgacgctcatgccgtcggcggaaagcatctgccgccagcgccacatcatgcagcctgagccgatgcagcgcgtttcctcgtccacgtcaccgttgacgtgatggttcacggccatgccggcggtcagcccggtgcgaacctccgggcaccacttggtcttggcctcttcctcagtggtcagcactggcggcctccacaggtgcggtttcgcgctcgaagcgctcggcggcggcatcgtcagtgttggcgccgcgaacgccgccgtagccctcctcccgcggccggtggacgtagggcgcgcacttcatcaggaggacgacggggaattgctcctcgcagggctcgccgtgcctactgaaccagaagcaagtggcctggtcattctgcatccggatgacgcgcaacagcggccccgggatgtcccggagccgcacggtggtgccgacgacgatgtgttcctgctgctcttccatagtccgcccctctctctggttattgccgcaggccgatgatgttcggcttgggcttgcgcttctcggcttccgccgcgatgaattggtcccgcacgttgtcgaggaacaggcgtaggccgacgtcgaccatggcagatgccttgagcttgtcgtcgcggatctcgcttgcgatcgtccaatcgacgagagcggtgtggaaggcgaggatcgccgcgaacagcttgtcgctgttcgtcgccgggctgatctcatcgggcggagagttgaggcggtgcacgatccgccccgcctcctcgatgtgcttgtcgatcacagcgcgcgcttcgctgatgaagttggcgacgtcgatggtgctgtcctggctcacgagacggcctccgccttctccttggcggcaatgcgctcctccatctcgtcgatgaagagctgcatgatgttcgcctgcttgcggccaaactcttcactgagatcacaggcgagcagtgccgccttctcaatgatgacctccagcgggagattgggcgccttctcgcggaccttgtagatgcgctcgtaggtcgcgacctcgatgtccgtcacgagcgatttgagggacgccatgatcgcgtcgaccttgacggggcggtcgagctgggagtcgatgatcgtcgagagcgcgagcgcggaccgcatgatggcttggccgccaatgtttgcgctctcgaatgacgccttcatcctctcggtggtggcctgttccgcctgtgcctgctcagtcattgaacgctcctatcggctgctctggttgcgtcgatcgcccgcagctcattggcgatggacgtgtcgtggtccgggttcgagggatcgaggcccttcaccttgaagcggcgcaggacggccattgccgaccatttgaccgtggaatcgttcagcgcggcccggcaggcaggcggcagctggttgaaagccgcgaactcctcctcgcgggaggcggagacgaggccgtgacctgccggtgcggtgccggtgttcgagatcattcggcggcctcgttgaacttggtggtctcgttgccccagcaatcccaaccttcgacgcgacggcgcgcgaaaagctcgacgtaaggaccgcccaccaggcgctcgatgcgcccatggatgtcgtcaggcttacggctgtgctctcggcgaggagcgatgatgccctggcggacgtcggccccgatccgcttcggcttgccgcgcgtggcgagcaggcacggctcggtgttctggcgcgtccagtagcccatgcccatgtcgggcgtggtctcgtcagcgaagaggcaatagggatcagccttcatccagtcgaaggcgcaggtcttgtacgtgaacccccacgcgctgatgagccacagcgcggctttcaggtggggccacgtcgtccagcaaaacagcacgcaatccttcgccgccagatcgagcaccggcaggcggaccatctgctgcacatccatggtgttgtagtgctttgaggcatgtcggctcggtccaccgactgcagtcttgcggctgccggatgatttcagggaccagacgtcaaagtgccacggcggatcagcaaggatcgcgccatacttaccctgctgcagatcgccgaagggccagctcatgcagcctccttccggcgctcgcgcgtctcgaagaatttgggcaactcgggatgcttggcgaggaaccagcgggcgagcacggaagtccaattgttgttcgccttgaactcgcgatcaccacgctcgatattgaagtgccaacgaatttgatgcgttagcgcgtccgcggagtatcgctctaagccgcggcttcgcacctgaagagcaaggcgctcaaacaggtcgcacacttcgggcggaatatcctccggatactccttgcgcggtgaaaacagatccatctgagggttgtccgtcatgcgacaactccctcgactggatggcctctgcggatcttagctcgcagcgaatgcggcgacatctccaaacgttcggcggcttccgtgagcgacatccgctcgccatgcagcaggacaaacttagtgttgcgcctattgcgggcttgctgctttgaattggcccaactgcaattgccgggctcataatgcccatcgttgtcgtcgcgctcgatcgagcgaccatcgggacgaatgcccatatcttccagaaaattctcgaagatcatccatcgttcacagacgcgaatgccgcgcccgccgtagcgggcaaaatgcttcacgtttggattggtgcagcgccggaccatgttgatccacgcctgatacgtcggcgtaccgctgagaccgtggcgacgattggcctgcccgatgaactcgcctcgcgagcacccgcaagaattggcggaaccggaagtgagaacgtctgaccggacaacggtctcgaccccacagtcgcagcggcactgccagcgcaccttccgggtatcgccggagcgctggagcacgagcagtttgccgaaccgctttcccgtgaggtcgagagctttttgtgccatgctactcgggcgacccttcgaacgtgttcagctcggtggaggcggcagcgatttcgaggtcggagatcacgcgctcgcgcaggtactccttccagcgatacatctggtagaaccagctgatcgcgccgccgctgacgcggtaccgcaggcgcaccgggatgcggacaggatcgccgccgatgaaggcgggcagggagatcatgaacaggccggggacgatcagcttctcgccccgctggtcacggtgctcctcgacgaactggatttcgccttcgcccgactgcagcgtgacgccggacttggcgaccgactccacgttgacctgcagtccgcgcgacaactccatcatgcggctcggcgaggcgaagttcgtccgcaggatcttctcgaactgatccgcttcagcgggcgtcgggtcggcgagctcgaacacgcgctcctcgatgaaggcggcgaactcgccctgcgtcatcttctgcgcgtccttgcctgcccacgccttgaactcgtccgtcagcgggaacggatagacgaaccggtgatcgccgaagcgcgcttcgccggtctcgcccgacttgttgtaattgatgatcgccgtcagagacggcgtcggccaatccgccagcgcgaagatgacgctgtgctcgtccttgtggcggttggtaaggtcgatgaagctctgcagcgttgccagcttggcgatgcccttcttgcgctcgggcgcgatgcgccacttctccgcctcgacgcggaggctctgcagccctgcgccgttcatgcgcttgtcgaacgccagcgggaacgacgagggcagacccacgccgctgacgctgatgctcgcaacctgcagctcggccgcgctgcgggcgaggattgcaatcttgtcgacggcttcgccgttgaccgcttcagacatgaaacgctcctgttgttagccctgctgggccatgctcttggtggagtcgcggacgaacatgtcgatctgcgacgggtgctgggtggaaagcgctccctcgtgcgcccagaagggcgtgcgacggaacttctgcccctcgggcagcttgaccttcacgttcgggagaaggttgaacattcccttctcgtattcgaagtcgagcgtgacggtgatcgagcccttgcccttctccgtggggagatcgacgagggactcgacgagttcgcggaccgccgtgtcgagcttcggttcgaagtcccgatcgagcaggccgatgatttccgagaaacgcctgatgaggcgcgacgacatggcagttctcccttgtgggttggggtacgcagacgcaacagaacgctgggtggatcagacgcgcgcgagcgtgatgctctcgcggtagagatggctgtggctgtaggcgcgcgattgtcgatcgaagcgcttgcccatgcgcggatcatcgaggatcgcgacgcgcacgatgatggtctcgatgccgagcttgcgatgcagcggcatggcgcggcgtgcggcgcgcagcctgcgcttgtgctcacggcgccagcggcgcgcgttctctttgtctctcggcattccccgcccccgcggcaagaaggccgtcagcttgctccgctgacggccttggtgatgaatctcatgacgccctcgcaaactcaccaaagagttcttgagcagcacggaaataggcagcgtttgcttcttcaggagtatcaaacgtgccaaggtagtagcggacgccatctttcttgatgcgcgccatgtatcgatcgagactgcgttcgacgcccttgaagccgatggtgcttgcagcagagcaacaagagttcgctttgttttgttgagtgttcgcttcgcgcaaattggtgaagcgattgtttgtgccatctcgatcgcggtgatcgatcttgctgttgggccattcgccggtgacgtgcagccaagccaagcgatgggccagatgaatctcgttgcagatcttgatctggatatagccgtgctgagtgcgagttccagccagcttgccagggcgaatggaatggccacgcacgcgccaacgaaactcgccagtcagcctgcaataggagaggcgggtacgcacgatgtcagccgtgagcttcgtcatgcgacatctccattgaggatggaggagatgtggttgtcgcgcgccatctgagaagctcgacgcgcgcgctccgcttccacggccagcctgagcaggcaatggaggctcgcccagatgtccttcagatcatctcgatagcggagactccagaaggtgctgtaaggcacactgtagcgcgcttccaaccggcgccatgcggcttcgagatcgccgggaccgcggatttccatcgcggtcaattcgtcagcccaagccctcgcctcggcaagaagttgcgccgagatcaaattcctctttcgaaacataaaccctgcctccgatacgctgcacgcgttggagacaggagcttggacgtggccgctgagatcacccccatcgcgacctttggcgaggcgaacgcgattgaggctgaagaagattgctggcttgtcctgggtgacgtcgtcgaagggatcaaggatcggtgcgctgccccccgcactgatgctcccggccggggcaatgtgctcgcgttccccggccgggctgaccccgaatacgtccgtcggcgcgcgatcgagatcgagcagttcgaggacagttttcggcgcggccgcaagtggagccgcgacaatcggccgccgcgtaaatagaagtgaacgcagcgtccgatgtttcccgtgggacaatgaggcgatcatgcggcgtcactccgcaggtcccgcttcgcccttgcggaccaaaattgccatgcgacgagaacgacatcgcgccagaaggcatgccacgacagatgacaggctcggcacatccagacgaccacgagcggacgctcatggtccggatgatgcatctcggcgtcgggcgatccgcagcacatgcagggctcgggatcgagcttgccgcgccgcttgtaggtcccagcgtaggatcgcgcgttgtcgcgcatcttcgcttcatcgttcagcctgtgcgtcttccgccactcgcgcatgtaggttgcgtggcaatcggcgcagtagcgctggccggcccgctcatggggccggccgcacttggagcaaagcgcggtgtccggggctggcgggacaacgtgcttcacgccgcggtctccgtgagaggcacggagtcaggatcacgccacaggtcagggcggatatcggaggcaggaacggcgccgttcgtgtatcggtggattgccagagccagccgagggccggctttaccgcggcgagccttgttgatggcgggctgcgaaaagccgatggcggaagccagcttggcttctgacccacccgcgatctcgatggcgcgatcgattggcgacttatccataactaagtgataacgaatgttatggcaaaatcaagaacaaaagttatcgagacaggcaataactgaagttattataatgccgggcatgcaacccggtgaaatcattagagaagctcgcgagcgaaagcgctggtcccagaaggagcttggggaccgagcaggcatttcgcaggtcgccatcaaaaagatcgaggctggaaccacggctcagtcgaagtttctgccgcgcatcgcgcaattgctcgagttggacctggcgctgttggactcggcccttacgtcacaggcagtgttgccctccgaggcgcctccgcccctgatcatgaatggtcgtcccgacttcaagatattcgcttccgccgagggcggggcaggagagatcatcaggtctgcagagccggtggacttcgtcccgcggccgactcatctgctgcacgtcagggacgcctatggactcctcataaccgggtcttcgatggaacccgagtacaacgccggcgagatggcgattgtggagccaagcctccccgtcgtgccgggcgaggtttacatcttctatgcggagcgggacggggaggcgagggcaaccatcaagaagcttcggcggccggccgccgatcggtggctggtgactcagcacaatccaccagagggggcgagcaaggacttctcgctttcacgcaaagaatggtcaatcgtccaccgcgtgactggaaagttcgcccggcgatgacctccgaagcgatgtcggttttgtttatgaccggtatcgcgctggcgtgcagcgcttctatcgcgctgaccgtccaacacttttacctcaggctctgccgcccatgggccgtgaccctggatgatgttgtctttccaacagatcgatttcagttcgtcgaaatggcccgcacgatcaacgccttcgcggtgacgggatatagcttttggaggggcgcctacgctttgctgttctgggcgccatccgaagacttgcgtgtctatgttgctataatgcttggctttttcggtagcctcggcttggttgtcggtcttgatcgtcttagccgcagagcaagggaagcgccaccaccgtcatagaacgataacttttcttattgctttggtcgataactaatgttattgatgtccgcaccatcatggagcggaccatgtccaatattccatccactaagcccaacgtcctcacccgcagtaacctgatcgacgaagagaccggcgaggtcaatctttgggttctcaagggcatcgcgcgtcgcgaagccatgaagacctggggcgcgatcactccgatgtcgctccgcgcggcgcttcgcgaagccgccgatctgatccctgagatgcggtgcgcctggcgtcagcgtcatggcctgccgatcgagatatccatggtcacatccttcgcgcccgaccgcgacggcgtgcggcggagtgcgttctgatgtctgaaaccactcgccagcgcgaggctgtcgcgcgtctcaccaccttctgcgagcggctgatccgcgacggcaagttgcccggcgcggtcgaggccgagcttcgccttcacaccaacgccgcctgtgccgccttcaacatggcgccggtccacgagagggagcccgcctgatggacatcttcgtcatgggcttcgccctcggcgccgtcgctggcgctctcattgtcgctgcctggatgagcgaccgcgcgccgtccgtccagatcgatcccaccgagcatggaggctccccgctatgactgtcgctgaactgaagaaggtcaacatcgtccccgacgagtggacgtggtggcgcaacgcgctcaagggcgtgttcgagacgatccatgctgacgagccgaggaccggctactaccgctcgcgccgcaaggacaaacagagcgggcaggtgacgtttcatcgcgtcgcctattggtaccgtcccgatggctcgctcgcatgtcaggtcgacggcaagcccgtcgatgatctccgcgctcgcgagatgtggccctacgtctctcagcggccgatcacctatgaggtgttcgatgctgtctcgaagggcgcgccctggccggacatcaatgaagccgtcgcaggccacaatcaggcgccggtcgcggatacgatcgaggcgatccaagagcgcatcgatgatctcgcccgcgaggccgagcgcatgatgaaggccggcggcgcgaccgagcaggccatcgccgatcaggcgtccgatctggcgaacaccttcggcgagctgcagaacaagatcgtcgacctccacaagaaggagaaggcgccgcatctcgaagccggccgcgccgtcgacaagaagtggttcggcctgcgcgatcgtgccgaggagttgaagaagcgcctcaaggctgtcgtcgtcacgccatggctgacgcagaaggccaaggaggcggaagccgcaaaggtcgctgcggtcacgtcgggcaagtccgtcgatgaagcgccccaggtgcgcgtcacctccggctcgtcgaagcgctcgaccggcctgcgcacctattacttcgcggagatcacggacaaggccgcgctcctcgaaagcctcaaggatcacccgcgcctcgtcgcgctcctgcaggagatcgccgacgacgccgcaaagaagcaggtcgctttgccgggctgcgtcgtgaagtctgaaaagagggcagcctaacatgaaccagatggtcgcagtcgaacagccgcaggcgcagcaaccgcgcctgccgacgctcgtcgcgggcgctccaatccgcccgatcgtgccgcaggatttcgagggcgcgtggcgcattgcctccgccgtgtgccgcgccggcatggcgccgaaggggctcgacgctccggagaaggcaatggtggcgatcatgcacggcctcgaggtcggcctgacgccgatgaacgccctgcagtccatcgcggtggtgaacggccgccccacggtttggggagacggcgccattgcgctcgcgcgcggctctggcctgctcgaatggatggaggagaagttcgagggcgaggagggtaccgacgccttcaaggcggtgtgcacggtcaagcgcaagggcgagccgaagcccgtgcacggcgagttctcgatcggcgatgccaaggtctccggcctttggacgaagcgcggccgcgacggccagccgactccctggcaacagtacccgaagcgcatgctcaagatgcgcgcccgcgcctttgcgctgcgcgacggctttgccgacgtactcaagggtctcgcgatcaaggaggaggtcgaggactatcagacggtcgcccatgtggctcgcgaggagcctccggcgccgccggccgcgcaggtcacgcatcagcccgtcacccaaccgcaggaagacccgcccgcgacgccggccgaggaactggtgacgacggccgccccggcggagaccgtggagtggtccgagcccgaggaggccgtcacggagcccgccgaggagcagccgcccgtgccgccgatgtcggccggcgcatcgccgacgttcacccacaccgacgctgccgccgatggcaagcctgttgggaccgtggagagcgactttcccggcgacaagccgcaggcatccgctcccgatggcggcatccccgagttcctgcgccgcaagccggagcagaagcaggaggagcccgtcacggagccggccgagccggattggctcgccgcgctcgaaaacgcactgtcaggggtcgagagcacggatgatctcgccgatgtgcaggccaagtaccagacgccctacaagggcaaggtgtcgaaggctgactatgcccgctcgcagacgctggtgatggaagccttccagcgcatcagcgaggctgaatagtggcccagcggctcgccaacatcgcgccagtcggctcgctcctgaagggctgccggcgcgagaccaagaccaagccggtgaagccgaagcacggccgcgtgcgcgacaacgcgcacctcgatgccatccggcagttgccgtgcatcaatccgctctgccgccgagatcctgccggcgtcgccgcccatgtccgcttcgcctgcgccgagactggcaagcccgcgacggggatgcaggtcaagcctgacgacgcttggacgctgccgctttgcccggcctgccacaccgacgctccggacgcccagcacaagggcaacgaaattgctttctaccgccgcatcggcgtcgacgctctcaaggcttgcacggcgctctacgacgcctcgccgaacgtcgagcacatgcgggcggtcgtcttcaccttccataccttcgcgatgatggagtcgagcaatggctgacaattccaagatcgagtggaccgacgcgacgtggaatccggtcacgggctgctcggtgctgacgccaggctgcaccaattgctatgcgatgaagctcgcgggcacgcggctgcgcaagcatccgtcgcgcgccggcctgacgaaagcgaccaacgccggtccggtctggaatggcaaagtgcgcttcaacgaggagtggctgacgcaacccttgtcgtggcgcaagcagcgcatggtgttcgtctgcgcgcacggtgatctcttccacgaggacgtgcccgacgcttggctcgacagagtgttcgcggtcatggcgctggcgccgcagcatacgtttcaggcgctgacgaagcgcgcgaagcggatgcgggaatactgcaaccagatcacggcgcccggacggcagtgggcacagatcgctcattttggcatgcaagcgcagtttccagaggaggcgatccgcgaagcgatggatcggctgggcaagccgttgcccaacgtctggttcggcgtctcgaccgagcgccagcaggaagccgaccagcgcattccggacctgctcgcgaccccagccgcggtgcggttcatctcggccgagccgctgctcgggccgatcaacctgacgcagatcatgcggcgtgcggccgacgacgactggacctattgcgacaatgccttgaccggcttccgagcccacaagtgcggtgggtggcaagacaccaagctggattgggtgatcgccggcggcgagagcggcgatggcgcccggccgatgcacccggattgggtgcgctcactgcgcgaccagtgcgccaaaaccggcgtgccgttcttcttcaagcagtggggtgcgtggagccagttctacgatcgcgaccgcgacgatccggactggcgcaacgtcccgcaggtcgacaaccagatgggccgcggggccacccgctggcataatctcgcgggcggcatcggctttcacggtgagcgcctggttgccatgcgcaacgtcggcaagggcgccgctgggcgtctcctcgacggcctcgagcacaacggcatgccggagcgtgcctgatggcgaccgagctgctcatccgcgtcgagggaacgcgcctggttggcgccacggccggcgacctcgagctgatcgacggactgccgcagagcaaggagtttcttgcccgcctgacgtcggccaacaagcggagcgtgctgcagaaccgcttctattggcggctcctcggcctcgtgatcgagaaccaagatcactaccgcaaggccgagcagctgcatttctggctgaagatcaagctcggctatgtggagcaggtcgagtttcacgacaacaggatggtaacgcgagttgcctcgacgtcgttcgagcgcatggatagcgaggacttcaagcggtacctcgacgctgcgatcaccgtcatctgcgaagagatcatccccgggatggaatccgcgcgcctcgtgcacgaggtcgaggagcatctcggtctttcctacaacgcgctgtggcagggggctaaggcagcatgaccttcgtcgttcagttcatcgactccggccgcgaaccgaccgtggcacccaaccccgcctatccgaacggaatggatgtcgatctgcggcctgaggacaagcggactgtcctgcacgcgaagtgctgctacggcgttccgtacccggcgccgcgctgcggtgcctacgtcgtgacgtgtgagtcctgcggcctccgcgtcgcgctcacggtcgccggtcggccggacgatccgcgcaccgtcacgctgccgtgcaagggaaattgaactgtgagccgcgggccgctgaccttcaagcagcgtgacgtcacccgcgccctcaagggcgcggttgcggctgacgaaagtgtattcatttatttcatgcgcgccggggagtttgtgaagatcgggcgatcaaagcagtggaagctccgcatgcgcgagatgcagaccggctctccttacacgatcgttccgctattggtgatcgttgccgatgctaagacggagagggagttgcatcgccggttcaaagcggaccactttcgaggcgagtggtttcacaattctccgaaattgaatgcatttatcaaagataacctattccgctgcgtagcgaaatctgctgacgacgatctgcgcggccccgtctacaatgaatgggactatgtgtgatgagcaaggccgctccattcactcaggccgctgctgagcgcgcgatacgcgcggcgaggaaactcgggctgaaggttacagggatgaccgtcgcgcccggcggcatcattcagatccataccgctgaagcaggcgagacacctccccaacccttgacaaaccggccgaggcttcgtgacgctcgggagaaactcgggtgagcacgatggggcaggacaagatcaggtacttcctctatctggaaggccggtggcgctggcgtcccaccaagacgatgaaggcgcacggcttcagcatcgtagccatgggcaaaggaggccctggcctagatgagaacggccacccagccgccagcgtcgaggataagcgccgcgcgctcgagctgaatgctgagtgggacgctgtgcgccttggcttcgaagcccccaggaagatcgaccggcccacgttcccagaaggcagcgtgggcgacgcatatgtgcgcgtgatggccctgcgcgcagcggagcgcgcccagaaggggatcgtttggacctccgagcagaagagtcgggacgattggccgcgcgcatggaagtggctcgggccggagttcggcgactgcgaccccaagacgatccagcccgagcacttcctcaggatcgacaagcgtaccggccaacctgccggcttgatggtcaagatcgaaaacacagtttccgtgaccgagcggcaccggaccatcaaggtctggcgcgctctctggcgtcggatgcaggccctaaaatacgtcggcaaggacgccgaggacccctctaaggccgtaacgaactcggcaccggacccgcgggatgctgcatggcagcgccgagaagtcatgatcctcgttcagcgagcctggcgcatgggctattacgggctggccgcctgtattgcggtcgggtgggactcgatgtgctctcccgtggatgtgcgcagcctgacgccagcccaggcccgcagcgacgccaacggggtctggttcgagctcggtcgcgccaagaccggccgggccgccgcggcaaccctatcaccgtggtccctggcgctgctgacggcatacgtgaagaagctcggggtggacatcgcgccgaacgctccgatctttaggaaccgctccggcgcgccgtattccaaggataccctgggagacgatttccgggatgtccgggaggcgatcgacaagaccgatcggcggcagctcgccgacatgcgccggtccggcgcgatcgagggcgacgccggcggcggctccgtcaccgaccaggccaacaagatggccaacagcgtcgacacgaacaagcgcctgcggaagacctacaacccggtgaatgtcgccgccgtgcggcggttcgatgaggcgcgcctgatcggcgcccgcgccctagaacaaaaaccggacgaaagtgtcagggagccggtcctcctgacacttttccgcaacgcagcgaaaaagtcggatacagcaaatgattgaaattgattgccaaaatggcgcgagagacggggctcgaacccgcgacctccggcgtgacaggccggcgctctaaccaactgagctactcccgcgtggttcgctggacgcgcgcggaacgaggggggacttaaaggggggacatggtgaagtcaaggacgttgcgcttcgccagcccgtcccggccaacacttgctctggaaaacgaaaaggccgcccgggaggcggccaatggtcagcccggaacagggtgcttcagcgaatttccgaggtcgccgcgctggtcaccaccaccggctttccggccttgattacctgggtggactgggccgtctggctgtagtcggcatgggtgcgggctgcgataccgaagccggccacgagggtacccgccaccagcgccaccaccacgatcttcaggtgggtcgcacgatcagcagagtgaattgagtggttcatctgagcctcccgacgggcttcgccgccgtctatggctcctcttctacggacgatctgtttccggatggtttcgccggttccgcaaaatggtttcatctcctgcttggcggatgtcgtgcgaccgaaacccgctgcttcaggcgctggtccgatatcagccgcatcttgcggacggttcgggcgaacagcgtgacgcggcggcccaggcggagacgaatgcgcatgctgatctcgcagcctcgcgcggatgcattggatcggttctaagagtatttctaagaagctttcaattagggaattcgcgcgcgctcacataagcgtcatcgcaagcgcatgccgtttcgggacagacggcatgacgatagatgcagctttggggtggcgcgttgaacagtcttggaatgctgcggtcggccgtgctggcgaccgcatccgcttgggtcttgatgccggaggcatcgctcgcacaatcatcggcgcagagtggcgcgcagaacctgccgtcggtgaccgtcactgctcctgaagggcggaggcgtgctgctgcgactccgcagcgccgcgcgacgcggtcgtccgtgcagaccgccgagcgaaacagaccgcggcagcagcgcgatgtcggcttcgtcgagacgccgcggggcccggtgaacggctatgtcgcaggtcgcagttcgtccggcaccaagaccaacacaccgatcatgcagacgccgcaatcggtctcggtgatcggtgccgagcagatccgcgaccagaagcccaccaagctcgacgaagtgctgcgctacacagccggcgtgcgcgccggaactttcggtgcggacacgcgcaacgattggtggctgatccgcggcttcaagtccgacgatatcgggctgttcctcgacggcatgcagctgttctatacttcctatgcgagctggcggttgccgccgtccaacatggaacgcgtcgaggtgctgcgcggtccgtccgccgtactctatggcggnnnnnnnnnnnnnnnnnnnnnnnnnnnnnnnnnncgagaccggcgtcaacaatttcggcaacgcctatatcggcttcgacttcggcgggccgatcgcaacgaagccgcaggatggaaagctgttctaccgcgtcgtcggcgaggtcaggaacggcggcacgcaagtcgacttcacgcctgacaacaactacttcatcgcgccgtcgtttacctggaagccggatgccgacacgagtttcacggtgctggcgtcggcctcaaggacggacacgcggggcatcaacttcctgccctatcagggaacagtgaccaacgcgccgttcggcaagattccgaccagcttcttcgtcggcgatcccgccgtcgacaagttcacgcgcgaacaggagatgctcggctaccagttcgagcgcaatctcaccgacgacctcacgttccgacagaatgcgcggtttgcgcacatcgacttgacgtaccgcggctacatcggaaacggctgggacaacgtcaatacggcgacgatgggccgatacaattggtatgcgaagaacaccgcgaaccaggccaatctcgacaaccagctggagtatcgcttcaacacggggccggtgcggcacacgatgctgttcggggtcgatctcaaaggttatcagatcgacgattaccagagcttcaatttcggaaccgtcccttcgatcaatgtcttcaatccggtttacggcatcaatgtcccgctcacgggcgctccgttccggaacttcctgatcacgcagaaacaggcgggcacctacctccaggaccagatgaagctcggcaatttcacgctggtgctgagcgggcgcaatgactgggtcgagaccacgcaggaagcccgggacacgggggcagcgctggccaataacaatgatagccggttcagcggccgggcaggcttgatctacaatttcgacaacggcatcgcgccctatgtctcctatgcaaccagctacaatccaatcatcggcctcaacgcccaaaaccagctgttccggccggagaccggccagcaggccgagattggtgtcaaggtcgctcccaggggatttgacggctacttcacagcttcggtgttcgacttgaagcgccagaacgtgccgaccaccgacccggtgatcaccaccctgcagaaccagaccggcgaagtgacctcgcgcggcgtcgaacttgaagccgtggccaatgcgacgagggagctaaagtttattggcgccttcacggcctatcatctcttcaccagcaaggatctcaatccggcgctggtcggcgtcttgccgaccaacacgcctcagctccttgtctcaggctgggccgactacaccttcaaggacggaccgctcgcagggttcggcttcggcggtggcgtccgctacgtcggctcgtcctgggccgacaccgcgaacacgctcgaggttcctgctgtcgtgctcggcgatctcgcgcttcattacgaatggcagaactggcgcacggcgctgaatgtgatcaacctgaccgacaaggtctatgtcgcgagctgcgcgtcggcttcgtcctgtttctacggcgaccgccggcgcgtcaccgccagcgtttcctacaagtggtgagggcaggcaagggtgcggcggcaagactctgagagctcgaccaactgatcgggcaccttggttcccgtctctggccggcaccgccggacttccgtcgggagatcgatgagctcatgggcaatgccccccggcccgaagctcatccgagcgcggcgcgagcgactgaccaagtcgccgccgcgctcgcggcccggccgggggcgcctgtcggcgcattcgccggacgagcccggcccgtcgcacggctctgctggtcgctcacagctgtggatagctgtttctcttgcggcgatatcattggccgctttggtccgcgctggtccacaagtcccggcagatgtgtcgccaaggcagcatcggacctcgcggcggtcactgccggctgaaggcgctgccgcatcaaagaacccccggcgtttggccggccagcgcgtggccggtagccgccgcggcccggtgtgccgcaatcgcagaactgctggcctgccaaaccgtgactgcccttgctgggctcagcgatctgcttcataccagccgcggggtgattccgggattttcgccgtgccgggggcggcaaagggcctaaaaagagcgtgtcttgcacccattggtgcactgcgctaaggctcagaataattccaaatcggacgaatccgtggctgtcccgaggctgcgggaaaaagggctcgtcaatgagcggcattcttcagaactatcttccactcgtcgtctttataggagtagcgggcctgattggtctggtgctgctgatcgcgcccttcatcgttgcgttccagcagccggacccggaaaaactgtcggcgtatgagtgcggtttcaacgccttcgacgatgcccgtatgaagttcgacgtccgtttttatctggtcgccatcctcttcatcatcttcgatctcgaagtggcgttcctgttcccgtgggcggtggccttcggcaagctcggcgcgaccggcttctggtccatggtcgtgttcctcgccgtgctgacggtcgggttcgcctatgaatggaagaagggagcactcgaatgggattgaaccccgtcgcatccacaggtccggtcgtcgcgccggccccaaagggcatcctggacccgtcgaccggcaagccggtcggggccaatgacccgttcttcctcgaggtcaattccgagctgtccgacaagggcttcttcgtggcagcgaccgacgacctcatcacctgggcgcgcaccggctccttgatgtggatgaccttcggtctcgcctgctgcgccgtcgagatgatgcaggtgtccatgccgcgttacgacgtcgagcgcttcggctttgccccgcgcgcctcgccgcgccagtccgacgtgatgatcgtcgcgggaaccctgaccaacaagatggcgccggcgctgcgcaaggtctatgaccagatgcccgagccgcgctacgtgatctcgatgggctcctgcgccaacggcggcggctactatcactattcctactcggtcgtgcgcggctgcgaccgcatcgtgccgatcgacatctacgtgccgggctgtccccccacggcggaagcgctgctctacggcgtgctgctgctgcagaagaagatccgccgcaccggcaccatcgaacgctaaggtcttacgtcatggacgacgccaagctcgacgccctggggcagacgatcgttagcgcgcttccgggcgccgccaccggtcactcggtggcctttaaccagctgaccgtggatatcgagaccagcaagatcgtcgaggtggtcaaataccttcgcgatgatccgaactgccgtttcgtcaacatcaccgacatcacggcggtggattaccccgatcgcgagaagcgtttcgacgtgatctaccacttcctgtcgccgaccctgaatgcgcggatccggctcaaggcgcaagccgacgagaccacgcaggtgccctcgctgatcgacgtgttccccggcgcggattggttcgagcgtgaggcctacgacctctacggcgtattcttcgtcggtcatcccgatatgcgccgcatcctcaccgattacggtttcgaggggcatccgctgcgcaaggacttcccgctcaccggcttcgtcgaggttcgctacgacgaccaggagaagcgcgtggtgtacgagcccgtccgcctcaatcaggaattccgcaagttcgatttcctctcgccgtgggaaggagcggactacccgctgcccggggatgaaaaagcggggccgaagagctgatcatgaacgagcaaccgcagaacctgcgcaacttcaccatcaacttcggcccgcagcatccggcggcacacggtgtgctgcggctcgtgctggagctcgacggtgaggtggtcgagcgcgtcgacccgcatatcggcctgcttcaccgcggcaccgagaagctgatcgagcagaagacctatcttcaggcgatcccgtacttcgaccggctcgactacgtcgcgccgatgaaccaggagcatgccttctgcctcgcggccgagaggctgctcggcatcgaggtaccgcgccgtggccagctgatccgcatgctgtattgcgagatcggccgcatcctctcgcacctgctcaacgtcaccacgcaggcgatggacgtcggcgcgctgaccccgccgctgtggggcttcgaagagcgcgagaagctgatggtattctacgagcgcgcctcgggcagccgcatgcacgcagctttcttccgcgtcggcggcgtgcatcaggacctgccgcagaagctggtcgacgacatcgaggcttggtgcgatcccttcctcaaggtggtcgacgatctcgaccggctgctcaccgccaaccgcatcttcaagcagcgcaacgtcgatatcggtgtggtctcgctcaaggaagcctgggagtggggcttctcgggcgtcatggtgcgcggctcgggcgcggcctgggacctgcgcaagtcgcagccctacgaatgctatgccgagatggatttcgacattccgatcggcaagaacggcgactgctacgaccgctatctgatccgcatggaagagatgcgccagtccgtgcgcatcatgaagcagtgcatccagaagctgaatgagcccgacgggaaaggcccggtcgtcgtcgccgacaacaaggtcgcgccgccgcgtcgtggcgagatgaagcgctcgatggaagcgctgatccatcatttcaagctctacaccgaaggcgtccacgtgccggccggcgaagtctatgccgcggtcgaggcgcccaagggcgagttcggcgtctatctcgtcgccgacggcaccaacaagccctacaagtgcaagatccgcgcgccgggctttgcgcatctccaggccatgcatcacatctgccgcggccatctgctcgccgacgtctcggcgatcctcggctcgctcgacatcgtgttcggagaggtcgatcggtgatggcgcaggcgccaatccagtttgaccgcgcctcgggggccctggaaggggccaacctgtgggagcggacggctgccttggcgctggtgacgggatcgaagatctcctctcacttctcgcacatgggctacatcgcttgtgcgaatttgctgcgcaggacgctgcccgagcgcaacatcgcgatcaggctcaatcccgacgcggtgtttgaatttccctacggtgacggatattggagcaagctgctcaaccgctcctatcactacgaggacgaactagagctgctgttcgccgactccgtcgacgtcgattacacgctgctcgattgcggtgccaattacggctactggtcggtgctggtatcgagcaagccgttcggcgcgcacaaggcgatcgcgatcgaaccgtcggggcagaattatccgaagctcgccaacaatgcgcgggtcaataatgaccgcttcgagacgatgaagtgcgccatcggctcggcccgcggcaccgcgcgcctgtcgggcaccaagcacgaggcttcagcatcgctggcgatccgtccgctggcggcgaggaggtgccggtcatcgcgctcgacgacctcatcgatgacgggaagattgcgaccagtggcaagtacctgatcaagctcgacgtcgagggcgtcgagatcgaggcgatcaagggcggcgtccggctgctgcaggccgacagcgtcatcatgtgcgaggagcacggcagcgaccgctcacatgcggtgtcgcgctacatcctggaacagaccccgctgaagctgatcgtgttcgatccgcgcagcaggcggatggaaaccgtgaccgagctgtcgatcctcgaccgcatcaaggtctcgacccacgtcggctacaacgttttcggcaccgcaagcgcgttctggcaggacaggatcgatgccctgaacgcgaaaaccgcgcgccgcatgcagtgagagattagagatgtccgttcgccgattagcaccgaaggaagtccagcccgcgagcttcgcgttcacggaggagaaccttgcattcgccaagcagcagatcgcgaaatatccggccggccgccaggcttccgccgtcatcgcgatcctctggcgggcgcaggagcagaacgagggctgggtgtcggaagccgccatccgcgtcatcgccgacatgctcgacatgccctatatccgcgtgctggaagttgcgaccttctacacgatgttccagcttgctcccgtcggcaagaaggcccatgtccaggtctgcggcaccacgccgtgccgcctgcgcggcgccgaggatctgatccacgtctgcgagaaccgtatccatcacgagcccttccatctgtccaaggacggcaatttcagctgggaagaggtggagtgcctgggtgcctgcgtgaacgcgccgatggtgctgatcggcaaggatacctacgaggatctgaccaaggaaagcttcggcaaggtgctcgacggttttgcttcgggcaatccgccgaagcccggtccgcagaatggccgccagttctcggcaccgatcaccggaccgaccacgctgaaggagaccacctgatgcgtgctctctcgtcgccttcaatgcaggggagcggtgccatgaagaagtggggatttgtcgcgatgcacgccgtcgtggcggccacgttcatgttcctgctgcagcgcttcttcatgaacgcatcgcaggagaccagtctgctctgggcgctgttcttcgccgtctgcgccgccggacttgcctacaagcagtccattcgttgatcggaaagcactgatatgctcgaggacaaggaccgcatcttcaagaacctctacggcctccacgattgggggctcgagggcgcgcggcgccgcggcgcctgggacggcaccaagaacatcatcgacaagggccgcgactggatcatcaacgagatgaaggcctcagggctccgcggccgcggcggcgccggcttcccgactggtctgaaatggtccttcatgccgaaggagtccaccgacggtcgtcccagctatctcgtcgtcaacgccgacgagtccgagcccggcacctgcaaggaccgcgagatcttgcggcacgatccgcatctgctggtcgagggctgcctgatcgccagcttcgcgatgaatgcgcatgcctgctacatctatgttctcggcgagttcatccgcgagcgcgagcgccttcaggccgcgattgaccaggcctatgaggccaagctgatcggcaaggacaacgtcaacggctggccgttcgacctctacgtcgcccacggcgccggcgcctatatctgcggcgaggagaccgcactgctcgaaagcctcgaaggcaagaagggccagccgcgcctcaagccgccgttcccggccaatgtcggcctgttcggctgcccgaccacggtcaacaacgtcgagtcgattgcggttgcccctgacatcctgcgtcgtggcgcggcttggttcgccggcatcggccgtccgaacaatgtcggcaccaagctgttctgcatctccggccatgtcgagcgtccgtgcaacgtcgaagaagccatgggcattccgttccgcgagctggtcgagaagcattgcggcggcatccgcggcggctgggacaacctcaaggcggtgatccccggcggctcgtcggtgcgcatggtgccggccgagcagatcatcgacacgccgatggatttcgactccttgagcaagctgcgctcgggcctcggcaccgcggccgtgatcgtgatggacaagtccaccgacctgatccgcgccatcgcccgcatctcctatttctacaagcacgagagctgcggccagtgcacgccttgccgcgaaggcaccggctggatgtggcgcgtcctcacccgcatggccgaaggccgcgcccacaagcgcgagatcgacatgctgctcgaggtgaccaagcagatcgaaggccacacgatctgtgcgctgggcgatgcggcggcctggccgatccagggcctgatcacgcatttccgccacgagatcgaagcgcgcatcgaccagtattcgcacagggccgatgtcgacgatatcggcgtccgcgatcccgtgaacatggtcgcggcggagtaagagacatgaccaagctcatcatcgacggcaaagaaatcgatgtccctgccgaatacacgttgctccaggcgtgcgaggcggccggcgccgagattccgcgcttctgctatcacgagcggctgtcgatcgccggtaattgccggatgtgcctcgtcgaggtgaagggcggcccgaagccggtcgcgagctgcgcctggggcgtgcgcgactgccgtccggggccaaagggcgagccgccggagatctccacgcgttcgccgatggtgaagaaggcacgcgaaggcgtgatggaattccttctcatcaaccatccgctggactgtccgatctgcgaccagggcggcgagtgcgacctgcaggaccaggcgatgggctatggtgtcgacaccagccgcttcgcggagaacaagcgcgcggtcgaggacaaatatctcggcgcgctggtcaagacctccatgaaccgctgcatccagtgcacgcgctgcgtccgcttctcggcggaagtcgccggcgcccccgagatgggtgcgatcggccgcggcgaggacatggagatcaccacctatctcgagcacgcgctgtcctcggagttgcagggcaacctcgtcgacatctgcccggtcggcgcgctgacctcgaagccttatgcatttgcggcgcgcccgtgggagctcggcaagacccagtcgatcgacgtcatggacggcctgggatcagcgatccgcgtcgacacccgtggccgcgaggtgatgcgcatcctgccgcgtatcaacgaggccgtgaacgaggagtggatctccgacaagacccgtcacgtcgtcgacggcctgcgcacccagcgcctcgacaggccctatatccgcgaggccggcaagctgcgcgcggcgacctggcccgaagctttcgccgcaatcgccgccaaggcggcgcgcaccgacggcaagcgcatcggtgccatcgccggcgacctcgccggcgtcgaggagatgttcgcgctgaaggatctgctcgccaaatacggctcgggcaatttggcggtgcagggcggcgatgccttcgatcccgcgctcggccgcggctcctacatcttcaatccgacactagcaggcgtcgagcaggccgatgcgctgctcatcatcggcgccaatccgcggaaagaggcggcggtgttcaacgcccgcatccgcaagcgttggcgcaccggcggcttcaaggtcggcgtgatcggcgccaggcccaacctgacctacgattacgatcacctgggcgcgggcaccgatacgctgggtgagctcgcggccggcaagcactctttcatggacgtgctgaagaacgccaagaatccgatcatcatggtcggcgcgggcgcggctgcccgccacgatggcgccgccattctcgccgccgctgccaagctcgcgctcgacgtcggcgcggtcaaggacggctggaacggctttggcgtgctgcatgagaccgcctcacgcgtcggcgcgctcgacatcggctttgctgcgaccggcggcgggttgaacgccgcgcagatgacgacgttcggcacgctggatctcttgttcctgctcggggccgatgagatcaaggcgccggacggcaccttcgtcgtctatatcggcacccacggcgatcgcggcgcgcatcgcgccgacgtgatcctgccggccgcggcctacaccgagaagtccgctatctacgtcaatacggagggccgcgtgcagatgaccggccgcgccgcgttcccgccgggcgaagcccgcgaggactgggcgatcatccgcgcgctgtccgaggcgctcggcaggaagctcggctacgactcgctcgctcagctgcgccaggcgctcttcaaggcggtgccgcatctgatccgtctcgaccagatcgaggccggctccgccgaccagatcaagaagctggcggggaagggcggcacgccggagaaggcgccgttcaagcccctgatcgaggacttctacctgaccaatccagtcgcgcgtgcatccgccgtcatggcggagtgctcgcgcctcgcctccgggcacatgctgaccgcagcggagtgagcgtgatctgatggaatttttcgaaagcgcattctggaccgggttcctctggccgctgatcatcatggtcgcgcagagcgtcctggtgctcgtcgtccttttggtcgcgatcgcctacatcctgcttgccgaccgcaagatctgggcggcggtgcagatccgccgcggcccgaacgtggtcggtccctggggcctgctgcagtccttcgcggacctgctcaaattcgtgctgaaggagccgatcatcccggcgggggccaacaagggcgtgttcctgctggcgccgctggtgtcgtgcgtgctcgcgctggccgcctgggcggtgatcccgaccaatctcggctgggtgatcgccgacatcaatgtcggcatcctcttcatcttcgcgatctcgtcgctgtcgatctacggcatcatcatggccggctggtcgtcgaactcgaaatacccgttcctggccgcgctgcgctcggcggcgcagatggtgtcctacgaggtctcgatcggcttcgtcatcatcaccgtgctgctctgcgccggcacgctgaacctcaccgccgtggtcgaggcccagcacacccgtggccttgccagcctgatcgggctgccgcagttgacgatcctgaactggtacgtctggccgctgtttccgatgttcgtggtgttctacgtctcggcgctggcggaaaccaaccgtccgcccttcgacctcgtcgaagcggaatccgaactcgtcgccggcttcatggtcgaatacggctcgactccctacctgctgttcatgctcggcgagtatgtcgcgatcgtcacgatgtgcgcgatggccaccatcttgttcctcggcggctggctgccgccggtggacctgccgcccttcaactgggtgccggggattatctggttctcgctgaagctgttcttcatgttcttcctgttcgcgatggcgaaggcgatcgtgccccgctaccgctacgatcaactgatgcgcctcggctggaaggtgttcctgccgctgtcgctcgcgatggtgatcgtggtggccggcgtgctgcaattcgccggcatcgcgccgaagtgagggccgtcatgggtatcaatatcaacgccactgcacgctcgctcctgctgtcggaattcgtctcggcgtttttcctcgccatgcgctacttcttccagccgaagccgacgctgaactatccgttcgagaagggcccgatctcgccgcgcttccgcggcgagcacgcgctgcgccgctatccgaacggcgaagagcgctgcatcgcctgcaagctgtgcgaagcagtgtgcccggcgcaggccattaccatcgaggccggcccgcgccgcaacgacggcacccgccgcaccgtgcgctacgacatcgacatggtgaagtgcatctattgcggcctctgccaggaggcctgcccggtcgatgccatcgtcgagggcccgaatttcgagttcgcgaccgagacccgcgaggagctctattatgacaaggccaagctgctcgccaacggcgaccgctgggaacgcgagatcgcgaaagcgatcgagctcgacgcgccgtaccggtgaggtgggggcatgatccttcccgcgctgttcttctatctcttcgccggcgtctgcgtcgcctcggcggtgatggtgattgtctcgcgcaatcccgtgcactccgtgctgtacctgatcctggccttcgtcaacgcctccggcctgttcgtgctgatgggcgccgagttcctcggcatgatgctgatcgtcgtctatgtcggcgcggtcgccgtgttgttcctgttcgtgatcatgatgctcgacgtcgacttcctccagctgcgcgaaggattcatcgagtacctgccggtcggcctcgtgatcggcggcatcttcctgttcgaactgctgctcactgtcggattctgggtcatcaatcccggcgtctccaagaccatcacggcggcgatcccggccgatgtcagcaacaccgaggcgctcggcctcgtgctctatacgaagtacatccactacttccagctctcgggcatggtgctgctggttgccatgatcggcgccatcgtgctgacgctgcgccacaaggccagcgtgaagcggcaggacatcaacgttcagaacgcgcgcacgcccgaaatggcgatggcgatgcgcaaggtggcgccggggcaggggctctcggacgccgatgcggcggagtgggtgaaatgacgatcgggctcggacactacctggcggtcggcgcgatcctgttcacgctcggcattctcggcatcttcctgaaccgcaagaacatcatcgtcatcttgatgtcgatcgagctgatcctgctcgcggtcaacatcaacctcgtggcgttctcgaccttcctcggcgacattgtcggccaggtcttcgcgctgttggtgctcaccgtcgcggcggcggaagccgcgatcggtctcgccatcctggtggtctatttccgcaaccgcggttcgatcgcggttgaggacgtcaatctgatgaagggctgagctctcaaatggttcaggcaatcgttttcctgcctctgctgggcgccattctggccggcctgatcgcgctgttcggggcgcatgcccgcaacccctcgggcgacgaggtcgagcatcacggcgaccacgggcatgcgcctgcccatgcatccgatacgatcaatcaggacgcctcggtcatccacgagacccatcacgagcccggcgacgggcatgacgatcacggtcatggcccggccgagccgcccgcggcgggctcgcgcggcgccgagctgatcacaacgaccctgctgttcgtctcggccgcgctatcctggatgacgctggtcgatgtgggcttcatgcaccacgactacaggatccagctgctgccctggatcttctccggcgacctccaggtctggtggacgctccgcgtcgacacgctcaccgccgtgatgctggtggtggtcacgaccgtgtcctcgctcgtgcacctctattccattggctacatggacgaggacccgaaccggcctcgcttcttcggctatctctcgctgttcaccttcgccatgctgatgctggtgacggcggacaacctcgtgcagctgttcttcggctgggaaggcgtgggtctggccagctacctgctgatcggcttctggtaccagaagccgtcggcgaacgccgccgcgatcaaggccttcgtggtcaaccgcgtcggcgatttcggcttcgcgctcggcatcttcgcggtctttatgcttgtcggctcgaccgatttcgagacgatcttcaatgccgcccccggcctcaccggcaagaccatcaacttcctgggctggcatgccgatgcgctgaccctgacctgcctgctgctgttcatgggcgcgatgggcaagtccgcgcagttcctgctgcacacctggttgccggacgcgatggagggtccgaccccggtgtcggcgctgatccacgccgcgaccatggtcaccgccggcgtcttcatggtggcgcgcctgtcgccgctgttcgagctcgcgccgaacgcgcaggccgtcgtgatgttcttcggcgccaccacggcgttcttcgcggcgaccatcggcctcgtccagaacgacatcaagcgcatcgtcgcctactcgacctgctcgcaactcggctacatgttcgtggcgatgggggcaggggcctattcggtcggcatgttccacctgttcacgcacgccttcttcaaggcgctgctgttcctgggctccggctcggtgatctacgcgatgcaccacgagcaggacatccgcaacatgggcggcctctggaagaagatcccctacacctatgcggtgatggtggtcggcaccctggcgctgaccggcttcccgctcacagccggctatttctccaaggacgcgatcatcgaggcggcctatgcctcgcacaatccgttcgcggtgtacggcttcctcatgacgatcgtcgccgccggcctgacctcgttctactcctggcgcctgatcttcaagaccttccacggcgagccgcatgacgagcatcactacgaggccgcgcacgaggctccgctctggatgctgatcccgctcggcgtgctcgcggtcggctcgttcgtcgcagggctgccgttcaaggagctgttcgccggtcacggcatcgaggagttcttccgcgagtccttgaagatgaacccgcacatcatcgaggagatgcaccacatcccgcagaccatcgccttcctgccgacggtcatgatggtgctgggcttcctcgtctcgtacctgttctacatccgccgtccctacctgccggtcgagctcgcgaacacgcagccgatgctgtaccagttcctgctcaacaaatggtacttcgacgagctctacgacatcatcttcgtccgtccggcgaagtggctcggataccagctctggaagaaaggcgacggcttcatcatcgacggcctcggccccgacggcgtctcggcgcgcgtgcttgatgtcacccgcaacgtcgtcaagatccagaccggctatctctatcactacgcattcgccatgctgatcggcgccgccgggctgatcacctggttcatgttcggctttggaggccagtaaatgacaacctggcccatcctttcggtcacgacgttcctgccgctggtcggcgcgctgatcgtctatctcagccgcggcgatgacgaggcagccaagcgcaattcgcgctggatcgcgctctggaccacgctgatcaccttcgcggtgtcggtgatcctggtcatgcgcttcgatcccgccaacccggacttccagttcgtcgagaaggcgaactggctcgccaccggcatcacctaccacatgggcgtcgacggcatctcgctgccgctggtgatcctgaccaccgcagtgatgccgttctgcatcatcgcgagctggaaggcgatcaccaaccgcgtccgcgaatacatgatggcgttcctgatcctggaaacgctgatgatcggcaccttctcggcgctcgacctcgtgctgttctacctgttcttcgagggcggcctgatcccgatgttcctcatcatcggcgtctggggcggtccgcgccgggtctacgcgtcgttcaagttcttcctctacacgctgctcggatcggtcctgatgctgctcgccatcatggcgctgtactggaacggcggcaccaccgatatcccgaccctgatgcacaccgccgtgccgcgcggtttgcaaacctgggcgtggctcgcgttcttcgcctcgtttgcggtgaagatgccgatgtggccggtgcacacctggctgcccgacgcgcacgtcgaagcgccgaccgcgggctccgtggtcctggccgcgatcctcctgaagatgggcggctacggcttcctgcgcttctcgctgccgatgttccccctggcctcgcacgacttcgcgccgctggtgttcacgctgtcggccatcgccatcatctacacctcgctggtggccctgatgcaggaggacatgaagaagctgatcgcttactcgtccgtggcgcatatgggcttcgtcaccatgggcatcttcgccggcaccatgcagggtgtcgccggcggcgtcttccagatgatctcgcacggcatcgtctccggcgcgctgttcctctgcgtcggcgttgtctacgaccgcctgcatacccgcgagatcgcggcctatggcggcctcgtcaaccggatgccgctctatgccctgaccttcatggttttcaccatggccaatgtcggtctgcccggcacgagcggattcgtcggcgagttcatgacgctgctcggcaccttcaaggtctcgatcccgaccgcgttcttcgccagcttcggcgtgatcctgtcggcggcctatgcgctgtggctctaccgcaaggtcgtgttcggcgcgttggtcaagccgtcgttggcgaacatgaaggatctcaccttccgggagtgcctgacgctgttcccgatgatcgcgctgacgatcctgtttggcgtctacccgaagccggtgctcgacatgtcggccgcctcggtccagcaactcgtcaacaactacaactccgccgtgacggccgtgaaggccgccgcactgctccagtaaacgggcaggtcaggatatcgccatgaactttgtgattgcaggttatcaactggcgccggtgctgcccgagctcgtgctcgcggtcggcgcgatggcgcttctgatgctcggagcctttcgcgggcaggggtcgaccagcaccgtcacctctctggcggtggtgctcctgatcgtggtcggcgcgctcgtctacatgcagcccgcgggcaagcaggtcacattcggcggcagcttcatcgtcgacgacttcgcccgcttcatgaagatcctggccctgatcggctcggcggtgacgctggtgctgtcgaccgagttcctgtccgacccctcgcgccgcatcttcgaatatgccatcctggtgctgctctcgacgctcggcatgatggtgctgatctcggccggcgacctgatctcgctctatctcggcctcgaactgatgtcgctcgcgctctacgtcgtggcggcctcgaaccgtgacaatgccaagtcgaccgaagccggcctgaagtatttcgtgctcggcgcgctgtcttcgggcatgctgctctacggagcctcgctggtctatggcttcaccggcacggtcagcttcaccgggattgccgcggccgcgacggtctcgaatgtcggcctggtgttcggcctcgtcttcctgctcgtcggcctctgcttcaaggtctcggccgtgccgttccacatgtggacgccggacgtctatgagggcgcgccgaccccggtcaccgcctttttcgcgtccgcgccgaaggtggccgcgctcgccgtcttcacccgcgtcacgctgaccgcattcccaggcatcgtctcgcaatggcagcagatcctggtgttcgtctcgatcgcctcgatggcgctcggctccttcgccgcgatcggccagaccaacatcaagcgcctgatggcgtactcctcgatcggccacatgggctttgccctcgtcggcctcgcctccggcacggtcgagggcgcgcagggcgtgctgatgtacatcgtgatctatgtcgcgatgacgctcggctcgttcgccatcatcctcgccatgaagcgcaacggccaagccgtggagcagatcaccgatttcgccggcctgtcgcggaccaatccgctgctcgccttcatgttcgcgatgctgctgttctcgctcgccggcattccgccgctcgccggcttcttcgccaaatggtacgtcttcgtcgcggccatcaaggcgaacctgttcacgctcgccgtcatcggcgtgctgaccagcgtggtgggtgcttactactacctcgccatcgtcaagacgatgtacttcgacgagccggccggccaggtcgatccggtgcgcatcgaggtgcggacggtgctggcggtcgcgggcctgttcaacctgctgttcgcgttgtttgcgggtcccgtggtgagcgtcgcctcggccgcggcaaagtcgctgttctaggatggctttcgcgctcggtcctcgcgcattgtccgcgggctacaagctcgcggcgttcgatcggaccggctcgaccaataccgaggcgatcgagcgcgcccgcgccggcgaacgcggcccgatgtggttcgtgacatctgagcagaccgccggccgcggccgccgccagcgcgcctggatcgcgccgaggggcaatctcgcagccagcgtcctcgaagtcctggacattgcgcctgcggtcgccgccacgatcggttttgcggcgggtctggcgcaagaggcggcgctggaaaaggtgagcctcgaggccgcattgcggttcggtcctgacaggccccgctacgtcctgaaatggccgaatgatgtgctcgccggcggcaagaagctggtcggcattggcctcgaggccgaggcggtcgggagcggcctcgctgtcgtcgtcggcatcggtaccaacgtggttgccgctcccgagggcacgccgaccccggcggtgtcgctggccgcgctcggcgtgcagatcagcgccgaggagctgttttcggccctctcggatgcctgggtcgagttccgcggcatctgggacaatggccgcggcttcgccgagatccgcaagctctggctggagcgcgctgccggcctcggtgagaaggtctcgatccacacgggaaccatgacgctggaaggcgtttttgacactatcgacgacaccggctgcctgatcgttcgcacccccgaaggccgccttgtgccggtggctgcgggcgaggtgttcttcggtcccgttgcctccgtgggagctgcgtgatggcaaggccggaagaattggtgtttgcgccgctcggcggcgtcggcgagatcggcatgaacctgtcgatctacggcctgggcaaccgtcaccagcgcgcctggctcgcggtcgatctcggcgtgtccttcggcgacgaggagcatctgccgggcatcgatctgatcatgccggacatcgccttcctggagaaggagcgcaagaacttgatgggtctggtgttgacccatgcccatgaggaccatttcggcgccatcatcgacctctggcccaagctgaaatgcccgatctacgccaccaagttcagcgctgcgctgttcgaggccaaatgcgctgccgagcgcaacgcgcccgagatcccggtcaccgtggtgccatcaggcggtcgcgtcgatgtcggcccgttcaacgtcgagttcattcccgtcgcgcattcgattcccgaagcgcatgcactggcgatccacaccgatgccggcatcgtgttgcacaccggcgactggaagatcgaccccaccccgaccctggggcccccgacggacgagaagcggctgcgcgaactgggcgagcagggtgtgctcgccctgatcggcgattccaccaatgccgtgcgcgacggccgctcgccatcggaagccgacgtcgcccggaccatcatcgagctcgtgaagacggccaaggggcgggtcgcggtgacgaccttcgcctccaacgtcgcccgcatcaaggccgtggccgacgctgcgaaagctgccgaccgcgaggtcgtcgtggtcgggcgcgccatggagcgtgtggtgcaggtcgcgcgcgagaccggctatctcgagaacgtgcagaatttccgctcgcccgaggtctacggccatcttccgcaggacaaggtgctggcgctgtgcaccggcagccagggcgagccgcgcgcggcgctggcccgcatcgccaacgacgaccatcccgagatcacgctcaaccgcggcgacagcgtcatcttttcctcgcgcaccattccgggcaacgagaaggccgtcagctcgatcgtcaacaatctggtgctccagggcgtcgagatcatcaccgaccgcgacgccctggtccacgtctccggccatccccgccgcgaggaattgcgcgacctgatttcctgggtgaagccgcagctcctgattccggtccatggcgaggccctgcacctgcacgagcacgcaaagctggcgcgcgccgccggcgtgccgcgcgtgctggtgtgccgcaacggcgacctcgtcaagctcggtcccggtgatcccggcatcgtcggcgaggtgccttccggccgtctctacaaggatggcacgattttggaggactccaagtcccgcgccgtggtcgagcggcgccgcatggctttttccggctgcgccttcgtcgccatcgccatgaccgggcagggcgagctggccgacgagcccgaagtcgatctggtcggcatccccgagaagaacaggtcgggcgagactttcgacgacctcgtctttgacgccgtgatgtccacgatcgaggggctgccaagggcgcgacggcgggatccggatgctctggccgagtcggtgcgacgtgcggtccgggccgtgatcaacgaacattggggcaagaagcccccctgtctggtacatgtactgacagtgtaaggggagggagacaagatgctgggccggctcaaccatgtcgcgatcgcaaccagggatgccgtcaaggctgcgaagatctatggcgcggcgttcggggccgagatttcggaggccgtcccgctgcccgagcacggcgtcaccaccgtgttcgcgaccttgcccaacaccaagatcgagttcatcgagccgcttggtgagtcctcgccgatcgcgaagttcctcgagcgcaatgcggacggtggcatccaccatgtctgctacgaggtcgtggacatcatcgcatcgcgtgacaccttggtgaaggagggcgcgcgggtgctcggcgacggcgtgccgaagatcggcgcccacggcaagccggtgctgttcctgcacccgaaggacttttccggcgcgctggtcgagatcgagcaggcgtaaggccgccccatggccatccagatctccaccgcgctcgcgatctacttcgtcatctggtgggtcgcgctgttcgtaacgctgccgttcggcgtgcgcagccagcacgaagatggcgtcggcgcacccgggaccgatcctggcgcgccgatcctgacgcggatgggccgcaagctgatttggaccacgatcatctcggcgatcatctacggggtcggcgtcgcggcctatcatgccggctacctctcgatcgagcgcctgtcgaaattgatgggaatgccgttctagtgtcacctctccccgtcggggagaggtggagtagctcggcgatagactttgcttgatcgcgttactcgcctagaattttgcgattagtttgttcggggaaaccaatgacttttcagcgtatcgtggtcgcgcttctggtcctgatcgtcgccggacttggtgccgtcggctatttcgaatggaaaatggccgtgcaggttcgcaccctgaaggccttcgtcgagggctacgtcttcaacgaggccgtgatggcctgcgagcaggcgaagagttcgacgccgttcaaatggaacggcggcaagagcacctcggtgatcggcctgaattcggtcaagaccgacaaatacagcgtctacgccagctacacgctggtggcggacagcgtgtattgtgattacgatcccatcaagagaaaggccgacatcggttccagcttcctggagcgggaaaccttctagcttcggccgaagcgctggagctcctggatggcatcggaagccgcagcggatatcatcgatctctaccagcgcaaggccttggactggatcgagagtcgcgcccaaagcagtctgttcgaacgagcttggcttgaccgttttcgtgcgctgctgccgcctgccggctcagttctcgatctcggctgcggctcggcggagccgctggcggagtatctgatcgggcttgatcatcccgtcacgggagtcctcttcggccatgattgatgcgtcccgacggcgtttccccgagcaggaatggatcgtcgcagacatgcgccagcttgcgatgggccggaatttttgcggcatccttgcctgggatagcttctttcacctctgtttcgacgaccagcgccgcatgtttccgatcttccgcgaccatgcaaggcctgaggcggcgctgatgttcacgagcggtccggcccggggcgaggcgatcggcgcgctcggcggcgagccgctctatcatgccagcttggatcccgccgagtatcgatcgctgctcgaccgcaacggattccgcacggtgtcgtacgtgatagaagaccccgattgcggcggtcacaccatctggctggcgcagcgcatttgagaggcgcggcaagttcgcgacagcagcggcatcgcagcgacgcgagctgtccggcaggcattccgctgagagcgggcctgccagcagctcgcgccagtcctagatcgctcgacgttgccgcccggcgaagagaccgtagacaaacagcacgatgatggcgccgaccaccgcaccgatcagaccggccccttcgcctggacgataccagcccagcgcttgcccgaggtaggaggcaacgaacgcgccgacgatgccgaggatggtcgtcaggatgaagccggaaggttcattgtcgcccggcatgatgaacttggcgatcacaccggcgagaaagccaatgatgatggtccaaagaatactcatgtgtagacctcttctgagttgagccgctgcttctatgcctcgggcagacgcccgtcaggcgtgtatttgtcgattgcggaaggaagctcgcgggacagccgtgcgacgatatcgtcctgagaaagcccggtctgttgtgcaagcttctccaggacgtcgctgccgacggcttctttgagctgctgggaggaaatgtccttgttaggcccgggcttcacccatgaatcggcgacctcgccctgcccattttggttgaaccgctccaggagctcgccaatcccgccgttgaggaggccgccgattccgcccgctccgagcatgccgccgagattgccgagcattcctccgagcggctgctgaccgcctgcggacgagccgccaccccctgcgcccttcatcagctcagccagtttgtcgcggttctgatatcctgcaatggccagcatggccaaaagggcagtcatggagggcattccgcggcgcatctggcaactccttcgaaaggtcagacacgcaaaactgtctcggcccgcttgtgttcctttagatcggcccgctcgcgaccaagcgtcccagcgcgtctagctcgctgaccccacgatggtcgctgcatggagccgttgctgggccgatccgcggacggtgtggtgtggtggctgctcttggagtgcgcccagcgacaggcgggtggcagaccgcgtcgattgcgattacgatccggtcaaaagaatggccgggatcggctcgagcttcccagcgtcgggagtaacgatccggtccataggtgggatgggatcgtcatgaccggggaccgggcaggggattatcggattctacatgaagccgacctgcgggattatctcgcggggattttggagctcaaggcgctgctcggcggcgatccgtcctcctgggagatcacggaggtcggcgacggcaatctcaacctcgtctttatcgtcaagggggcgcgcgccggtatcgccgtgaagcaggcactgccttatgtccggctggtcggcgaaagctggcccttgccgctgtcgcgggcccattacgaatatctcgctctgtcccggcaggccgagctcgcgcccggtctcgtgccgtcgctgctgcatcacaacgaacccttggccctgaccgtgatggagttgctcgagccgcacatcatcatgcgcaaggggctggttgcggcgacgcaatatccgcggttcgtggacgacatcaccaccttcatggcgcagaccttgttcttcacgtccgacctcgcgctgtccgcagccgagaagaagcagggcattgctgcctttgccggcaaccacgcgctgtgcaagatcacagaggacctgatcttcaccgatccttaccgcatcgccgagcagaaccgctggactacgccctatctcgacggcttggccgctgagctgcgcgaagacatggacctgcatattgcggtctcccgcctgaagctgaagttcatggcaagccctgaagcgctgcttcatggcgacctccacaccggctccatcatggtgacggagaacgagacgagggtgatcgaccctgaatttgcgttctacggtccgatgggattcgatgtcggcgccgtgctggcgaacctgctgatggcctactttgcatcaagcggccatgagcgcgcaccgggcgatcgccgtgcgttcgagacgtggctgctggagaccgtcgagcaggtctggaatgagttcgcccgcaagttcctcgatctctggcgcgccggcgcggaaggcgatggctatcctgtctcgctcttcgcgggcgagaagggggcggcacggctggaagccgaacggcaggcctacatgcagcgcctgtttgccgacacggtcggcttcgccgcggccaaggtcatccgccgcatcttcggtctcgcccacaacatcgacttcgagctgatcgaagacccgcaggcgcgcgcgacctgcgaggcgcgggcggtgcggctggcgcgggcaatgatgatggagacgaaggcgtttccggcgatcgctgacgtcgccggcgctgcgcgaaaactgagcgactggatgccggagctgtcctgacgccctggcgcatcattgcagtccgtcgttgcgagcgtagtgaagcaatccaggctttccgcggggaagactccggatcgtttggctggaaccgcaacgggccaacgatcgccccgctctgcctcttgccttattcgagaggcacattagccgccttgacaacggccgcccatttgttgatctcggcgtgtacgaaccggctgaaattcgtgcccgccaatgtgccgggagtgactccctgcgttgcgaatttctcagcgatggtcggactggccaaaagatcgcccatgacctcgaccatccgagagtaggcagtgctaccgtccgcggcgggcatgtacatgccgaaccatgccgtcgcctcgaaattcttgacgccagcttcatcgagagtgggcacgtccggaagcgacgccgcgcgcgtcatgctggtaacggcgagcacgcgaatgttgccagccgaggcggccgggagcacggtcggcagggtgtcgaacatgatcgggatatggccgccaagcaggtcgttcatagccggcgccgctcccttgtaggggatgtgtacgatgtcgatgcctgccatttgcttgaagagttctccggacaaatgattggcgccgccgatgccggaggagccaaacgacagtttgccgggatctttcttcgccattgcgatcagttcggcgacattcttggcggggaaatccttggagaccacgagcgcattgggagccctcgcgaccagcgccaccggcgagaatgcgctttgcgtgtcatacggcagcttgcgaaacagactcggattaatgacgtggtgggtggcggcgatgagcagcacgctgccgtcagccggtgattttgcaaccatctcggagccgatggtaccggacgcgccagcacgattttccacgatggtcggtaccccaagcttctcaccaagctgttgtgcgatgaaacgcgcgagaatgtccgtggtgccgccggccgggaagggcacgacgattttgatctggctcggcgggaactgctgggcagatgcctcgccaagcgaattcgagagcgatagcagcgtcagcaccagagcgagccagctccttgcaacccagttcatgttttcctcccgtctagcgttcgaacgacgctcatcgttttttgttgtgccaaggcttggcagggccggacgaccggctacgaaacgtgccgatgcggtgagcgcagcggcattcgccgcccgcgcgcctcgtcaggccgcgatcgaatcagacagcggaaactcgaccatggcttcgcccgccgcgacgtgttcggctctttgattgcggaccagtacgtcgatcagcacccagcgggatttctgcgtcgtctgcttcgccttcaccacccccaccggttgaatggtgtcgcccggcttgaccggcttgagccagcgcgtctccaagcgtcgctgaatggcgccggctgggtaggcccaatcggtcagcatgcgggtgatcagcccgaaattgttcatgccgtgcatgatgatgccgccgaaattagtcttgccgaagttgttcctcatgtagtcgtcgtcgagatgcagagggttgtagtcgagcgagccatcgcagaacaggcggatcgattcacgtgacacgtcgaatttcggaccgtcgatcgtgtcgccaacggaaagagtgtcgaagctggtggtcatgccgagtttccttgtctatcgctgcaatcaggcgggacgaatggtctgtccgcggccagaacagatgacttcgccatgctgattgaagaacacgttgtcgtggacgacgaagaggcgctcgcgcttgatgaacttgtccaatgcgcgcgcatgcagggtgatcatatcgccaggccgagccggcttgttgtagctccaggactggccggcattgatggtgcccggcgttcgcatccaatcgtcgttcggcgtgcaggcgaacatcagcagaatgtgaatcgacggcggggcgattaagccgccatacggggttttcctggcgtaagcctcgtcgaagtaaagcgggtgatcttccccgaccgagcggcagtagagctggatggcttccaacgtcagcttgtacggaatcgtcttgcgaggttcgccaggcacgatctcgtcccacacctttcgcaagttggcgtctttccagaaatcggtctcgaacgtgggcgcttgcgtcatcgcatctccttccgtatgttcgcctagcgaacgaatttatctgtttatgaactactatgcgcgaagcccgtctgcttccgcaagaggaggctgcgaaaaatgccgaaggagagtgacggctatgtccgcgcgatcgaacgaggttttgccttgattgaggcgctcggtcgatcaccgggccgtcacacgctttcggaagctgcagctcatgcaggactcaaccgcgcgacggcgcgacgcatgctcagtaccctcgtcacgttgaaatattgcgaagccgacggccgttacttccgcctgcggcctcgtgcgttgggtctcggattgtcctatctcaacgcattgccgttctggggctttgctcagcgggcgctcgaagatctgcgcaacgacatcggcgagtcctgcgcgcttgccgtgctcgatgaaagcgacatcgtctacgctctcaggcttccggcgcggcgcattctgtccgccaatctgggcatcggcagccgtcttcccgcgcatctcgtgtcgctcgggcgtgtccttctggcgaaccttcccttggacgagcgagaccgctatctcgcaagcacgccccttaagtcagtcacaccgcgcacgatcacggatgccaagcgtcttgcgcatgaactgcaattgacgcgagagcgaggctacgcttgggtcgatggcgaactcgatccggccatttgcggcattgccgttccaatccgcgatcaagccggcagcgtcgttgccgcggtcagcatcaacttgatttccggcacgctcacggaggcagccgcaaagaagcgctatctcgtgcggcttcagaagaccgcccaggatattcgaacccaatcgctctcgccgtcgtgacgtttgaatgcgtgggaccggcgatctcgccgaacgcttcgatcctgcagcttagctacccccgccaggatgcatccttgtccctgttttgcccgcgcgtcaaatgtcggcgcgacggtagctcaaagtcatttcggtccgaaatcctcaatgaattcagttttgctcacaacaacgatgacccccaggcgcgcgcgattgcgaggcgcgggcagtgcgcctggcgcgggcgatgattgcgtttccaacgatcgctgacgtcgccggagctgcgcgaaactgagggactggatgccggagctgtccggctgagagttcaacgtctgccgacgtcgaccagacgaggacgaagctggcttgggcgcgggatgtcggccggcagagagcgcagccattcgcggaagctgacgatctcagggcaatcagcggcaccttcgggcgcaaccagccaatcaccgaggcccgatctcccatcgatccggtcgcagcgataaccgggatggtggctgagaccgcggccaatcaacagatcgaccttgccctcgacgagttcatgcaggccggcgggctgcagcacccgcaggccgatgtccggatgcgcgctgcgaaactccgccaaccccaggcggcgcagctcgacggcgccgtgaactcccagatgaagctgcactgcacctgccggcttcaattgcgaggtcgcctccgcgatgtggcgaaagccctcggatattccgggcaggtaagcctggcctgcggcggtgaggatgagctgcttgtgcagccgctcgaaccactgacgccgaggcgagcctccagcgccttcacctgctggcccacggcggccggggtcacgtgcagctcgtgcgcggcgagcttgaagctgagatgccgggcggcagcctcgaaggcgcgaagcgcgttgagcgggggaagggcgtaggtcatcgcaacgcagtttgacaccgatgaactgtgcccttgcaatagattttcttgcgctgaatcgcaggaatgatgctttgcgccgcggcgcttccgccggctacggtcgacccgtaatccggagaaaccctatgcccgccgctcacattgtcagccacaatcccgcaacggtccatgctcccgccggtggttacagcatggggtttgaaatcagtcagcatcgacggctgttgtttgtcagcggtcaagtgccggagacgtccgacggcagcgtgcccgaaggtttcgaagcgcaatgcgagcaggcctggcgcaacgtcatcgaggtgctcgccgctgccggcctcggcgtcaggcatctggtcaaggtcaccaccttcctgacggatctcggtcaggtcgtgcccaatcgcgttgttcgccgcaggatgctggcgggacacgaacccgcgctcacggtcatgattgcgcaaaccgtcgacagcaaatggctgctggagatcgaggcgatcgccgcagagtgaaagtcggcacggccgattgtcgcaacgagccatcatgtcaggtgttcaatggccgagatccatcccttctaccagaagcatcgggaagcaatggaggcgaccatgcgtggtcgcctcgacattgccgagccgatgttgcgcgagcgcacgcatctctccgatgtccatgagatcaggcgggaggtgatggacgaatttgggatcgtcctcacccagatgccctatgtcggcggtgcagccagccgcatgagcgatttcttcatgcgcctgaccggtttcatggccatcagccgggtgctccggcgccacggcgtgccggtgccggtgatcggtgagatcgagcgggaaacctgcgcggcacaattgctcaccgagccggaagcagagcgccttgccttgggacgtcagttcatgtcgcccgaaaaccaggtgttgctgcgcgagcaggccgcgaggagcaccacggagagccatgagaaggagtttccggacgacttcgtctacgatttcgtagagccggggccaggtgacgagtttgaattcggcatcgactacaaggcttgcggcttctgcaagctcgcaacgcgccatggcgacacggagattctgccgaacatctgtggcctcgacttcgatgcctacgccacgcgaggcattcgcctggaaaggacacggacgctggcgggcggcgccagccactgcaatttccgcttctcgcgactggcatcgatacgagaagccgaggatacgaaaggctgagagtggctccgcgtctccccacgcgacggtaaggatgccggatcgctctcctgccgccacacggggtaagccacgactgatcggagcaaccgccatgatggcaacataaccctgttttgcccgacgagtcaaagttcacttcgctaaatccgcagttctcgcgaggcgccgggcaagccattgattccatgagcccggctactgtgcatggggttgttttcgcacttttgctttggcgtccgtctattccgcggctttctccctcaagcgctgcgcgtagacattgatgatcagcgcggccagcaggatcaggccgcggatcaggatcttcaagaagctgtcgatgttgacgtggtcgaggccgttgttgagaacaccgagaacgaaaagcccgacgatggtgttgccgatgccgccgcggccgccgaacaggctggtgccgccgacgacgaccgcggcgatggagtcgagcaggtaggtgtcgaactcgttctgctgcgcgctgccgaaatgggcgacgccgagcatgccgccgatgcccgagcagaccgccgagatcaccatcaccgcgccgaggatcagcttgacgttgaggccggaatattcggcggcctcgcggttgcccccgaccatgtagacgtagcggccgaagcgcgtgtaggtcagcaccagatggccgccgagcagcatcagcgcggcgatgataaccagccaaggaatgccgccgatcgagcccgagccgagagtcgtgatcaggcttggcaccttgtacgcgatctggccgcgcaccaacagcgcggagatgccggcggcgatctgcatcatcgccaaggtcatgatgaaggagggaattccgatcacggtcagccccagcgcgttgacaaggccgagcagggcgcagagcaggatcgacagcaggatcgcaaccgcgccgggcagcggcacgttggcgatgttgacgtaggattcctgcagcgtgaagtaggccaccgcgatgccggtgacgttggcgatggcggcgatcgaaagatcgatctcggcgcagaggatcacgaaggtgaggcccacggcgatgatgccggtgatcgatacctgcgtcaggatgttgccgagattgtcgagcgtggcgaaggagggactggcgaaggcgaagaaggtgaagaggcagatcagcgtcaggaacggggcgatgttgcgcatctgcgagcgcaagaagggcgcgaggccccgcgcccgtggtcctgtcgccaaagccgtctcgctgctcatgtgcttctccgtcacgccgcctctagcaggcggtccttgctgaccggctcgttcctgaactcccgcaccaatgcgccgcgcttgagcacgaggatgcggtcggccagcgacagcaccgtttccggctcggtcgacagcacgatgatcgccagcccttttgtgcggaggtcgcggacgatgttgatgacgtcgttcttggcgccgacatccatgccgcgggtcggctcgcacagcaccaggagtttcggcggataggtcagccatttcgccagggcgaccttctgctggtttccgccagagagcatgccaagatcgagaccgaccaccggcggcctgatctgcaactgctcgacctggcgtttggcgatgtcgcgctcctgccctggcttgagcagcagggacgaaatgcggtcgagaatgctgatcgagatgttcttgtagaccggctcctggtgaaacagcatgtcgcgccgactctcgggcaccagtgctacgccagcacgccgcgccgccgccgtgctggcgaaggtcttcggcgtaccctcgacggcgagtgtgccgccgtccggcttcagcttgccgaacaggatgcgcgacagctcctgctggccgcagcccatgaaaccgtagatgccgagcacctcgccggcgcgggcctcgaaggagacatcgttgaggctgcggccgagcgacaattgctcggccttcaggatcactgcgctctcgctcggccgcggtagcatcaggtcgtcggcgtaactgtgctcgagcgcttcgccgccgcggccgatcatggcctcgatcagcgcgctcttgctggtcgcggcgctcgcagtctccgcgaccttccgtccgttgcggaacacggtcacggtgtccgacacgcgcaggatgtcctctatgaagtgcgagatgaagacgatggaggtgccttcctcgcgcagccgcttgagcgtcgcgaacagccgctcgacctcgggcggagagagggcggaggtcggctcgtccaggatcactatccgggctccggagaacagcacgcgcgcgatctcgatcagctgctgcagcccgatcggaaggtcgccgagcctggacatcggatcgacgtcgatgccgaagcgggcgagctgctcgcctgcctcacgcgccatccgccgccattgcacgaggccgaggcggttggtcggctggttgcccaggaagacgttctccgcaaccgtcaggtcgggggcaacgctgagttcctggtgcaccatggcaatgccggccgcgtgcgcatcgcgcgcggagcggaaatgtgtctcccggccgtccaccaggaagcggccggagaactcggtatgcacgccggcgatgatcttcatcagcgtgcttttccctgcgccgttttcgccgacgagaccctggatctcgccgggacagagcgcgaagtccacaccacgaagcgcttcgaccccgccgaagctcttcgtgatgccttgcagttccaggatgggctgttgtccctcaggcatgaaggttcagatcttggaggcttagatcaggaagtgatcctgcatccactgcatcccggcggcgttggccttggtgacgaccgggccatcggtgacgacgttcttcgggatgccctgtccgctcttctctccgccgaccacggccgacacgcccgcaatgatcgcgccgccatggatgcggcaggacggattgcgcacggtcgcgaacatgcggccctcgctcaccgcctggatcgccggcggcatggcatcgacgccgccgatcaggatattggtgcggccccgcgccttcatgatgttggcggccgcgagcgccatgtcgtcattgtggaagaacgccgcgtcgatctgcgggtatttggtcaggtacgtttcccagaggcgggcggtcttggagacgtcccagtcggccggctgggtgtcgagcacctcgatgcccggaaattgcttgaccaccgtgttgaagcccttggcgcggccttgcgcgccggtgtggccgagcgcgccctgcgtcatgatgatcttgcccttgccgcccatggcgttgcacagcgcctgcgtgaccgaggctcccatgaactcgttatcgggggcgaggaaggagtggacgttgatctggtcgagcggcgcgatcagcgtgtccatgtcgatcaccggcgtcccggcgtcgatcatcttctgcaccggctgggtgagggtcccgatgccgaaggcctggattgcgacgaagtcccatttctgcgaggccatgttgtcgatcgccgcgcgctgcttcactgcgtcgagctggccgtcgaaccatgtgacttcaacgttgaagagcttaccccagaactccgcggcctgcttgccttgcgcgcaccaggtggcctgaaggcccgcattggagaacgctgccttcagcggcttctcgcttcgtccgactgcggctgcaagtgcgggggttatgcccatgctgccgagcaaggcagttgcggcgccggcggtcgctgccgcctgaagaagatcgcgcctcgtcgtcgagaaatctttcgtcccggacatcgctcgctcccatgtattatctcgtcggcgcgtcattgcctgcgcgaccgatcaccgaaagtctcgcacaagagttgttggcactcaatctgcaatcagccgcgacatcgccgcagcttgtgctggttgcagcgcaaagcgccaggcgggagcagcggcgaagtcgtcgatgtcggcgagcaatgtgtcccagccttgtgcgatctcgctcgatcattcatcgccgggaagctcgcgcagcgtatcccgagcaagccagcgaaatcgaagatgtcctcgatgctcagcgcgagcatcgctccctttcaccgggatcgctgccctccgtgccgaaacgtcggctgcgcctccgggtgctcgtcgagcgggcgttgattgatagaccaggagcgggagatcggcgttcgaagctgagttcgatcggattggaattggaggaggcattcatcgtcacttcagcctcgcggacaaaaaaagagcggggccctggccccgctcgaaaattgtgtcgaccctattatccccgatcttaagatttgctcttgattgacggggcgacgctgcgttttgcgcgccaggggctcctcccgagacttggaccaccagacttcgacctcgcggccagcctgagcaagagggatgctagatcaacttttctcacttgtcatcattttcggcaacgaatgttcaaaataagagcagttgacgaaatgatcgggcttcgagtcgactaagtatatgacagatataagaaatctgtggatggcgcggggcgtttggctgcctcatgccggatcctcggcccgcagctggggaccccgaccgcagctctcgcgacatttgtcctgggccaagtgggctgcggaactggtctcgactcgcgtgccatcgcggtgtttagtcaggccacgaacaaatggttcggcggatgcgcgcacggctgcaaaagttcctacctctggtcctgctggccctggtgatgcaggtgctggcgccgattgccgcttgcctggtggcgggtcaggctgttgccgatccgctctctgccgccgtcatctgccacagcgcgagcgagcagggcggcccgaacgatcggaccagtgcgcccactgcgcatgccggcgcgtgcgccctgtgctgcctggcccaggccaacgcgacgctcgattcgcctacgcatgaagcactcgcggttcctgtccgccatgccgagcgtgtggtgtggcatccggcgcatgcgtccgccatcactgcctacgagggttcgagcgcccaagctcgcgcaccgcctcagtcttcctgacgtagcgaccaaccgaaccattggcgcgcgccgttgccgcgccggtggcgtgttcaatggaccggccgatgtgccggatgtcaggaattcaagacatgttacgcattcgtgcgatcagccgcgcgggcttgcccgtgctttgcgggctggtgtcttcgatcggtgcagacgcgcttgcccaaggcgcctcggaaccgcttcccacggtcaccgttgaggcgccgcaggcttcgcgccccaagccggcgccccggccatcgcggctgcgctcagctgcggccgggcgcgccgcgagacccgtcgcgcagaacccgaccgccagcgcgccggcccaaaatccggccatgtctgccggcgcggcgcgggagggcctcaatcaatcgcccgccggccagactgcgacgacgatcgatcggagccagttcgacaatcgccccgcgttctcggtcagcgatgtcttgcgggacagcccgggcatttcgatcaagcaggggaacggtcctcgcgatttcggcatctcaattcgggggtccaacgcgcggaacggcttcgccatccgcaatctcgtgatcttcgaagacggcttccccgtcacgcagccggatggactgtcgcggagcgacctgatcgatccccacgcctatgctgcgatcgacgtgatccgcggcccttcctcggcgctctatggcaactacgcaacaggcggtgcgctgaattttcggacacggcccggcggcacgatcgacggtgtcgaatatggcgtcgacggcggcagctacggctatctcaacaactacctggcagccggcaagaaggtcgggaatttcgagggttcgctgtttgcaagcgatgtgcgtggtgacggctatatcggcaacagctggttcaatacgcagaccgtcaacttcctcggcacgctcaaggcaacgctggacgatcgcttcacggtcaagatcatcaacaacgatctcagtgcgcggctgccgatccggcagtcgctgaaccagtactacctaaaccccttccagcaggggtgcgcgaccggcgccaccgccgcgcccggatgcggtacggtcaggctgttcaacaatggtttcaactcaaccgccggaaccgacacggaaacggccgtccaggccgggctaggccgcaacgatcgccgcaccatcgtcggcggtcgatgggagcacgattttgacaacacgctgacttggcgcaatcagttcgtcttcgacgaccggaacatcactcagccaaccgggacgacggcagcgatcggagattttccatcgtacaactacatgagtgatctcaccaagcgtggagagattttcggcctggagtcgaccgcgttcttcggcgcgttcttcaacaccctgacggcgtcgagcgacacgcggaacgtaatgcctgggggcaatgctacgctcggcaggctctcgagcaatctcctcagcgaaacgaccaattatggtgtgcgtgccagggaagagctcaggctgacgacctcgctgacggcggtcgctgccgttggttgggagacgacgctgctgaagggaacaaacacggcctatgcatactcaggtcccaccggcatcaccaccacaactctcacgtcggcggacaggcagtttcaaaatgccgcgccggagttggcgctcctctacaatctcgaaaacgagtggctgttccgcggacgggttgctacggggtacggcaccccgcaggtttcgaatctcttcgttcttccgaacggcctgtcgggcaacaacacccagcttcaggcgcagaagaatctcggctacgatctcggcttcgattggacgccgaacaatacgctcaagctcagcgcgaccggcttctacgagttcttccgcaacgagatcgtcagtcaggcgacgcctgccggctcgcccaacgcgacttacacgttcaacgcgccgcgatcggagcatcgcggcgttgagcttgccgccgactggaagttccatccggggtggcggttcatggcggcgtacacccatctcgacgaggtctacaccgagtatgtcgagagcatcaccaatggcgccgtgttcagcttcaaccgtgcaggcaacaagattcccgggatatcgcccaacgaactaacggctcgaattggctacgacgagttcgtcggaccgctgaccggcctcggaggcttcgtcgaggttcaatggaaggattccttctacatggacaacgccaatctgctgaaggcaccgggctatgaactggtcaacgtcaacgtccactacaaagccgatctggtgtccgacaccgtcagatcgctcactctgtttctcgaggtcagaaacgtgctcgaccgtacctacgtcgcttcggcgaacaacatcgcgaacacagtcacggcgacaggccttcaaaaccctgcgagcgttctcgcaaacacgacgggatccatttatgcgggctcgccgcgcacattcgttgcgggtatgaaggtggccttcagatgatccgcgctctggaagggagtggggccatgatccgaaccagtttgctcgcgctcgtggccctcggactcgcggtgggcacggcgctcgcacagatgcgtgccccgcctgcatccggagcggcgtgcgaggagccgacgctgcgctgtgccaccaaggtgacgtcggccttcggtccagacggcacgttgtggctggtctggatggcgggagggcagatctcggtcgcaagctcgcaggatacgggccgcagtttttcgccgcccacccaagtcacgacgaagcggctgaacctcgactggggaccggatgcgcgcccgaagatcgtggtcgatcgcaagggcggcatcgcgctcacgttctctatcttcagggacgaggccttcaatggtcaggtgctctacacgcgctcggctgatggcgggaagagctttgccgagcttaagcccatcaccgccaacaacgagagccagcggttcgaggcgctggcgctcgatcaggatggaacggtgctcgcggcctggctcgacaagcgcaatcgtgtctctgcgaaagaggcggggcggaagtacgagggcgcggcgctgttctttgcctcgtcacgcgatggcggtgccacctacgcggaggcccgtctcgcgcacgagggcacctgcgagtgctgccgattagggctggcgttcgcggcgccggggcggccggccgtgatcttcaggaacatcttcgaaggcggcgtgcgagatcatgcggtcatgaccttcaccgcagtctcgacaccaggcgaaatccgtcgggtcagcaacgacgattggcagatcaatgcctgcccgcaccacgggcctagcctcaccatcgggccgaacggaacctatcatgtcgcctggtacacgaacgggaagactcgtaagggattattctacgcccactcgcgtgacgaggggcgcacattctctgtgccgatcgcgctcgggcgcctggatcgcagtccgacgcgccccttcgtgctttcggccccggcgggaacggtgatggtgtggaaggagttcgatggcgaaaagacctcggtccagatgacgatctcccgcaatgacggccagacgtggtcgccgccgaaggcgatagcgagtacgagcgacacgtccgatcaccccttgctggtctccaatgacaagcagacctatctatcgtggatgacgaaggcggacggctatcggttgacagctatcgaggatcagccatgagatttcgatttgcaggcattgcgagtctgaacgttctgatcgcatccgcggctgctttcggagcttcgcccgccttgaagccattcgaacgcggcacctggcaaggcgtcatcagggggcatgccggccgtccggtactggtgcatttctggggcgtgacctgtggcccatgcaaagtcgaactgccgctgctcgggcagttcgccaaggatcatcctgacatcgacgtcgtcacggtcagcgccgatctcgtgccgaacctgccggcggcgacgcaatcgatgctcgacaaggcgggtctgtcgtccaccgaaaatttcatcttcaacgacggcttcgtcgagcgcttgcggttcgagatcgatccggcctggcagggcgacatccctcggaccatgctgatctcgcgggacgggaccatcacgacgatcgaaggctcggctgaaatcgccgatctggaaaaatggtcggcgcagcagttctccaaacactgaaatctagatctgaaaaggaaataccgaaatgaagacaatctcgaaaaacgtgctgctcgctgcgttcgctctcgcgatctccgccgcaccggcgctcgccgacgacgtgaaggccggcgatctcgtcatctcgcaggcgtggagccgtgcgactccgggcggcgcaaaggttgccggcggctatctcgttatcgagaacaaggggacggcgccggacaggctggtcagcgtctccgccgatattgcgggcaagtccgagatccacgagatggcaatggataacggcgtgatgaagatgcgagcgctcgacaagggactggtgatcgaccccggcaagaccgtgaagcttgcgcccggcggctatcacctcatgctccaggagttgaagggcccgttcaagcagggcgacaaggtgccggtgatgctgcaattcgagaaggccggcaatgttgccgtctccctcgacgtccagggcgtcggcgcgcagtcgccgggcgacgccgggcattcaggtcatatggacatgaagaaaatgccggatcattcgggaatgaagatgaagtgaggcggatctggccggccgctgcacgtgcggatcgacgggcgggtagccgatttgcagtaggccgcgctggacgacgttcttgaaccgaagccgccgtgaggttgcccacggcggcttcgagctgaacctgaagccgacggaaaaatgacaaggaatttcgcggcgttagcggcttttcctcattcccggccttgtgttttcgctcccaatccggtttcactgcaggcgatcactgattcccagagtattaccatgcggttgtcgcggttctttctgcccatcctgaaggaaaacccgaaagaggcggagatcgtctcgcatcgactgatgcttcgcgccggcatgattcggcaggaggcggccggcatctatgcctggctgccgctcggctttcgcgtgctcaagaagatcgagcagatcgtgcgtgaggagcaggaccgctccggggcgatcgaggtcttgatgccgacgctgcagctcgccgatctctggcgcgagagcggccgttatgacgcctatgggccggagatgctgcgcattgccgatcgccacaagcgcgagctgctgtatggaccgaccaacgaggaaatgatcaccgagatcttccgcgcctacgtgaagtcctacaagaacctgccgctgaatctctatcatatccaatggaaatttcgcgacgagcagcgtccgcgtttcggcgtgatgcgcggccgcgagttcctgatgaaagacgcctattcgttcgaccttaacgaggccgcggcgcgcgtcgcctacaacaagatgttcgtcgcctatttgcgcaccttcgcgcggatggggctgaaggcgattccgatgcgggccgagaccggcccgatcggcggcgatctcagccacgagttcatcgtgctggccgagaccggggaatccggcgtattcatcaaccgtgacgtgctggacctgccggtgccgggcgaggacgtcgattatgagagcgatttgacgccgatcatcaagcaatggacctcggtctatgcggcgaccgaggacgtccacgacgccgctcgcttcgagcgggaggtgccggcggacaagcgcgtcaacacccgcggcatcgaggtcggccagatcttctatttcggcacgaaatattccgagccgatgaaggcgctggtagcggggcccgacggtgttgatgtgccgatccatggcggctcctacggcgtcggcgtctcgcgcctgttaggtgccatcatcgaggcctgccatgacgatgccggcatcaaatggcccgaggccgtggcgccgttccgcgtctcgatcctcaacctcaagcagggcgacgccgcggtcgatgcggcaagcgagaagctttatgccgaactcacggccaagggggtcgacgtgctgtacgacgacaccgaccagcgcgccggcgccaagttcgccgccgccgatctgatcggcatcccctggcaaatcatgatcgggccgaagggcctcgccgacggcaaggtcgagatcaagcggcgaagtgacggctcccgcgagaccatgtcgcctgcggatgcggtcgcccgcctggtcggctgaatattgttcatcgcgcgatatcgaggccgccaatccggccacaattgaccccgaatcatgggattatcgagcgatggatgagaccatgaccgagaccgtgcaaaccgcgccttttgcgccattcgagtggatgctgtcggcgcgctatttgcgggcgcgccgcaaggagggattcatctcggttatcgccgggttctcctttctcggcatcatgctgggcgtggcgacgctgatcatcgtcatggcggtcatgaacggctttcgcaaggaactgctcgacaagatcctggggctcaacggccacatccttgtccagccgctggaatcgccgctgacggactggaaggacgtcgccgaccgcctcagtcaagtcgagggcatccggctcgctgcgcccgtagtggatggtcaggcgctggcatcatcgccctggaacgcatccggcgtcctcgtgcggggcatccgctccgacgatctcaacaatctcacctcgatcgccaagaacatcaagcagggctcgctcgaaggcttcgacgaagggcagggcgttgcgatcggccggcggctcgccgaccagctgtcgctgcatgccggcgacagcgtgacgctggtggcgccaaagggcgcggtcacgccgatgggcaccacgccgcggatcaagccgtacaagatcgcggcggtgttcgagatcggcatgtccgaatacgatcttggcttcgtgttcatgccgctcgccgaggcgcaggcctatttcaaccgcagcaacgacgtcacctcgatcgaggtgttcaccaccaatcccgaccggatcgatgccttccgcaaggccgtgacggaggcggcgggccggccgatattcctggtcgactggcgccagcgcaactcgaccttcttcaacgcgctccaggtcgagcgcaacgtcatgttcctgatcctgaccatgatcgtgctggtcgccgcgctcaacatcgtctccggcctgatcatgctggtgaaggataagggcagcgacattgcgatcctgcgcacgatgggcgcctctcagggctcgatcatgcgcatcttcctgattacgggtgcgtcgatcggtgtggtcggcacgctggtcggcttctgcgttggcctcgtgatctgtctcaacatcgaatcgatccggcaatttctttcgtggctgaccagcaccgaactgttctcgccggagctctatttcctgtcgaagctgcccgccgagatcgatgtcggcgaaaccacggccgtcgtcatcatggcgctgacgctgtcgttcctggcgacgctctatccgtcgtggcgcgccgcgcgcctcgatcccgtcgaagcgctgcggtacgagtgaggggctgatggagcagcagcagggggcggaagatgtaccggtcatttatctccacgagataaagcggcagtacttgcagggcgaggtgccgctgacgatcctcgatggcgccaagctggcgctgtgggccggccagtcggtcgcgctggtcgcgccgtcgggctcgggcaagtcgaccctgctgcatatcgccggccttctggaggcgcccgattccggcgaagtctacgtctcgggtgcgccgacctcgcagttgcccgacatcgaacgcacgcagctgcgccgcaccgacatcggattcgtctaccagtcgcaccggctgctgcctgagttctcggcgctggagaacgtgatgctgccgcagatgatccgcggcctcaggaagtccgagagcgtcaagcgcgccaaggagatccttggctatcttggcctcggcgaccgcatcacccaccgccctgccgagctgtcgggcggcgagcagcagcgcgtcgcgatcgcgcgcgcggtggccaacgcgccgcgtgtgctgtttgcggacgagccgaccggaaatctcgatcccggtaccgccgagcacgtgttccaggctctgatgcagctggtcaaggcgacgcaggtgtcgatgctgatcgcgacccacaacatggagcttgccggccgcatggaccggcgcgtctcgttgtcgaacggtcaggtggtcgagctcgactaaggtcacgcgaaaacaaccccatgcacagtagccannnnnnnnnntgcttggcggaattacctaaagaaaaccgcaacagtgctctgccgccgactgcgggctcaaggcctgatgaccgtcatttgaacgggccgggattggccgcggcgtgggcgaccgcttcattggcattgacgagatcgagctccggaattcgtcaaatggtgagaggcacgcgatattcggagaggccggtctggttgctgagccgcgcctgacgccgggaacctaagcgccgtcctacggttaccgtgtcatcggtgtgtttggtggagcgagggaagtgtccggggaagaccgatgacgacagcgaccggggtaccctcggccgaccgtaacgccgtcttagccaccctcggcgaccatattcgggagatcggtaaccccgacgatctcgcctatgccgcggctgagctgcttggccgcagcctcaacgtcagccgggcaggctacggtaccgttgatacatcagccgagaccatcacgatcgcgcgcgactggaacgctcccgggatattgagcctggccggcgtgctgcgctttcgcgactatggcagctatatcgaagacttgaagcggggcgagacggtcatctgcgccgatgcagagagggaccctcgcgtaggcgaccgcgcccgagctctcgaggcaatttcggcgcgcgccttcgtcaacatgcctatctccgagcccgacggggtcgtggcgctgctctacctcaacaatgccaagccgcgcgaatggagccccgccgagctggcgctaatccgcgaggtcgccgagcggacccgcactgccgtcgaacgccgccgtgctgagacggcagtgcgcgagaacgaggcacggctgctcttcctcgacgctctcaacaaggaaacagccaaaacccgcgatgcggatagcgtcatggcggtgacgacgagaatggtcggtgagcatctcggggtctcaaactgcgcctatgccgacatggatcctgatcaggacggcttcaccatacgcggggattgggcagctccgggtgcgatgcacatcctcgggcactacagccttgctgatttcggtaagaaggcggttcgagagctgggtgcgggcagaccgctcatcatcaacgataacctgacggagattgcgccggaggaagccgccgctttccagcgcatcgggataggctcgaccatctgcatgcccttggtgaaggaagggcgactgaccgccttgatggcgatacatcaccggggcccgtatcgctggagacagcacgaacttgccctgcttaccgaggtgacggagcggtcatgggcgcacatcgagcgggtcagatcggagcaggcggcccgcgaagctgccgaacgcctggtccttgccaacaaggcggccggcatcgggacgtgggactatgacccggtcaacgacgtcctccgatgggataaccgctgcaaggaggtattcggtctctcaccggacgccgacgtgagctacgaagggtcgttcctgaggggcattcatcccgacgacagggagcgcgcgcatcaagccgtatcagcggccctacagcctcgttctccgggaagttacaacatcgaataccgaaccatcggtatcgaggatggcatcgagcgctggatcgccgcaactggtcacgcaattttttccgacgaccaggccactcgattcatcgggaccgtgctggatatctctgcgcaaaagaaaaccgaacgtcatctcaggatactcaacgacacaggagcatcggtcgctcgcgaacgtgatctcggcaggatcgtgcagatcgtaacggacgccggcgtcgagctgaccggcgctcagttcggagctttcttctacaacgtcctcgctgcggatggcggcagctacatgctctattcgctgtccggcgtaccccgatcggctttcgagagcttcccgatgccgcgcgccaccggcgtgttcgagccgacgttcaaggggctgggcgtggtcaggtccgatgatatcctgaaggatccgcgttatggcaagaacacgccgcactacggaatgccggcgggccatcttccggttcggtcctacctggcggtccccgttatctcgcgcagcggcgaggtgctcggaggacttttcttcggccatgcggatgtcagaaaattccaggccgagcacgaggccgcactgctcggaattgccggtcatgccgcgacggctatcgataacgcgaggcttttgacccggctcgaggccctcaatgccgagttggagcaacgggtcgccgatgagatcgccgagcgtatgaaggccgaagagcaactgcggcaatcccagaagatggaagctgtcgggcaattgaccggcggcattgcccacgacttcaacaacatgctggccgtgatattgggcagcttgaaccttgccaagcggcggctcggcaagggagaggtcaacatcgatcgtttcatcgagggcgccatcgatggtgcaaaccgtgcggccacgttgacgcaaaggctgctcgcgttctcgcgtcagcaacctctcgcgcctgaggtcgtggacgtcaacaagatggttggcgggatgagtgagctgctcgagcgatcgctcggcgagctcgtccgcctcgagacggtgcttgcggtcggcctatggcgcgtcaaggccgatccggctcagctggaaagcgctctcatcaatcttgcggtcaatgcgcgggatgccatgccgaagggcggcagactgaccatagaaaccggcaacgcttcgatcgatcgaaaatatgcccgcgaatacgccctggcacccgggcagtacgttctcattgccgtgacggacaacggaacaggaattgcggccgacgtgctggggaaggtcttcgatccgttcttcacgaccaaggtcgtgggcaagggcaccggcctcggcctcagccaggtctatggtttcgtgcggcagtccggcggccatgtgaagatctactcggaaatcgatgtcggcacgacggtgaagatctatcttccgcggttcgcgggcgaggaggccatcccaactccatcacaaggcgtgacacatcccggtgcaagtctgcagagcgagaccattctcgtcgtggaagacgatgagcgcgtccgcagcatctcgtccgaaagcctgcgcgagcttggctacaccgttgtcgaggccgcgagcgccaacgaggcgatcaggaaaatcgaaagcggtttcatccccgatctgctgttcaccgatgtcgtcatgcccgacatgaccggagcggaacttgcgaccgaactgtcgaagcgacttccggaactgaaagtgctgttcaccacgggttacacgcgcaacgcgatcgttcacaacggcatgctcgacgccggcaagcatctgctgtccaagccctttgcaatcgaagacttggccgccaaggttcgtcaactgctcgacgagggctagctaataagcttcgagtcgagcgctgccgtccgcatcttacggcgacggtgcggaagaaggcttcgtgctggcggtcggctggggagcggtccaggggctcgcgggcgaatgagccgcctgttagggagccgtatgccgaagcatcgccggcaagagacttgctgggcctgccgccggcgatgcgcaggatgccctcagccggtcccacactgacggtaggcccgtcaggtctatctcgaatttcgtgttgctcgtcttgtcgtccggcatctgcgtggtttcgcggacctggagggagcgcgaagccaatatcgtgttgaccatgtcggcgtcgatgttgccgcgccacaccgcgtacttgccgaagcgaagcggagatcctccggtcaccttctcggtgtcggccgcgatcaggatcgtgcttttgccgcgagccgtctcgtcgacctcggacgcgaacgtcagcggcacgcccttgctgttctcgcaggacaggcgcaactccatcgttctgaacttggaggcgctctccttcttcgtcgtcgccatcttgcgaacgaacggccgcgcctctttctccagcgtccagttcgtctcggcaagcggtcgcgtatcgatgccgaaaccgtagagctcggatcgcgtcagcacgtgcaggctttcgaacttcactgtccggatcagagcatcgagctcgcggttgattcccatcgcggtgatgaaggcggcccggtcacgatcggccgccaatagccgccgccgtctgtattccgcgactgccgccgggtcgggccgcccgtcaaaggccagcaccagcctggaactatggaccgccactaccgcgtcgggggcgacctcgcgcgatgtcgccccgagaaacaggtagccgcaggctgaattgcacatggcacgctgagtggtgagttcggcctccacctcgccgcgcgcattcttgatcttcaggcacgcggcatccgcctgcttgcccgcggcgcaggcggtcgggatcgtccggccgatcctggcaattgctctgcggctgcgcagcagtcgcccgatcgcgtaggattgctcgacgttgccaccgggcgaatgaagatagatcggacgctgcaggtccttgacggcggcgaggaagcggcgaatgcgcgctgcagcctcccgatcgatctcgccctcgatggcgatccagcgatcgcagcccgggccgcatgcgttgggcgaacccttggcgagatagatcgtcaacctcgacgcaaggccggcttgttccgccggggccgcctgtgcacccaaggtgctgggaagcagcagcgagaccacgaggagcaggatacgggcgaacatggagggatcgactacgcgtaaggaagctcggaccgaggctatacgaggactggcgcggtcacaacttgcggtcgcccgtcgatccgcgttttattgcgtccggccggcaatcaagcgcttggagtacgcccccggcgtgcgttgccgcatgtcgctgataggcagctgtcgatcatccggcaccagcggcgcgtcccgagcggcgaggcggtgtcgacttcgacctcggaaagtatggattcacggtacaactcgccgagcgtccgacggcgagatgtctgcactgggcaagcgaatcgtagccgcagtcgaaatagccgaccggaccgtagatctgcatgcagacagggtaacgcggatcgtaggtctgagcatgcgcatgttggctggccaccagcagggcgagcgcgaaagcgaggcagacgcggtgcatctcagcgcggcagaacctagcccggcgtctgcgcgcacggacgattctgatacgcgtatgggtcgtcggtctgtccgacgaaatacgggttggcgatgcaggcgagggcgcggccggacgcgctcgcctgacactgagcgtaggtatcgaacctgcaattgctgagacccggttattcatctccggtgaggcagaatgtatggttcttgccgaatgcgcgtgcgggtgtgcttgcaatcgatgcgagtacaaatgtgacgaatgcgagcaataatgtggcgacaatggggtgtggaactcggccgcgcatttcattttctccaatcacgcgaatgtgcgcacaacgtcgtgccgcgcgcatgaggcctgtgccctgtagtccacactggaactcaggaagactcttgtttcaaagggtttccgcgcatgcgccgataaacattcgttaatgtgcagaggcctttcgaccggactgttgcgtcacggttacagcaattctgtcgatcgctgttatgacgacgtcacggcccgggggcctctaagaaactggaacgggaatcaaatgaagaagaatttgttgcttgccgctgtcagcctcgtcgcgctcagcgcggctgcgccggcgctggctgctgacctcgcggcgcggccttacaccaaagctccgccggcggcgatcgctgccgtttacgactggagcggcttctacatcggcatcaacggcggcggcggttcggctcgcacgacctgggatctggttggcgtcggtcgtgaaggttcccacgatgcgtcgggcggcacggttggtggccagatcggctatcgcatgcagtcgggtcagttcgtgttcggcgttgagggccagggcaactgggccgatttctcgggcgacaatgtcagcctgatcttccccgccaatcgtaaccggacccggatggatgcatttggtctcatcaccggtcaggtcggctatgcctggaataacgtgctcctgtacgtgaagggcggcgcggccgtcgtcagcaacaagtacgagctgtccgccgtcggcggtccgctgctcgcctcgaccagcgacacgcgctggggtggtaccgtcggcgcaggcctcgagttcggctttgcgccgaactggtcggttggtgtggagtacaatcacatcttcctggccgacaaggacgtgacctttgctggtttcgccggaaccgatcgcatccgtcaggacgtcgacatgggcctcgtccgcctgaactacaagttcggcggcccgatgattgcccgctactaaggcgaaccgcttcgcagggagcgatcgtcgaaagccccggccttgtcaggctgtgtggaaacgattggaggct

SEQ ID NO: 201 - DNA, 2054 bp, Bradyrhizobium colbertium
tcggcgctgcaccaaacttgcgtcagagccgaggctgggagtagaggcggccgcccttattccatcggtagcccttggtgtacgcgtggaatattcgtatccacccaaggtgcttaatcgtcggatgtttcggatgtgtaagggtctgcttggcgaagaacgcgttcagttcggcgacatcacggcgtagctcagcgacccttggtgtattcggtgtcggctcgggaggcttagtgagccggattagctcggaaggcatcatgaactcgaacttgaaatgttcgaggacgttggccggtgtaatgccgtgtcccgcagcaatctccaagagcctcggtgtggccctgtagcgggttagcttgcccgagcttggacctgggttgccgaactccagcctgcccggataacccggcttatgctcgatcaggccagcctcaagccacgccgtcctaacaccatcgaacatgcgccatttgacgtattggccggtgtagtcgcccttgtcgtgtgagcacatgagccagccctcgctccgatcgcgttcgacggcagcaagcagatcggcgatgaatgcgcctacggcgttcgcatagtcgaccagtgtcttgtggcgtgcgtacgccttgcccttggccgcctgcggcctcggatagcgctcggccaaatcgctggtgagcatgaaagcgcttgatgatgctggtattgcacgcagggtcgccaagggcgcgttgtcgagcgcttctcgttccttctttggcgtcttcgcttgccatgcgaggcgttcgtgcggctcccagttatctgagttctctgtcatcctgctcaaccaaccttctgccaacgacgtgagcccatgccgaccgagctatttaggtcctcggcgtgccacatgtgacgcgcgcagcggcttgacacgcgacaggtcgaggccggggtagttaatcttgtcgattgccgctttgagagccttcacgccccagcgctccagcatggcctttgcgccataccttcggctcacagacttcccgctactgcggcccgctagagcatcccgcaactcttcgtcgggtgtcgcttggcgaagcgcatcctgaaagccgtgccggaagctatggaagaccttgttggtgtccttgacgcctacatggttgcgcaggtgccgcccccaccatttcgcccagcctctcaacgctcccttctgatcaggagcaacagtggggaacaaccaagcctgctcgccatcctttcggcgctctgccacatagttgaggaagccgatgtcgataagcagaggatgtactggcaccactcgttccgatgattttgtcttcaatctgcgccccgccttgacatcacgggtgaaccacatgagcggaacggctgtttgctcatcctcccgaatgtcagagacacggagacctgcgtattcggcctgacgggctccggcgaagagtgcgagcaacggaagccatatccccgccgctcccttcgctcccaccgggagcttgtgttcggtgaacaggggagcattgaagatggtctgcaagtcgcgcgcgtcaaagggttcacgctgggactgctcctcttctagtcgcatttcattgaaagggtcagaccagggagcgtcctcaggcacaagcccgttatgccgtccccatccggcgatagcctgtaccgcgcccaactgcttattgacggtgcccggtgataccttctggattgtcgggtgtgagcgaccatagtcgctaaggtcccgcagtgatgccttcagaagtgcccccttgcgagacttcggcaccaattgcaacgcttcgcggaacgtgcgcgcgtgggagcgcttgatttccgtgatgggcagatcgccgtgcagttggatgaacatctcgatggctcgaccgtactcatgcaccgtgccctccggccgttcacgctctttcttccagccctcgaaggcttcacgtagcgtgcccccctgttcacccgtgggaagctgagagagcgcgtagaaagattgaggtgtctcaatcggctcacctacattccgcctctcgatg

SEQ ID NO: 202 - DNA, 5768 bp, Bradyrhizobium colbertium
cccggaggaatttgaagtgacccgcggggcagtccagcaattccgcgacctcgcactcaacgatagggcacacatggcgacctacgtttcggaggtcgtggaagccctgaacgaatccttggcgatcgcctacggcatcgaccgcgaactatacgcaagctacgtgcttgcacgcgatcagcccgacggtccttcgtagacacttggcttgccccggctgacctaagccgccagaagtcgctccggccgtccgcaggagctttcccagccgtctgctgcgacgggttgtccagagcgctgctgccacccaagcggctgtagactccgattgaagctgggttcggcgcgcgcgagcgccgaaatcgttcttgaaaagcgctatcaaacaatctacattgatagcatcgcagtcaatatcgggagggcgccatcatggccgctgtcaccatccgcaatctctccgaggaggcgcaccgcgccctgaaagtccgcgcggcgcaacacaatcgcagcacggaagcggaaatgcgcgccattctggaggcagccgtgcgtcccgagggccggctgcggctcggcactgccctttcggagatgagccgcaagatcggactcaccaatgccgatgtcgaggccctcgaacagggccgcgacgcgcgtcccgctgagccgatgcgcttcgaatgatcctgctcgataccaatgtggtctccgaggcgatgaagcccgatccacacccatcggtccgtgactggctcgacgcccaggcggccgagacgctgtttctctccagcgtcgccgtcgcggaactgctgttcggcatcggcgcgctgccgcgcggcaagcgcaaggacaggctggcatctgcgctcgacggcgtgttggacctgttcgcgacccgcatcctggccttcgataccgccgcggcgcggcgctatgccgacctcgccgtcaaggcgcgcgcgttgggaaaaggcttcccaacacccgatggctacatcgctgcaatcgctgccgcacacgggtgcgcagtggcatcgcgcgacacgagtgcgttcaatgctgcaggtctgacggtgattgacccctggaccgtgaccagccgatagcggccgcgacggcacaaaccgcggggaattgcaggaaaaaactccgtcaccaaccttacctttagcgagatgtttcggaaacccaccacttgattgcgagttcaacatggtgatccgaatagtcgacatttcccgcggcgacagactccaattgaacgcgaatgactcagatcgaacctgaaacgacaaacaccactgtcgtttcgcgttcgatctgagtatcggagcgagaaaatccattaatttcagtctggggattatggctccttcggagtctattctcgttcaatcggagtcaggtagccagaattagggttccattggagtcgcttggtcggtcaggcgagatcgtactgctacggcgaagaattagggcggtgatgtcgaaggatgcaggcgcgtatctagcgcgaacgcttcctgaaggtgctgctggtacgcgcctttcgccctggtcgggtcgaagatcagattccagctgtgattggacaccgcacttgggatcacgacgaatttgtgcttggccaggagcgcatccccgaacgcctgctggcctgcgcccgggattcccggtcgcagccaattggcgttcggaacgtcggcagggcgaacaatatgaacgtcagacacgtcggcgatatgaagcgcggtcaacacgtgcgggagagtgtcgagcgctttgaagcctttgtgaaccgccacttcgagtatcgcggtcgctggatcaagcgcgcaatacacaacgcgaacgcctttgctgttccaccggccgccgacctggaatgcgccttcgccactatcccaggtcgacgcaaagcgcgcctgatcgaggcgccaagcgatgagcttgccgcctcccaatggccctacagaaggcgtcatgcatagacgccgtatgcgaggcgtgtgaggtactgttcaacgagctcgatgccggccggagtggcaagcaggtcgatcggacgacgctggtcaagaccgatggccggacgctcgagccactgctcggcttcttcctgcgaaccgaacacgtcggtggccttggccaggatttcggcaaacttccaggtccgcccactttgctcctggctgagcggcttgtccggagcgtccttgcgtcgctgaaaggtgcgaaggctcattccgaaggctttttccaacgagtccgtttgaatgataaggaggtgacggacaaagtgggtcaacgcagagcctggcagtccgtccagcagcagttcgtgggcgtcgagggcgcttgtgatgcggcgcgacaagatgcgtggcccgccgagcaaatcggccaccttctgcagatcattgcccggcccctttggagccggcttctcggctgtggcagtcacagtagccctcgcgtcacgtgtcgctaaatatacgtcacatgtcgcgactaatcaagcttggtcctccacgcctcaccccctgtcgtttggcattcgatctgagtccggatcggctagagctgggccgttgacattcgagtgaaaaaacgtattttacgtattatgtccatgcgtctattttcttctttggacctccagcagcagtccggtgaaatccagcgagctgctgctcaagcgccggtcgttatcaccagccacggtaagccgcgcgctgtaatgatgtcggtcgaggaattccgcagattgaagaccctggctcgcgaagaaatcccgctcgaagcgattgcacggcagccgacagtgttcggccacgaacccgacgatgtgcttggctatcccgagcacgacccggtcgaggccgtccatcacatggcaaaggatgccgctgctggcatcaaccaggacctggtgcgccgagaagccgaaaggtttgcaaaacactttgttcgaggcgccaagtgaacgctcaggagttcagcgataaagatccgatattcctcatcatggatgcgtcgccgattgtgatgctgtcagcgatcgagcgcctggattggctgatggagccctgcggcacgatctggatgaccgacatggtcatggaggaagtcgcgcgcgatccggactcgggtaaggatccgcggagccgctggcttgcctacacgcgttcgtggatcgccgcgaacaaattccgcattcgccgcgtggaaaccgacacctacagaacgtaccaacttgcgttggacggctggagggctcagggctcggatcccgagaggaagcccaattcccgcgatctaggcgaagccagcattatccagacgctgaagagctttcgtggcaaggtgctgccgcggcagacaatcatcgtccttatggacgagtccgatgggcgagacgcattgaagggaacgcgccggatcaacctcgatgtgttcggtacccgcgcgttcgtcgaggcactatacgcgcactttggaatcgcggaggccgagcacgcctggcaggcaatcttgaaggtcatcaccgcggatgaatccaaggatgacgatgatccgttcatcgtacgccgagcgatataggccgaaggcgggttagagccgatcggacttccgacatttcccgcggcgacagactccgattgaagcagagagactcagatcgaacccgaaacgacaacctcctgtcgtttctcgttcaatccgagtctgcctgtcggaacagggcagacatttcaaacggcgatttccgcttccatcggagtcaatgctggtttcagcggagtcgattggccgcgattacgctttcattagggtcccttggtgcggatgcttcgtccgcggttgtgcattatagttgacaatctcggacgggttgtgtactacaatacacatgctcgaagtccgccagacagacacctttgcgagttggctccgggcgctcaaagacgcaaacgccgttgcgcggattgccgcccgcatccgccgcctcgaactgggcaacctgggcgatgtgaaaccggttggcgaaggcgtcagcgagctgcggatcgactacgggccagggtatcgtatttacttcattcagcagggcaataccgtggtgatcctgctttgcggcggcgacaagcggacccagaacaaggacatcaggaccgccaagcggatggcgaaggaggtttgatatgccacttaagacaaccaagttcgacgttcaggactatctgaagacgcctgatcagcaggcagcctatctggaagcagcgcttgatagcgacgatccttcgttcattgcagtcgctatcggagatctagctaaggctcggggagtttcaaaattctctcgcgaaactggactgagccgcgaagcgatctacaagacgtttcgcgtgggcggcaatccaacgctcgatacgctgagcaaggcgacggtcgttcttggctacaagctagctcttgtaccgagaagtcggaccgttggctcgtcggcaaatagccgcccgagcgataagcgcggtactggcgccaaggcaaaaaagcttgcttgaggcgcggtcccgatctcgccggatgcggctgatgagaggaagccttgatctggtcctaatgtcagcctggccgccaggaagcgctccagtcatctccaggagcttgctgagtcggcgcggggcacggcggcgggaccgccttgtgtgcccgcggccacccgcaggtgcggtagactccgattgaagcagaaagactcagatcgaacggcaaacgacaattggtaagacattcgggccggcacttcttcggagatgcctccttatgcgaacacttactgatagccgcacaggcaaatgtcggttcgcgttcgatctgagtctttctgcttcaatcggagtctgccgtggccgcagtgccaaacagacgtggccggcctcgtggatggcgtagcgccggatccgcgggttcctcccgatgcatcaacggcggagatcggcgagctcgagcggccactccgcgtggcgcgcgaagctcaggagtcgcgcatcagcgttcgccttggggcgccagcgcgagccgacagatgtcgaacaagcccgggctgtcgagaaccaagccgtatgaggagatatagatgaagtacctcgccttcaaaaagcgcggcaagcggccgcaggacgcagacctcgtcgttctcgcggacaggatcggcgtcaaagttgtcgatggaaagtaggcgcaatgtgaccggagcgcctgtgatggaagcgcaactgcggccgatcgactccgattgaacaagcattgactctgatcgaagcggaaagtggcgtcgaagcgctcgcccgcgttcaccgtctgaagttcaaggcgagactttgcgaacgctttcggcggtccaacccccgccacctaccagaaatccggaactcgtgaaaaagctagctagggtaaccgacacccgagggaaaatgctcatggcccgcaggacgctatcccggaggaatattggcgccccatcctcgacgatctcgcggctgacgccgaaccggtgggaggggcgcggggcttcggctgtccgagctcctgcgcgttgcctgtcgccggtgcgaccgagatccagaaggctgacgcggttcgtctgtacggccagcaggccatctggaaggaggtcggacaacgtctgctgaacaacacctgccaaagccggaccggccgctatgactgccgcgcggcaatcagggtgacagtgg

SEQ ID NO: 203 - DNA, 8496 bp, Bradyrhizobium colbertium
cttgtcgggcccgacaagtgggtccggtccctaaccggcagtctaaagctgctgcgctgaagagcccgtgagttgcacaagaggattccaccgacgtctgtctcacgcgcattgggagtcgaccgacaacccctgctttactccaggaggagttccgaggtacctgccgtgcaggcgacgagttgcttcctgctggattatggtgggcgcacagggttgaacttggacccctctgcgcaaccagtttagcgggggcatgttatggatcgtgcgaacttgttctcggagcgtgatctgctcgaaggagtcggcgaatggaccgcgtgcccggcgcttcaaccagtggagcgccaaacaagtctgcgggtatgtcgaaacgctctggactttgatcgttgagtccacatcgtcagtgcccaccagcatgccagccgtgctgaacgaggctcaaattggaatcatcttgctgtgaagatgacaaacgcaacgcgcagcccctgatcccgcgagatcatcgaagtagcggggcgggtaggcaaaggctggcaaagcatcgaatcgatactctggtcttggcaatgtatcggtcatccgtcttccttctcattgcattcaccgatggcatgcgaggacaaagcggcgaatccatatgcgcactggacgaaatctcctaattgggcgtatcggaaataacacaccccgcttctgctgcggatcggaaagcgtcttccggacttgtggtgctctcgactaccgcatagtcccaggggccccttgactcagctggatctttgactcgcaaagcgtgaatcggcttcattaagcgaccatcgcgtcgcaggtaagcatttgggtttacgtcgtcttgcacgggaagaacgcgcatctgctcagctacagactggccggagaggctgccggcgatttgcgctgccttgaagtagtggagagccgcgctgtacatcgacgcctgcacttcggtcggcggcacgcccccagagcgacgcatgaagcgatgggcgaatgcgcggctgcgctcatccttgtcccagtagaaaccggatgcgtgaatcaggccttgaacgtttgagagaccaagcgcgtgaatgtcggtgatgaacagggtcggagcagctatggtctgctgcttgcctaagccaaactcggcagcttgcttgatgagattggcaagatcccgtccgccgttcgccagcgcgacgacgtctgaccgggacgcctgggcggtcagcaagaacgatgcaaaatccgctgaattcagcggtgtgcgaacggagccgatcatgcgtccgcctgcttcgccgacaaacctggtcaggtctcgttcaagttgatggccgaaggtgtaatcggcagcgacagtaaaccacgtttttcgtccagcacgtgtcagcgaacgtgcggtgacagatgccgctgcgaaggtgtcgagattccaccccgagctgtaaagagagcaatagcgcccggtcagatcggctcccgctcccgcgaaagcgaacgttttcttacgctctttggccagctgctgaactggaatgactacgttcgacgctgtgacgccgaaaatggcctgcacgtcgtcgacatcgaaccacttgcgcgcaagcgaagccccggtatccggcttattttggtggtcagcgaccaggacctcgatctgccggccgagcaaggagcctttgaagtcctcaacggcgagccggacggcagtgacggtgcctagccctcccagatcggaaaacgggcccgacatatcctcgaggataccgatcctcagcggcggctgctgtgccatgagatcgtcatttgccatgacgaccgcggccgcaataccgaaacaggcgagtgcttgttgcatcgagttcatacagacctcttgcagtcctctcttgaaccttctttgacgggcctcttcccgggctcaggcaatcgcccgatcttgttcgcgccaaaacggcgcgcgcaattcgcgcttgagaactttgccggctgcatttcgcgggagaaccgccatcgtcacgtagcggcgcggaatcttgaaattgccgattcgtcctcggcagaatgcgataagttcgtccggaataggttctgccacgcccgggttgagcacgagacacgccagtggagcctcgccaaagcggtcgtcaggcacgccgatgaccgcagcctcggcaacggccgggtgctcgatcaggatcttctcgatttcgctgggggatacgttctcgcctccggtgacaataatgtcctttaggcgatcttcgagaaagagatacccggcttcgtcgatccgtccggcgtcgcccgtgtggaaccagccattgcgtaatgcagtctcggtctcgctatttcggccccagtatccggccatgatctgaggaccgcgcgctaccacctcgccgatcaagcccggctttagcgatcgatcattgccatccacaacacgcacatcagtgcccgggagtgggagtccggcggacgcaagccgacgcatatcatccgcatcgcctgaaagagcgttccgatggcacgccgcgccgagcacggtgagagtcgcggtcgtctccgtcagcccatagcactggtagacgtcgcagccgaatgtgcgaaccgcccgctccaacaatggtatcgaaatgggcgaggcaccatacataagactctgcagcgcactccaatcgcgctgcgggagatcgggtacctcttggaacatcatgttgatcatcgcgggcaccaagagagccagcgcaatccgctcttcgacgagactgtcagacaccgtgcgcggattgaattccggatgaatgatcgcgattaagccaagcgcggtcgcgattgccagcatgtataggcctccggcgtggtagaaaggcatggccaccagtgctgttgcgccaatcgaagggcgtcgctcgagcgcacggataatctggcctatagcggcatcgtaattggcgtgcgtgatcatcacgcccttcggccgtcccgttgtcccgctggtgtacatctggcagagcacgtcctccgatcgcggtattgggtgatcggcaccgagagaagggtgcgccgagagccagtcatgcaaagtggtccagctttcgcagcttgacttgccggccacgatgcacctctggattgacggaaccccagcgattaactcctcgatggcgggcacgaaactgtcctgaacgaagagaagcttgacgccggcatcgctcatcacttcagcccattcccgcggggcgagccgcaagttgagaggcacgggcacgacgccgacgcgggcggctccgaagaacatgagcgccatgtcgaggtcgttccgcgagagataggcgatgcggtcgccggcgctgatgccctccccgatgagcgcgcctgcgaatcggtcaatagctatcgcggcgtcgccatatgtcacttgacgcacaccttgacgagcgaaaattcctttcggtcggcagcgcgcatgatgcagtagactgtcgaagaaaagcattgctatgcgtcctcctcagtaagtctggtatcgcgcgacccacgtgttcgtcgcgcgatggctcaatcagtttgcaagatacggaagacagcccgtgcccgcgagcaggggatctagtgtatcgcgcgcggaacgaaaggtcctggtaggtctgacgcacgcgctcgaggcacttcgcctggtacttgaacacgctttgcgaatagggctgacctgcgatatccagtgagaaagaggtctgacccgccgcaatcgctcgagcattcgcggcaagaaacggcagatacgtgtcgccggcgatcgataggaggcccttcagcgttggcgacgtgagtgcctcgtcacgactccaccactttccgtcgacgcccgaagcgtcatcgagacgacgtaaccagtcgacgagtgactgcgcatgcgtgcgcatcagcgccgcgggcaccggatctgtcgcaagttgttggagctgaccgtacagggcgaagtccgcaagcgatggcctggacccgaacagatactgcgcaccgccagcttcgagcgattgattgaggatgccaagcaggcgctgataacttccttcgatcaccggcttgttctctggcgtacagccgacaagcggcatgcgctcgatttgtcgcgtcgccagtgctgtgccgatgcgttctctttccgcagagccggcttcgggacggatatcgctggcgatccaacgttggcaatacgtcacgtcgtcagggtaataccacctgaagtgaaacatgatctttgtaacccactcatcggccatgtcttcgatgaggtcagccagaaaggccaaagccgtatcatctggcacgatcgagcgcgcggccgggtgacgcctttcgagaacctgagcgagaggcgtcgagtcgacatggaagcttccgtcttccggaaagcgaaggataggaacgacgagtggcttgaccggcggcggttcggcctccaactgggggaaacggacgatccagtcgaacggcagacgccggtatcgcaggatcgcgcgcatcttgatggaatagggcgatccggtcatcccgatcagctggtagcgctcggcatggtcgtgtgcgcgcgaatacgtgccggcgggcaacgatgtgttggcgtcatgcatgggccggggtccatcgtacggcgttcgattcgtccaccagcaagtccgtgtagagttctgaatcgggccgatctgcatagcgcgcgaagttcgagatgccagcctcctcgagcgcctcctcgtcaaggaagaagcgacctgtgcaggccgtcgatcctcgcgtcagaatcgcgtgcgccgcgtcagccatgatttctggccgacggcatcgatcatgaaatggttcgtctccgcccaacattgcggttgcggcggtcgcgatggtcttgcggggccacaacgcattggcggctatgccgtccgatctgaattcctccgcccatgcgcgaacacaaaggctcatcccgtatttggcccaggtccaagcgagatgatcggcccaccaatgatcttcgaaatgcaacggaggagagatagctaagatgtgcgggtttttggcttgcttcagatatggaatgcacgcctggccgcaaaggaaggtgccgcgcgcgttgaccgcgtgcatgagatcgaagcgtttgagactcgtgtcgagtgtgcctctgagatcgattgcacttgcgttgcacaccaacacatcgatcccgccgaaactctcgaaggtcttgtcgacggcgattttcacctgatccgcgttgcggacgtcgacttgtagggggagagcgcgcccgccaaccctttcgatctcctccgcgacggagtggattgtgccgtccagcttgggatgatgagttgcggtttttgcggcaatcgcaattgctgcgccatcggcggccgcacgcaaagcgattgctttaccaatgccccgcgacgcgcctgtaatgaacagcaccttgccgcttagactcatcgtagcgatcctcccacgaagtttacttgtattttgcaagtaaaattccatagagaacactcaaagtcaattgcaaagtgcaagtaatacggttagacggagtcatgaaacgcagccaacttcccgagatcgattgttcggtcgcgcaagcggcatcgcaagtgggagatggttggtcgctgcttatcctgcgggaggcgttcaacggggcgacatacttcgatgagtttcgaagggagttgggcgtcgccacaaacgtgctggcggatcggctgaaaaagctcacttcagatggcattttcgagcggtgcactgcgccgggcgacgggcggcggcaacaatatcggctgacagcgaagggatgtgatctctatccgttggtaatctttcttgctcagtggggtgagcgctggatgccgaacggacggggacagcgcatgctgttcgtcgagcgaaagaccggtcagctaatcggacaggtcgaggttcgttcgcgagcagggaactcgctcaggccgcgagatgtctcccggattcctgggcccggcgcagcgaagagcggacatgcttctccatgattgggccccgcgcactcggctgccgcggttgtgaatggcgccttgcggccgcgcgcgtaacggttcagccgacggagcgctcgacatccaagccagcgcctctccttatcgacctgtgcgccggccagtccgggtcatttaaaacggaaggtaggtctcaccatctcagtagtttttgccccgctgtgtaacccgcggcaatcacgatagttgtcgccaatggataccaggtaaccacgaacagcgcgctgtcgtcggtgcaattcgttgcataaaaggtggccgcaataccgctcgccgcgagacctgccaaagcacctgccagtccgggccttatcggggcgcccgctcgcatcgcgaccagaaaacaaatcaaaggtcctgcggacagcatcggaatgagcgtcagacaattcgatgcgttgcttccgatgatcttggcaacccaaagcgatgaaggaaccgtggttaactccaccagaacagccaaaagcagtaccaggggtgaaatgacaagcgccagaccggcccgtttgacaaatgctgacggttgcgccaaccgcggaagcgcgatagtggccgcaatgacagtcggcacagtgacggcgaatttcgcgagaaatcgagcggattgcgccgcatcggcgatgtcagagcggaagccgactcccacaaaaaacgtgatgcccgcgatcatcgtgccgccggcaagcgcgagccgcaccgccgtgtcgggtttcaaccccaggatcttgtcggcgacgagcagtctgatgagcgcttcggtgtccatctgaaagccagaccaatcaggttgttatccctccacaagcaccttcgtttgcgcacctcgaaatgttaccgcttggcgttcgctccccggctggcacttgaggatgatgggcgagcactgacgcggttcgagtgcacggctatcaaggttgggagtaagagtatgtgtattttagattgcttgatgcaaaaaaggcatggaatttcgtccttacaattgtctggcatcgaccgcatgcgttgtttagcttactaatccatgcggcacctgcagcacctttgaatcagccgtatcatgcatggggcttgctgttctgacacactatttcgaggcttagcgaaatccggggcgtgtgtgccctggcgttcagccgagtcgctggttcgcgacgaaacaggagatgggatgtgattgaagcgttgaggacaccagaagagcagttttcgaagttgccgtcctttgattacgtgccgcgctatctggatgacttgccgggttatgagggcctgcgagccgcctacattgatgagggtccatccgaggcggacactttcttctgtctccacggccagccaacctggagctatctttacaggaggatgatcccggtctttcttgaatcgggcgcccgcgtcgttgcgccggacttctttggttttggacgctccgacaaaccgatcgaccagggcgtttataccttcaaattccatcgcgattttctgctccgtttggtcgagcgtctcgatttgcaaaggatcacgctcgtttgccaggattggggtggtctgcttggtttgacgttgccggtcgacacatctttcgagccgcgtcttcgcaggctgctggtgatgaacaccaccatcgcgacgggcactccgccgagcgacgggtttcttgcctggcgtgcttactgcaaagcccatcctgatctgcagatcggcaagctgatgcagcgaggcacttcgcatctatccgacggggagatcgccgcatacgacgctccatatcctgacgcccgttacaaggccggcgtgcgcgcattccccgagatcgtcatgacaaatcccggcatgccgggcgtttccgaaagcgttgccgccgagaaatattggtcgacacgatggaatggccaaacattcatggcgatcggcgccacagatccggtcttgggtctcgaggtaatggaagcgctacggaccaaaatacgcgggtgtccgccgccgctgatcgtgcgaaacgccggacattttgtccaagaatggggcgagaacgttgcctctgctgctctcgcgtcctttgcgcaagatgcggcgagggtgtcgtcgaaaacctaggcctgttcacgtgctggctttggcaaactcgatcatgccgtcctcgaacgtgacttccggcttccaattcatttcttttctgagcctggaggaatccgctgtgatgtgccggacgtcacccaacctgaaaccataagtgacttgaggatcgggcccccccttggccttggacagcgcccaagccatgtcgcccacggttcgcggtgtgcccgagccgacattataggccctcaccccgaagtcatgtgcttcgcatgctacgaccgtggctgcagccacg

SEQ ID NO: 204 - DNA, 24765 bp, Bradyrhizobium colbertium
  misc_feature (6093)..(6102): n is a, c, g, or t
gcccgcgaccaccgcggcctcgatggcgatggacaggccgaggacgatcggcgacgcacccggttgcgggccggagcgaagcggaggacgacgtcgtaaagactttcttgcctcgcgaggaatgggcgtagcccaggggaagaaagtcttgagcgacggcgttgcggctcagacgatcgaggcgcagccggtcttcggccagatcaagccatcaaagaggccacgtgcgtccgcgtgctgaacgacctggggagaagacttggccaatttcggttcgaatgtgcaagaagtcggaatttccaggcgtagagaaagaaacgacatgcaggaaacggcggaattgtcagacgacaaatagccgcgaccgaagggcctcaccatcgcaactatatgggccgggccgagatgacgcagctcgctatgggctccgcacgaaggaacgcttacgttcgctcgagttcgacgatccctccttcaacgctccgatctgcgcgaatctgatcgaggaggcaggtggagagggactatccgtcgtgcgtagcggcagaaagacccgccggagatgcgcttggcacgaccctgcccgactccaatggacggggctccgcaaggacagccaaccgtgtccacgccgtaccaccgataaagaccgcgccgaggcacgcgaagacctcacgccatgccagcgagggcatcccgagttgcgacatcgcgaagaccacatgatagccagcaatcgcggctgggaaggcgaaggcggccgctatggctgcacgcaagatcggaaaccgcgcgatcgcgaatgcggtctgtccaatcgcgagcgtcacgccgccggcgacaatgccgacgagcggcgcaccgaggatgccggcgccgctatgaaatgccgccaccccggcgctgacggcgacaaaaaacggcaaagcgtacacggccagcgtcaagatcagccagcagaacaagccgatgccgacggtgttgaggacaagtccaagggcgatcatggtggtggctccgtatgcaaaggagtaacggtcgcgccttccaccaccaccgcggcgcgattctggatatgcaaccgaaacgaggcggagttgcggcgcttgcaactccgccttggtggttcggaaggtggcaaggcggcgctcacgcgccgccaaatttccaaacgggaatgccgagtcgtttcgccttgtcggccaggttgtcctggattcccgtgcccgggaaatgcatgacgccgatcggcacgagttcgagcatggcgtcgttgcgcttgaatggcgccgccttggcgtgcttggtccagtccggcttgaaggcgatctgtggaaccttccggttggtcgcccatttggaggcgatcagttcggcaccctttggtgagccgccatggatcaggaccatgtccggatgcttggcgtgaaccttgtcgagacgatcccagatcaaggtgtggtcgttgaagtcgaggccgccagtgagtgcgatcttgggcccaggtggcaacaagacctcggtctctgcgcggcgcttggctgcgatgaaatcccgggagtcgatcattgccgccgtgagcgtgcgatggttgacaagcgaacccgagcgggggcgccagggtgaaccggtgtggagctcaaagtgctcgatggcctgatcgcggaacagctccaggcagttgcggcgctcgatcagtgtgatgccttcggccgtcaggcgctcgagttcgaccgatcgtacttccgaaccattctgctcgcgctggctcttgcgttgagcctgttcgttgtcatcgagatggcgatcaattcggtccgcggcacgatggaacaggttgacggtcgaccagagcaaatcgctaaggtccggctcgagccgcgtatcgctcaaggtggcaaccaaggcgtcgaagatatcggcgactgcgccggcgatcatcttgccctcgggtagcggtctcggatctggctcatcgtcaaatggacggtagccgaagagctgcaattcgctgaggacgtggtcggttgcagaggcggcgtgcggcggttcgatgtcgtcatggtcggtcatggaagaggtcctttgccggatcggccgcgcccatcgcggccttcgtggcgatcactcaggcggcgggcggagcgggccagaacccgaaagcgaagcggagggccgaagcgccagcggaggatggcagaggtgcggctattttgcttcgcgatgcaaaggcccgcagggccggcggaaaatagccgcaccgcagccattggcggcccgggccgcttgccgtccgatcgccctctagaaggccgaggtcgcgcgcctcttcggcattggcaccgcctcgaccgagctgtcggcgtcgaaacaaaacgcgcctatgcgacagcggtcgacaagagcaggaagcgggagacgtcctctggtacgagttgcatccgcaaagccgtacggagagcatcgaggccgaagatgtagagatcctcgttgaaatcaccaagccggggcgacaacgtgatggcttcgatgccggcggctgctgcgcgctgcgtcaggattgcccggaccgcgtctccggcagcatcggcgtcgcgggcgatatagagccggcgcaaactcgacgacagcagcatggccgagaggtgattggctgaaagcgcagcggccatcggcaacgtcggaagcacacagcgtagcgatagcatggtctcgatgccttcgccggcgacaagcacgtcgtcgtcagccacaccgaaacgaactgcgttaccgagcaggtcgcccatggctcgtcgtggcgtgtcgaccggtgccttgccgagccgaacgcgatcaaagccgtccggatcgagccaggtgcggtgcacgccggtgatcccgccatcgaggtcggtgacggcagcgatcattgccggccaggtctcggtcggcaaatgctcgtcaggccggtagtagcagcgcggatggaagcgcaggctgccaccatggtacacgcgggctattccgcgacggtgcaaataagtctcaacgacggtaccctcaatcggacctgagatcgcaaacagccgtcttgcggcctcttgtgagccaaccgcggtgatggggcgagccggttttgaggcaccttccggtttagcccggggtagcttgagaaagcgtcttgcctcctcggcgacggcgcggaagtcaggaagaccaaggctttccctgacgatgtcgaggagatcgccatgctcgccggttgcggcatccgtccatttgccagcgggtcccttcggtgagtcctggagccgcacgaacatcgagcggcccggcgtattgtgcacgtcgccaaccagccagtaccgcccctggcgcctgccgttggagagataataacggcacaccgcttcggcttcgcgcgcgaggcagtgtgccagttcggaggcgtcgcgggccatcacgcagcctcccgttcggcgatgcgctcgattgggtagtggtcgagcaccttcgccaggacttcgatgccatcagtgtcagttggcacgaacatgcgtagcttccaggtgatgatctccccgaacaggccgtacgcgcgcagccggtcgcgcatcgcgtcgttgaatccagaaagttcgatgcgatatgcgtccatgacccggacacggcggagctggaggccttcggcgagctcaaggaccgtcctcccctccatcagcgcggcaaaggccttgtcggtcgcgagcttgggctcgtcaacggcaaggacattcgcgacccaggctgccgagaccttgcggccgatgacgcgttcgccagcatccgtctgcagccgatagacccgcgtcgactcgttcggcagccgcttccagatcggcagcaacaagcccgccacgatgtggatcgtgctttcggtgaactcggccacctcggcaagctctacctgccaggccgcggcgaagcgttcgcgatcggcttcaacccaatggctttccgccatcatcttcagggggaggctgtgctgctccattggccggatcaaccggacgcgtcgttcgatctcgccatcatcgagcatgaagctcggggctgggacctgcacggcggctcgtccggagcgctcattgatcagcgggacagcacgctgatccgacaggcggtcgagggcatcatccaggcttacaggatgattgcgctggcgctgagtgatcgtgaggagccgggtctcggcgcccgtcaccggatgtgtatagatcgttcgccgatcagtgacgacaaagctttcagcacggagggtttccagtccgatgtcgtaggtacccgatgcgatcgcgccttcgatacgggcggtcagtagctgctcgaaggcggtgaacagaatattctgcagttggatagtgagcgccagcagcctgttcaggaaggtcgtgatcggcggaagctcatctttgagcccgttggcatccataagcttcagtccggtcgcatcttcgaatctctcaagcgagcagccctcgaccttgccgcgcgccagcagcatgtagagctggcgcaatgcatcacggccatactggctttcgaggttgtcctcgggccggaacaggccctgccctccggtctggcgctgaccccgggtgatggcgcccaatgtgtcgaggcggcgagcgatcgtggagaggaagcgcttctccgccttcacgtctgtcgcgaccggccgaaatagcggcggctgcgcctgattggtccggttcgtgcggccgaggccctggatggcggcatccgccttccagccgggttcgagcaggtaatgaacacgcaacctgcgattcagcgccgacaactcggcatggtagctcctgcccgtgccgcccgcgtcggagaacacgaggatgcgcttgacgtcgtccatgaacgccgtggtctcggcgagattcgccgatgccgcacggttctcaacgatgagacgctggcccttgcggatcacgcggcgcgagcggcccgtgacctcggccaccatgtccgtcccaaatcgctgaacgatctggtcgagcgcgccgggcaccggcgacaatgacgcgagcttctcgatgaggctgtcgcggcgtacgacagcctcccggctttcgaccggctggccgtcccgatagacgggccgggagcagaggtttccctccgagtcagtgaaaggctcgtagagctgaaccgggaaggaatgggcgagatagtcgaggacatattcgcgaggggtgatgtcaacctggacgtcaccccactcctcggtcgggatctcggcgagccgtcgctccatgagggcctcgcccgtcgagacgatctgaatgacggcagcgtggccggcgtcgagatcgcgctcgatcgagcggatcaacgatggcgtcttcatcgaggtcaagagatggccgaagaagcgctgtttggcgctttcgaaggcggaccgggccgcggactttgcctgtccattcagcgtgccggtctcgcccgtgatgttagcggcccgcatcgccgcctcgaggttgttatggatgatgctgaatgcaccggcataggcatcatagatgcggacctgctccgctgtgagctggtgctcgaccagttcgtattcgacaccctcataggacagcgagcgagcggcatagagtccaagcgccttgaggtcgcgcgccagcacttccatcgctgcaaccccgccctcctcgatcgcctcgacgaactcggcccgggtcgcgaacggaaaatcctcgccgccccataggccgagacgctgggcataggcgaggttgtgtaccgtggtggcgccagtcgcggagacgtagaccacccgcgcattcggcaaggcgtgctggagcctgaggcccgcacgcccctgctgagaggccgcctggtcgccgcgttcgcccttgccaccaaccgcattttgcatggcgtggctctcgtcgaagacgatcactccgtcaaaatcggagcccaaccattcgacgatctgcctcacgcgcgaaagtttctcgccgcgctcgtcggtccgcagcgtggcgtaggtggtaaataggatgccttccgtgagccggattggcgtgccctgccggaaacggnnnnnnnnnngacgaggagccgctccatcccaagcgccgaccagtcgcgttgcgcatcctcaatgagcttgtcggacttgctgatccagaccgcgcggcggcgacctttcagccagttgtcgagcaggatgccggcgacctgccggcccttccccgcgccagtgccatcgcccaggaaccagccccggcgaaagcgaacggcattttccgcgtcgtcgcgcgcggccgccacgacgtcaaaagtcgcatcgactgtccaggcgctgcgagaaacgcggaatgcgcctcgccggcgtagatgatgctctcgagttgggcatcggataggatgccatccgatatgacgttagccggcaggtgcggccggtaggacggctccggcggtgcgacggaagccatcgcggcggactgcacgagctttgtgggatgcggttgcgcgcctggaatacggatcgactgcagtgtgtaagcctcataaagcgaatcggtgatgctgccgccatccgtgggcgtccaatccaccggctcgtaggcgacttcggtcgccacgggaggcattgccggcacggctgcagccgactggcgctgagcgacgtaggcacgtactgttcgaggcgttgcagggctggcaattgccggcaccacgccagccgctgtgccagccattggacgacgcggcggcacgtgctgttggacccagccgagcaaagtcggcagatcgggcgcaatgccgggagatactgggaacgaggcgacgtcgtcagccgggactcgatcgataacggtcagacgggtgtcgacgttggtgccgtgcttggcatagacggcgccgtcaattgccgccgagaatacgacacggccttgttcttgcagccgcttgaaggaacaggtccatgcgggattgtcgggcgcgacgtttgcgcctgtgatggtaaccagccgtccgccttcgggaagtcgagccagggcggatccgatgtgacgcagtgccgcctctcgcatctgtcgatcgacatggaccgcagccgagaacggcgggttcatcagcacgacatcaggcacgatgccggcatcgaggtggtcgttaatgtgagcggcgtcaaactgggtcgtggaggcgccgggaaacagctgcgcgagaatgccagcacggctctcggcgaactcgttaaggaccagggaggcgccgtcaagttcggccaggatggcgagaaggccggtgccagctgaaggttcgagaacgacgtcagtaggcgtgatcgcggccgctcggctggctacaaacgccagcccgataggagtggagaactgctggagggattcactctccacagatcggcgtgtctgagtcggaaggaggctcgcgatcctcatcagcatcggcagcatcgcggctggcgacgtcgccttggtgcgcatgacggcgccatatcgccttagcaacaggacggtcgccgcctcgcaggcgttgtaggccgtcttccagttccagaccccggtcgcatcggaggcgccgaaggcagcctccatggcgccgcgcaggacagcggcatcgatccggcggctgcgctcgagatcggtcaaaagctgtcgcgcagccctgatgacactcgaggcgacaactgcggtggcacggatcgagagcggcgcgacggcgccgccggcgagagattcggtcatgggaggatttctcgggagagcaggaatgggctgaaccgctcggcgctctcctttaagaccgcggcgactcaaaacccttcccggcccgcctctacctctcagccatcgccaataaaaaggggaccggcgctctgcaccggtccccaaaactgcgggacagccggagccatcccgctctgtgatgtcactcagccgcatcgagctgttgcggatcatcgtcgccggcgttctccccttcctcctcgtcggcgaggaaatcgggcagcggacccgcttcaccctcctcttccgctggcgacgcggcggggtcgacgagacgcagcggctccggtaaccagcccgaaccatcgagaaggcgctcggcctccttggccatgtcggccttcttcaggtggtcgatcagctgcgcggaagactcgccccttgcctcccgcaccgcctccaaaatgcgaggcttggtgacccggccgagataattgtcgacagtgggtctccagccagcctggaccatgtcgaggcccaccgcgcgggccagcacgtcggcctggtcgagccgcgtgcggacggcgtgagcggagacgcgaccctgattgtagcggttggccggctcatagagggcgttgaccgcaaatgacgcacagtgagcgaacagagacgcttgcgcaccgccatcgagggctgtgagtgcgtcccacagatctttctcgctcttcggcagccgtgctttccaggactcatgccgcgcctcgacggccttcgcggacgcgctttcccttaagccaggggcttgggcgggaaaggtcggcgtgtgaagcccgatctcaaggcagcttcctgatgatgcgaaccggtaaaaggcagtcagcacaaagttgtgcaacactgcctggaacgcgatcgcaggactttctgccagcgcgtcccgcagcgccagcgtacgatgcgccgtcagctctgtgatgagccgatccggcaaaggcttggccgcatcctcatcatcttcgtcggcatcagcagcgctgcctgcaaccgcgatcaccgctcgccgaatgcaagcacctgcctcctgccctccggtcgacgacggatcggcgctctgctcgatatcagcatcagttgccggcacgtcgtcctctggccggacgtaaccccggtccacggaaaggcgtccctcggaatcgatgctgatgaagacaccagctcgggcgatctctgtcggatcgtagagcaccggccggtcttcgaatgccatcaaagcctgctcgatttcgccgagacgctgatcgacctcctcgggcaattcgtcggcatcctggtagtcggattcaagcttcgcctgctcggcgttgagggcgtcgatggtggcctgctcctcaggtgagagatcgacaggtttgccctctagctcacgcatgccgctagcatggccgtagggaaagtccacggcgactgagatccatttccagccctccttggcgatcgtttcggcctcgactttgagtttttcggtaacgagacgatcaagcaacggcacatcctgcaaccatccgccatcgtcgtgcgcgaacagatcccgcatcacggcgccgccggcctgctcgtaggcatccagtccgatgaactgggcgcgacggtcggaagcgcgcacggtgttctccgtcagcatcctccggatctgatatggctcgtcattgccggatctgctgatgttgtcccagacctgctcctgacgcgcctggtcggacgtgaccgagaatgccatcaactgttcgagtgtcataccatcgtcagcatagacgtcgtgcaacttcggcgagactgacgccagacgaaggcgctgcttgacgatcgccggcgagacgaagtgccgcgcggcgatatcctcttcgctcatgccgccgtcatgtagcagcttgaacgcgcggaactgatcgagcggatgcagtccgacccgctcgtcattttcggcgagggaatcgtcctcggcgataccgccatcccggatgacacaggggacaggttgcgtcttcgccatacgcttctgcttgaccagcagttcgagcgcgcggtaacggcgtccgccggcgggcacctcgaacataccggtctcctggccgtcggcgtcaacgaccgcacgaacgctcaggctttgtagcagcgtgcgctgagcgatgctctctgccagttgttcgatcgagacgccggcctctacgcgccggacgttggactggctcagcaccagcttgttgaagggaatatcgcgggagggactgagtttgatcttctggacgacgcatgccatgtcggattctccatgacgggcggccgaaagactctctcccgacctccttcccgtcacagacaagccggcacgcctctcactctctgacgcgcagcatcaactgaggacagatacgggcacagcgtgcggatccgtcatgcagcttcctcgctgcccccaaccacggaatcgatcgcgggcggcagaaagccgagcaggaaatcggcggccttcgatgccgcgctcgccgcacggacgacggcgcgattatcctcgcgcagcacctccagccaggaaccgatgtagtcagcgtggcgcacggtcggcacgataccgagcgaggcacaaacgaaggcacccgccatttcggcgaccagctcttcgcgcgcgtatgattttgagccgaacgaaccggtgtggtcgcggttgaggcgggatgcctggccggtccaatgaccgagctcatggaaaacggtccggtgccagttgatcggttcgaaataggcagccggcggcggcacctgtacgaaatcgcccgtcgtgttgtagtaggcgcgcgcaccgccgatgcggaaatccgcgccggtcgccgcgatcaaggcctcggctcgcggctcaatctggcctggtggcggcgggaccaccaaagcagcgacatcctcgggcaagccatcgcattgatccgtgttaaagacggtaaagcgcttgagaaacgggatggcacccggctcctcgccggcctccgtggcgcgccgacgttcgtcgtctggggtgaagcgatcggcatagacgacggtcgttccccgctcgccctttctgacatggccgccgagccggagtgcctggcggaaggtaagccagctctgtcccgaaaagccgtgctcgataacggcaccccataggatcagcacgttaatcccggaatatccgcgctgcgtcgacgcgttgcgcggcatcgcgagcggcgccttgatcgacgccgtcccccagggctgaacccacggaaaacggccggcctccagctcggctatgatcttgtcagtgatttcggtgtaaaggctcgttcggtcgttgccggcacgaactcgggcggtatgtccagacatcgcggttctccgcgacgggcgccggaggcctctcccccgatcttcaacccgtcgcgtcggacccggcccgcactctcactctccgcgacggtgacggggacacggagcgcgcattcgccgtaaatggaggccacccctggcttgagatcaggtgcgcgcgctgcaagacgccgagcgaggtcaacctcgcggcggtgaagcatccgccggccaccttcgtgcacgatctcgccagccggctgcgccgccgcaaatgcgccaaggcgggccgacgccccgcgacgaccccaatacaattggcttggcagccacgccaccctcgaaccgaagaaccgagcacaccgttggcacgcgcagagttgccatacgactggtcagcgccgtccctttgaggccgaagcgcagcggaggcaagagagaaggcagccgacgaaggggcagtgatagcgacgcgggcatgcaatgcccgcgggcaccgaggcgactgcagtcgcgagaccggttaacaaggcacccgcgttcggggcagtgatagcggcgccggcatgcaatgccggcggcccctaacgcgagagcctccggcgagcgacaccgtatcgcgcaagggatcgaagccgggacggccgagaagcgtcagcggctcggttcatatgtggacggcccccgacttgcaaggattggctctggcagcatgctcggatcgcttgcgctcatatgtccggcctgttttcaggtcttgcgaccactggccaagatgggcttcgcggacagtgagatccaaacacgagagcggcattttctgccggtaaaccgagcggagcatttcactgaccggctcgcgccgaacgtaccacctcttcctgtcctgcaagttccgcccccagcgtcaaacctgccggtctggcgccaagctctgcatttcgttcaagtctatgtcggcatcggcatgacgttgcttgcaggtcggtaccgctcgccgctgaccatcagtttccaggcgatccgcgccagcttgtttgccaacgctatggccaccagcttcggcggcttgcgtgcgatgatgtctttcagccaaggccaggagcgactttcccgtcggcgcatatctgcgatcacagccgtcgcgccggccaccaaaacggttcgcaacatgccgtcaccggcgcgtgtaatcacgccaagccggttctttccggccgtcgagtgattctttggtgtcaggccaagccaggcggcaaaatttcttgccgacttgaacgcgcgtgcatccacgaccttgatcgacagcagcgtcgcgccgatcggaccaacgcccggaatagccgccagccgtcggctcatctcgttactccggtgtagttgcatgagcttcttgtcgagcttggcgatctggtcatcgacgcgcgtcagttctgttgccaaagcgtccaccaactccttcgtcaactccgggactgtcgcgtcagcctgaatgtcgatcagcaattgttgaagccgcgaaagtcccttgggcgctgtaaagccgaattccgcggcatagccgcggatcgagttggcgagctgggtccgcctaccgatgaactggttgcgcacgcgcgccaccatctgtgcgccctgctgctcggggcttttgataggcacaaagtttttgcgcagtttcggccggcttgccgcctcgcaaattgcctcggcgtccgcagcgtcggatttcccgcgctgcacatacggtttgacatattgcggcgggatcatcaccacctcgtgcccgagcgattgcaactcccgcgcccaatagtgcgatgccccgcacgcctccatcgcgacaagcgcaggcggcaaacgactgaagaactccaaaacctgtccgcgcctcaacttacgccgtaaaaccggctgctcggtcccgtcaacgccatgcaactgaaatacgctctttgacgtatccaaaccgatgcgaacaatcgtttccacgggcggctccttcgtttgggtcagcgacgacctcatcttgccacgcagtgtggcggaagggggccgtccaccccaacacgagagcccggtccgcggctagcggatgcgcacaagcagagaatccgcctagacttgagctaaatttcctcgcgcgaattcgtctgcgcgtcatagatcctgatctgaagcatgggaaaacgtttctttagttcttctccacctgcccttgcgccgtctttggttgcaaattcggttttgagtcggccgtccacttcgagcgcataaccagaagccggcagttcacggttggctgcaaccatttttgtccttttggtgcagtgaggcggttgagattgatgggttagcgtgagtcgcccaaaccacgccagagccacctgcgcgactgtggggataggtcaccgtcgttgtggattgaacgcgccgcactggagttcatcagcgatgggcatttgcgtcgtccgaacagtcggagggctttccgtttgcgcggatctagccgcggtaaagtcatagattccccggccgccgcgtttggcgtcgcgctaaacgccatcatatctgcgcttcgtgttgtccgacgaaggggccaggctgaggcggtcttaactttctgatggcgactgttcacgcgcgggcgttgaaatggcttatcaggatggcaatcccgatcaccaccacaagtccgaccaaacccataatcactgccgatagcatggctcccctaccgcctattcgacgccaagctctttaatggcgagggggataattgtttcgcgtcgcgaacgccgcgctgaccaagttcaataactattttggcgatcaattctgcgatgggatcaccgcgatcaaccaagctgagcttgcgcaaggtgcgctcataagcattggtcaaaaccgctatttcatccgggcccagcggagaattttgtagtaggcgatagatgggcatcgatgcacacccccgcacaagttccttctaccacagaaccatgctagtggttcatcacagtgattatgactctttggcggtggctggataggcgcggccgagtttggtgcgggctttgtctgttgtgaacatccatttgatgcgggctcgggttttattccgcctcttttgccatgctgcgatctcgtttcggagccttttgggatcgtcgatgcggcggccgagacactgacgctgtagcacggtgatctcgcactcgaccatattgagccaactggcgtgcttcggggtgaagtggaattcgaggcggcgcaggatgcgccgggcctcggcgggcgcgaaggcctcatacagcgccccaggcttgtggatcgacaaattgtcctgcacgacacggatgcaggcggcgtcgggataatggacgtcgacgagatcacgcatgcagtgggcgtagtccacggcggcgcggcggtcggtgaccttgacgttgcgccagccccgatgtggatcgaaggtgacgaagagattggcggtgccgttgcggcgatactcgtaatcgtagcgctcgcgctgtcccggttgggccgggaccggctggcgcacctcgccgatcagctggatgggggtctcgtcgaagcagaccagcggccgggcgggattctgcgtctcggcgtagaggtcgagcacgtcctccatgcgggcaacgtattcgccgtcgacatggggaatgcaccacatgtccctgcgccacggcttgaggtcgttctcggccagccggcgacgcacggtctcgcccgacagactgttgtgatcggtgagcttgaccatcgtgtcggccagcagcgtcagcgtccagcgtttgcagccagcgggcggcttggcgcatgcggtcgccaccagcagggcttcctccttgccggtcagcttgcgctcagcgcccggacgcggctcctcgctcagggcccgctccagattgccttccacgaagcggcgcctggtccggccgacggtggagaggctgacactcacggtccgggcaatctcctcgtcgcggcagcctccatcggccgccagtaaaatctgcgcccgcaagcttaagcgggcggcgttcttgccgctgccgagcatctccgtcagttcgtcgcgctcggcttggctcaattcgacccgataacgtacattcatgctttgcctccttgtcggaggccgggacgaatccaacgatgagtcaaaaatcaggcgcgcgcctcaccgagaagcagggttattacctggccttcatccatacctacgcccacatgttcggacgtccacccgctgaagccgacatccagcgccacttccgcgtcagcccgccttcggtccaccagatgatcgtcaccctcgaacgaaacggcttcatccgacgtcaacccggcgtccccagaagcatcgaaatcctcgtgccgccggaaaccctgccgatcctcgaatggctcggtatcaaaacgtcaaaatcactgtgatgaaccactagccgcgggcaaattcgaatcaggccgacggaggcgacctggcccacctcgttgggagtaggtccagcgcacttgactccacgagaacaaaatacgaacatgcatcatcgacggccaaccaagatcagaccatgtcctcggtctcccagccgaacgaacacgacaacggtcttgaagccgccgtcgaccaggcgatcgccgtctgcgacggcgatccgcgtgcggctgttcgcgcgctaatcattgcgaacaatctcctggaatcggagatagcggagttgaggaacgccgtatcgcatgcctacacgcgcggacgctttcggacctacacaggatagggtcaggtgtggtgaaatagcgatgaaacatcagaacacgtggtctttcatcacggctgaccaagccgagcagatgggagccgacatggcgatccagttcatgctcatgacgctatttcagcttctgtcggaaatggcggatgacccgcgtggcttccgtacggatatacatagggaacttaccgatctcgtggcgagccaaaagctgccaccgatgcctcgagatactgagcgaaaggttcgggccgctgccggcaagattctcgacggcatcgtgatgcgatcatttgaacagaacggggtgaggaagtcatcgtgacggctggacatgcaaaccaagtggtgttcggtcacgggaagtgccgcggcctggcgatgtcgttgcccgccgagagcgaccgctgaaatgtgcaatctttatatgccgacgtcggcataacctctattcgatcacgacaaactaggctgccatcatcgcgccgtttcgcgtcgtgaaccgatacgttggcaatctggcaccgatgccgggggtgtttccggactaccaggcgccgatcgtccgcaacggagccagggccgcgagctcgccaccgcgcggtggggaatgccgtcgtcatcaaaggcgttgatggccgccactaaaaagcgggccgaagaactgcaggccaagggcaagaccgtcgatttcaatgaattgctcagaatggagccggacaacggcacgaccaacatccgcaacgtgaagagcaaacattggacccgctggctcggcgtcgaaaaccgctgcgtggtaccgttcaattcgttcagtgagttcaacaaggccgaaggcggcgatatctggttcgcgctcgatgagccccgtcccctcgcctgcttcgccggcatctggatcaactgaacgtccgtgcggaaggtcaaggaaggcgagaccacgaatgacctctacgcattcctcacgacggagccgaacgccgagatcggcgccgtctacccgaaggcgatgccggtgatcctgacgacgccggaagaggttgagacttggacgacggctccttcggacgaagcgctaaaagctgcagcggcctctacccgacgcgacgctgcggatcgtcgcccgcggtgtcaaggaagacccgcccgggtcggcggtatgacgggcaaaaccagcggccgctcgtcacggcaaggtcacctatgtcttggtcgcgttatacgcatgcgtcgccgggcgggcttcgccttaaggccgcaggctcgatcagcgcgccaatgccgcatcgcctcagcagaaaacggccccccgcaggagcatgagcatagcgacaccgaaggcggcacgcgggaccggatgcagcgacgagatcggtagagaagggtacccgaagggccgaggcgccgcaggcggctcggagagcgaagcgagtagagcccgcttccggcgaagccggatggaggaagttgcctccggcttcaacgtgagctgctcgacgatatcccggttgaaacccgtggacgcaactggttaggaaatggcggatcgtatgtgccgacgcgcccctcacgggctaaccaggaaattcacatggcgcgttggatggtgacggtcttggtcaccaaggacaaagatcaaatcggtcacgaaatgtacgccgtcgcgatcaacgatgcagcgcaagcgatagagaccgtgttgaaggcagccgctggagaggcggcggtggtcaatggtagaatcgacgagacatggatgagaagcgctcggctgaaagcggtcgggattctgaagatactggataataaggccgacccgcttaccagtcgcgtgaagcgacactagttcccgagcacttgaatgtcttaactgctctcgattgtatcgataggcaggaggcttgatgtcgaaacccaggtgggcgccgcggcatgcgaaatgggggccggtcaagccggggttttggcctatttggcacgccaacaaggattcactgcgggacaacggctattctgtccgaaagaacgaggatcgtcagtggcaagtccggtttgtacccggcacctacaagggttggccgccagtcaaaaagccggaaccaattttcgtgccggcaggcatgaaggcttcctgcccgaactgcggacaaaccagagttattccgcgcacggaagctcataaagattgcggcatttgcggtgaccgaattccgcccgagggtcaatgacccatgcttcaaagagtgtcagctggcatcggactcttttcagaattgcggccttcgtcctcgagttttttccggcgggtattcgccgcaaccacatatgagttgagcttgttaaagtccgcctcgatctccgtgaacttgggtagatcggcggggacgcctgcggcttgatcatggccggagtacttggagcaccgcgtcattccagcgtacaccgtctcatagtccgacttgtcgacatgggctgctcttaattgcatggtggccacgtttggtcgaaatcgcccgaccacgccggcgaatagaacttcctcgatggtgtgctcccaggtctcgcgcatcttggtgtagatactagtcacaaacgatcgctcggcctcgtcggcttccgaatacgttggcttctttgctttgagcagaccatcgatgatcggaagcctctttgtaacgctcatcgaaacccacggttgctggccgtcatcgataatgccgaagcgtccgtcaccatgcttggcaatccattcttgccgcagggggaccttcatatccttagcttcttcgaatacggcgtgatgaaagaacaggttgtgcgtgaagatgatcacttgcctacgggcttttgcctctttcaccagccgctttgcaaccgcctccatccgggcgtggtcaagcgacgataccggatcatcaacgacgatgccgtgcctcacgccgacctctttcagctcggcaagaaagcctgccagagcaagtgcgcgcttttccccttcgctcagaatgtcgctgttcttgccgaccttctgcttcgcctccagcccgatctggactttgctcttgcccacctctccccggtcagacagttttagcggcagatgcccgaggtcgagggcgccgatctcgtcctgaaggctattttgcagggatgtggtcaaaaccttgcgccgcatacgcgtaatgagcgacgtaatgccggccaccgaacaggctgtcgtgcaagccttggtcttgaccagcagctcaagcgagttgcgccgcgccacgaacgtttcaatatcggcggagaacttcttccgcgcttcaagttcatcgagcttttgctgacgctgaatgcgtttggcggcctgatccggcgtcggtttcaggtcgtcgatctctttcgcgaggacagtggcttctgccaccagatcgtcgatcacaatgcggtctagatctgggagaccaccaagactcgcgtagtcgacggccttaatggctaatgaagcaagactgtggcgctcttggctggcggtgtaaaactggtcaagccgatccaccagcgcttggcggggtttcgatgcttcgacgaaattaaccagcttgtccttgatgtcctgaccgccaacgattttgaggtcgaggatcgctttggccctttcgccaaaatcctttttggcggcctcagcgtcggcattggcgcggccttcaacatacgcatcaaaagcggccaagcgttcttgtgcctgcgcatcgagcggctgatgacagagcacgcacgtattggcattagccagctggggcggctcaacggtgggaaacgcttcggccgcaaaatcgcgcgcatacatcagcatctgacgccaagtatcgctgcccagctgcgggaccgctgattcagctgcaagggcggaagcggctgctttcgcggcgtcccgtgactgagcagccttctgccgcgcctctttcagggccgctaggccatcgttgccgagggccttaaagatagcgttcgcatcggcgacaaacgtatcgaccgctgacttggccgcctccttgaccctcttaacaagtgccgggtcgctccccagctccagcttgattgcctgaagatcagcctcgtccttctcctcccacacggcgaaagaccgcatggaagcctcgtctggtagctgttcgtcagctttcagccttgccagcatggtcgagattttcgtgggcttgtcatatccctgcggcaatggggcctggtgggctttgaccaatcgcgcctcttcggccctgaagcgcccgtctagggtgcggaccgcctcagcgagattggtcagcagtgcgagttcgaagggtaaaaactcgatgttgcgctcagcgtcgacataaagcccggccgcatcactgtcgaagacggatatgcggcccagttcgggcggcggcgcattccgatcatcccaaacgacggtacgggccttttccccatcgacacggaaggtcagggtgacttcgcgtggatcggctgaggccggctcgaacacgttgccgcgcaaggtcacgtcatgcagacagtggcagattttcttggcgacgcgacaatagccactcttgcccgaaccgttggccccgtagatgagtgtgatgccattgatagcaaacttgatcggtggttgccccgccgccagacggtcgatgttgcgaagcgggccgatcgagcccagaacggtgacgggagcgaacttgttgccggccttgagatgcgtctttgtcaaggcaggccagaccggcgacgttcccgcagcgatccttgcgtccctctttactgcctcctcaagctggtcgagttcttcagcgtccagcttgggcttggcggtcaagagccggatggcttcctgttgccagctgggacgtgccgcacaccaatcaaataaatcgctgtcgcctgtcatggccaccccaataccgattgtaggtatagatagataaaatcatggattgtgcagtggatgtctgtcaggttgtattgtcaagctgcaggctgggggcaccccgttccccgtggccgcctgaagcgagatcggccagtccctttttgaagcgcagctcggcgaacatccgcgcaatgcgaagccgcttaaaggcttcagcggtgtactggagattcgcgacaactttgacggcgatacctatcggacggcctacacaacgcggctggagggtcctgtacgtcctgcacgcgtttcagaagaaatccaccaggggaattgccacaccgcaaaggcacgttgacctgattcggcaacgcctgcgggacgccgagtctatttataaggcaacaaaaggagaccgagccgctagactggtcgaaatgaaacaacctgacttatccaagctgctccggggtcaatttaagctggtttcagtggaaaagctgatgcggatgctgacagcgttcgaccaggatgtcgaaataacggtaaagccgcacaggaagcgcggcgaggccggccggatcacgttcattccggcctaaaggtactggggggttcatgtcattcaaagcaaccgtggctggaactgcgcacgaacccctcctcaactgccccaattgcaactacgaaatccggctgacggagtcactggcggcccccctcctcgcggagactcgccaacgttttcaggaacagcttgccagcaaggatgccgaggtcgcgcgcaaatccgaggagctgagccagcagcgcgaacagctcgctaaggatcgggaaacgctcgatgaccaagtcaagcaacgcctggccgcggagaggagccagttggttgccgctgaggccaaaaaggcgcgcgaagctgccgcagccgaattgaaggcgaaggcagatgagacggccgagctccgccaagcgttggaggccaacaacctcaagcttgccgaagcgcagcaggcccaggccgagctgatgcgcaagcagcgggcgctcgatgaggaaaagcgtgaactcgatctaaccatcgaaaagcgcgtccaagcgtcggtcgaccagattcacgcaaaagcccggcaggaagccgatgaggccgcacggctgcgggttgcggagaaagaccagaccatagagtcgatgacgcggaccatcgaggagctgaagcgtaaggccgagcaaggatcgcagcagtcgcagggtgaggttctcgaacttgagcttgaggaacttctgaagagccgttttcccatggacgtcattgagcccgtcggcaagggtgaacttggtgccgatatgatccagcaggtcaatggccagcttggccagcctgctggcatcatcctgtgggagaccaagcgcaccaaagcctggagcgatgggtggctggccaagttgcgcgacgatcagcgccgctccggggccgatgtggcgctcatcgtttctcataccctgcccaaacacattgagcattttgacctggttgacggcatatgggtggctcacccgcgctgtgccttgccggttgccgtcgctctgcgccaagcgctggtcgacgtgagcagctctcgtctcgtccagcaagggcagcagacaaagatggagcaggtctaccattacctgaccggaaccaaattcaagcagcgggtggaagccgtagtcgagaaattcaacgacatgcgcgacgatctcgatagggaacgcaaattcatggggcgccagtgggccaagcgcgagacgcagatattggcggtcgtcgactccacggttggcatggtcggagaccttcaggccatcgccggcaaggccatgccggagattccgagcctagatgtgcagcttttggagcatgacgctgacaccgagagaaaagcgggatgagcgaactcgcaaagggaattgaggcattcgtcgcttacgcaaaaaccctgaagggtgacgagaagggagaagctcaggttttttgcgaccggctattccaggctttcggccataagggttacaaagaggccggtgccgaactcgaataccgagtgaaaaaggcttcaggcaaaggaacgaacttcgccgacctggtgtggaagccgcgacttcttatcgaaatgaagaagggcagcgaaaagctgcatcttcattaccaacaggctttcgactactggctgaacgcggttcccaatcgccctcgttacgtcgttctgtgcaacttcaaagagttctggatttacgatttcgacaagcagctcaacgagcccgtggatatcgtgcggctcgaagacctgccgaaccgctacacggcgctaaacttcctgttcgcggacaatccggaccctcttttcggcaacgaccgcgaagaggtttcgcgtattgctgcagcaaaggtcgctcagctgttccgatcgatggtcgcacgcggcgttccgcgagagcaggcgcagcgtttcgtgttgcaggcggtcgtcgcgatgtttgccgaagacatcgacatgatgccggccggaacgaccctgagaatggtgcaggattgccttgagcacgggcaaaactcatacgatgtttttggcggcctgttccagcagatgaacaacaagacagctgccaagggcggtcgctacaaaggcgttccctatttcaacggcggtctttttgccacggttgcgcccgtcgagctgaccaagaaagagctggagctgctcggcaagaaggatgaaggggccgcttggcagaactgggccaagataaatccagcgatcttcggcaccatcttccagcagagcatggataagggagaacggcacgcctatggcgcgcatttcactcacgaggccgacattcaacggatcgtcgggcctacgatcgtgcgcccctggcgggagcgtattgacgccgcaaagacaatgacggagctgttggagattagaaaagcgctcctcaacttccgtgtgctcgatccggcctgtggcagcggcaatttcctttatgtcgcctacagagagatggtacgcctcgaaatcagactcatggccaggctggacaaagagttcagctggaagaccattcagaagcaggcccaggccacgtcactcattagtcctcgtcaattttttggcgttgatcgggactctttcggcgtcgagcttacaaaagtcacgctgatgctcgcgaaaaagctcgccttgaacgaggccgccgatgttctggagcgcgaccagatcgaattgcccttggcggaagatgatgctcttcctctcgacaatctcgacggaaatatcctgtgccgtgacgcgctgctgtcagaatggcccgaggtcgatacgatcatcggcaatccgccgtaccagagcaagaacaaggcccagcaagaattcggacgcgcctatctcaacactattcgaggggcttttccggatatcgacggacgggccgactactgcgtctactggtttaggaaagcgcacgaccagcttaagccgggtcagagggcgggcctggtcggcacaaacacgattcgccagaattattcccgcatcagcggccttgaccatatcgtcaagcatgatggcacgatcaccgaagcggtctcgactatgccgtggtcaggcgacgcggtcgtccacgtatcgatcgtgaactgggtaaagggcgaggacgatggcaagaaacgcctatacatccagtcgggaaacgaccccgccgggggttgggactacaaagatttggaagagatcaatacctcgctctcgttttcgactgacgtgagccaagcggaacgcatcaaggcgaacgctgaaaaaggcggctgctaccagggtcagacacacggtcacaagggtttccttctagcagtctgctgaaaaaccggcaaatt

SEQ ID NO: 205 - DNA, 6678 bp, Bradyrhizobium colbertium
ggattgcttcgcttcgctcgcaatgacggccaacccggcggccggacctcaaatcatcatgctctagaatttcatcgagacgcccgcgctggctgatttttccgtgcagctgttggtgctgacgcccgttgccgcgacggtgcaagttccgggagtggcgttgctatcgaggccatacttattgtgccaataccgataggcgacccagacgtcgacgaagtgactgtatttcgggccccaaaatgccttgctggcatcgaacgtcaagcggatcggttcgctgttcaattcgatcttgctggcggtgctgaaacgtccgacgccggacaacgcagggagggtattaatatccccctttggtcccgtcgcggaagcacggccactaatggcgaaatacctcatgctttccggaaggaagcccagatccatgtagtaattggtctcgatcctccaggtgggcgggaacaccctgtttccgtccgcaaggcaggttacgccgggaacgcccggactatagagaccgcactgaaggaatgatttgtggcttgctagtccatcgacgaccaggggcgccacgttgaagtagcctttgtacggaagatcgaaggcgaattgcagaccggcgacgacgttgtttgtcgtgggtgcataatagctatttgccgtaccgagatcgaggccagcctcaaatgaaatatttcgcagcggccctattttgaaagcctttgtgtcgaatatctcattccagccgaatgtgctgcgctctatggcgtagaattctgtcgcgccagcgcacgctcctggcgggccgaacggcagggtaccagtaggcgagcaaggtgaggcaggatcgttatgaccggacttcaacatgtcaacgttgaagaagttcgtgccataagcccaaatatcgaaatgggtgaacgaatagacctgctttgcggtcgtgccgttgatggtcccatttggctgagtgctaaaagcaccggggtctgtcgccgtgaactgataagagtaggtcagcctgttgtcattcacgatgaaaaacggaacctccggaatcggatttgccttgaccggcaccttggctggcgccggagcctgttcatctgcagccttggcgatcgatgacgaagcaatcaaaccgaccgcaagcaccgttcgggtcgcaactctggaaaaaagcatatttagtccccctctctggaaatgagttaccccccacgggcactctcaacacattggacagaacgcgacccagcatcggagccgatcaccgcaatccggtggccacatccatgctgatcgagttcgacctccggccagagtcatccaactgaccggaatcccgattttccctatacgcaagacctcttcgatgagggcgcctcgcgggcgcctggtgtatttccaacttcccatgcgaatactctcccgcaggaaatcatcctggcggcactcgaacctttgtttcgattttcgaaggcgctgcggctaactagaccaccgagtaggaacggcggaacatctcccctatgtgttctgcagcggtgcaagtagcaaaccgccgggggttgtcgggtgtgacgcaggttggaatggcgtcgataactgcatcagggttaggggaataaaagaacgggatcgaatatcgatcttgatggctcgtgttgttattcaccctatgcatgttcgagttgtatgtgccgttcgtccatcgggccatcaggtcgccaaggttgatgatgaacgtctcgggcgctggcggggccgtgatccattcattgtcggcgttgcgcacctcaagtccgcccacatcgtcttgagctagaatggtgataccgccccaatcggtatgcgcgcccgcgccaatctgattaaagttcgcgccaagggcctgcgggggatatttgatcattcgcagcgtagcggagggaacgttataaaacgcttcgaaccatcgctcgtcgagatccaatgaaagtgccatgagtgccaggatcctgtcaccgagcgcggaaaccgcgcggcggtaagcaagattctgctcgcgaaatccaggcaaatccggccattggttatgtccaaaggcgcgcacgcgccgctgataccacgggtcggcttcaggcagctccgcgccggagtagaagctctccttcaaatccggcggacccttggcgtctttgtcatcctggctatcgagaacctggccgccaaccggttcataacccgcgctcgcgggagatttcttcatgtgcagcgccattttctgctcaataggcaggtcgaaaagcgactttgccgcatcgaactgattcctgacgagttgcgatggaacgccatgccccgcaacatagaaaaagcccgtctcgcagcaggcgcgctggattgcggccgctgtcttgagcttccccgcatcggtccggtcgctgatatcgacgaccgggatggaggttgctgccttaggaggggaatagagcaacatacttgttgtcccttgctttggattcagacggatagttgtttggggttctcgacgtgaaggacgccctgcttctcgaagcagtttctgatatcgaccatcgcctggtgaaattgcggatgcagatgagcgtccgcccacttgcgcggcctcggcaggtcgatcttgacctcaagatctatgcgaccgggacgaggtgaaagtacaatcacgcgatcggccaggaagatcgcctcgtcgatgccgtgagtgatgaacaccacggtgttcttcaagcgcatccagagagcctgaaggtccgatatcatctgctcgcgcgtgagagcgtccaacgcaccgaaaggttcgtccatcaagaaaaggcctgggttctgaatgattgcgcgacagatagctgcgcgctggcgcattcctccagagagctcgaaaggcaatttggagccgaagccattcaaacccacttgggccagcaacttttgtgcgaacagactgtatttgcggcggtcgagaccctttatctcgattggaagaaggacattatcgaggattgttctccaaggcagtagatagtcgacctgaaagacagcaccggcgcgcggatgaggcccggtcaagatatcatcatcgacccttaaagatcctgtagacggctgatcgatgccggccaacatcgacagcagcgtgctcttgccgcagccgctagggccaacgatcgcgataaattccccgggctcgatgcgaaggtttatttcgccgagagcgctgagttcttcacccgccgccgattcgaaattcttggataacttctgcagttgaacggataccccggtcgtatcggtacttgtgtccttggctgtgggtcggggcagctcggcagtcatcggcctcagtgcccgctttgtgatcagcacccgctcagcgacaagaagcagcatgtagagaccgacaccgagaagggcgatggaagccacagcagcaaagttgagcgttgtatcgaaattggaattcgcttggagctggatgtatcccaagcctcgttccgacgcgacgtattcaccaagaacggcaccgataacagccagcgtcaaagctacctttaggcttccgaagatagccggaagggcagccggcaatcttatcttcagaaaaatctgccgctccgatgctcccatcgaccgtgcaaggttggcgtatccctgatcgaggcttttgaaacccacgacggttgcgaccatgaccgcaaaaaaggaaataaagaaggaaaggaagaccttcggtccccagccatagccaaagtagagcacgatcaagggcgccaaagcgattttcgggatggtctggagagcgatcagaatcgggtagagggcaacctccaggatgcgcgagtagaagatcaacagcgcgatcccgacacccaccacggctgccagcgcgaagcctccaataacttcgatcgcggtgacccctgcatgcgtcaggagcaaggggtaactcgtgatcatgcgcgcaaagatggcggaaggccgcggcaacacgaattcactaatgccggaatagcgcgcgacaatctcccagccgatgatcagggctgcgccaaggaccggggccgcaagacgttcgaaaatcaacattcttctgcgtcgccgcaaccgcgacgcgcgtacagagtcttgcctgcccggctgcatcacaggatctatgggcttaaggcgatctgccaacgacatggcaacctccgcatcggtccggatcgtcatttggaccgagccaggagactattggtgtaatagctatccagcggtttgatttcctgaatttcccctacgcctttgagcaggtcgagcgccttttggagcaatgctggatcaatccagccaaacggctttcctgccacctgaggaatggcatgtgccgtttcgatcacttgcttctcgacaacgtcgttggatggcggcgccgcccaattcttgacgagttctgcggtcgcaacccccgggttatccttcatcacgccgatgccccggttcagggctgcaaggaattctgagatcttttcggactctcggctgagctttgcatcgctcgtgacaatggagaggcccgggagggtcagtccattgtctgccaaattcagggtgatgagggattgcttggcctgttgctcgagcagcggagcgtcgacattgagataggttccaatgacatcaacgtttcgcgagaggaactggctgttgcgggcttcaatcccgaccgagaccttgctgatcttctcacagtcgacattgttgatcttgcaaaaggctggcagataggtggcgacggtgtcacccggagcgacgatgaagctctttccctccaagtcagacggcttgcggaccggcttgtcggggaacgacaaaatccccagcggggttttcgggtggtagagcgcaacgatcttgatcggcattcccttggagatcgcagtcagggcgaacgctgccggtagaaccacaacatcctctttgtcctgaagaagaccgcccaaggccgccgacgcaccggcgccttcgccaagcgacacgtcgagcccgtgctcctggaaaaggccctcctccttggccacgtagaaggcggcatattcccctttcagtttccatgaatatcttacattcacagactccgacgaataagcgactgccgaggacatcagcaacgccgttgcacctgcgatcaatctctggagcatcttcatctttcgacccgacgggatcattgtcttcggtagatatttctgggatacgtttctggctcgaagatgcataggcagactgtcacctcaaagcattttgattcgcgcaatccgttgcctttcgagcaacgccactttcatgtgcaaacggattccgcttaacgaggggccaactgcatcagctcggtcacctggcaagtctcgatccgacatgcaaaaccgaacgctgtttggcatggaagaaatcaaggttttcgcgtgtttcaacgccttcgcggcattgccgcttttacgggcaccatttgccgaagatgcgcgcagagcggctgcaaacaggaagtcccctcacacgccggtgaccgagtggccaccggcgtcgactcgtctgaacgtcacggtgacgccggcgtacccttttcttcgacgcgcttatggtagcagacgcggactcgacctatgtcagggccgctcactcacaaagcttcgcatcttcccgggattgagcagtccgtgcggatcgacctcacgcttgaagccgagctgatccgcatcggcgcgcttgtaacgactgccgtcctcgacggtgaagacgtgagggttggcaatgaagacgccgcgctcttcatgcagccgtatgatgtcgttcaggcgatctgcatcggtgtagcggatcactggcaggctgctgcaggtgatgcggccaccgaagcgaatgaactcgaggtgctgcaaaacctcgtccccaaacagctcccgcatctcgacgaccttttccaggacgcgctcatgcgggtagaggcattgcaggtaggtcacggaacgatcggtcttcagaacctgtagcgtggtgtggttccagcaatattcgtagagcgggatccggctcgggctgtcatcggttggcatctccagcgtgatcgtgccgcggcggccaagaagcgacctgaaactctcgagagagggctcggcgatcatcgccagcagcacgcttttcccgtcggggcaatgcggcttcagcgccccgaaataagatggcaacggccaggtgatcggtgcgagaacctttttcacgattccgtcggccaaagcggcctcgtagccgaaggctgcggcgtccaagaaatcgtcgaaggccaccacgacgtcgatccatttccatgccggcgcgagcggcatttccagcgctgtgatgatgccggtggtgccataggcgcgattgaccttctgcgccgcgtcgccgcgcagttcaatcacgcgcggctcctcctcgacggtgacaacgcgcgctgccagaatgttacccggatcccgcaaaccgccataggtgatggatccgatgccgccgacccgcccgcgacgaagccgccgatcgtcgccatgcgcttggtcgatggatgcagccgcagctcccacccctctgcctgcgcagcagcgtcgatagcgttcatcttggcgccggcgccaa

SEQ ID NO: 206 - DNA, 47060 bp, Bradyrhizobium colbertium
  misc_feature (28029)..(28038): n is a, c, g, or t
cgttatgggacctgcaaaagacgctgccgatccgcggcgcgctgctgatcgcggcgctcgccctgggcggctgttcgagccagctcgcggatctgacacccgcggatgcgcagtcggctgtcagggagcccggcagctatctgccggtgcacgatctgccgccggaccgcgatgaggcaatcatcccgcctgagcagcgcgccaagatcgaggccgagctcgccgctgcgcgcgatcgtcaggccgttgccaccaaggacgccaaataggtctgggaggcggagactggcaaggtaatcgctggcgcctccgctttgccgtgctaaaagacgtcggtacagccaagagtcagggcgaacgacttcagtcttcgtcgtcgatgattgctctaaatatttgattttgagcacttttcgcggtgagatcgatcgcgttttggagtggccctcgcggcctgccgattctgtccctgaccggttgcccggagcccagagagccatggaagaattttaccgcattcgccgccttccgccttacgtgttcgagcaggtcaaccgggccaaggcggctgcgcgcaatgccggcgccgacatcatcgacctcggcatgggcaatccggacctaccggctccgccgcatgtgctcgagaaactgaaggagacgctcggcaagccgcgcaccgaccgctattcggcctcccgcggcatccccggcctgcgccgggcccaggccgtatactacggccgccgcttcggcgtgaagctgaaccccgacacccaggtggtggcgacgctcggctccaaggaaggtttcgccaacgtggcgcaggcgatcaccgcgcccggcgacgtcatcctctgtccgaacccgagctatccgattcacgccttcggtttcttgatggcgggcggggtgatccgctcggtgccgtcggagccgacgccgcaattcttcgaggcggcggagcgggcgatcatccattcgatccccaagccgctggcgctcgtcgtctgctatccctcgaacccgaccgcctatgtcgcaagcctcgacttctacaaggatctcgtcgcgttcgcgaagaagcacgagattctgatcctgtccgatctcgcttacgccgaggtctatttcgacgagagcaacccgccgccctccgtgcttcaggtgccgggcgcgatggactgcaccgtcgagttcacctcgatgtcgaagacctattcgatggccggctggcgcatgggctttgcggtcggcaatgagcgcgtgatcgcggcgctcgcccgcgtcaaatcatacctcgattacggcgcgttcacgccggtccaggtcgcggcaactgctgcgctgaacggcccggacgattgcatcaaggagatgcgcgacacctaccgcaagcgccgcgatgcgctggtggaatcgttcggccgcgccggctgggagatcccgccgccggaggcttcgatgttcgcgtgggtaccgctgccggaagcgttccgcagcgtcggcagcatgcagttcgcgaccctaatggtggagaaatccggcgttgcggtctcgcccggcgtcggcttcggcgagcatggtgaaggatatgtccgcatcgccttggtggaaaacgagcaacggatcaggcaggccgcacgcggcgtgcgccgcttccttgaaagcggcatcgaaacattgcacaacgtggttccgctcgccaaccggcgctaattcccttctgcaggttttctgaagcatcatggtcgcacccctgaaagtgggcatagcggggctcggcaccgtgggtgccgaggttgtccgtttgatcgaaacgcaagcgcgcgtgctcgcgggccgtagcggccgcggcatccgcgtggttgccgtcaccgcgcgctcgaaggcgaagaagcgtggcatcgacctgcgcggtttcgaatgggcaaaggacccgatcgcgctcgccacccatccggacgtcgattgcttcgtcgagctgatgggcggcgccggcgatcccgctctgtcggcggtcgacgccgcgctgagcgccggcaagtcggtcgtcaccgccaacaaggcgctgctcgcaaagcacggcgtcaagctcgccaaggtggctgaaaagcatggtggtgcgctgaatttcgaggcagcggtcggcgcagcaatccccgtcatcaagacgttacgcgaaggtcttgccggaaccggcatcgaccgcgtctacggcatcctcaacgggacgtgcaactacatcctgacccggatggagcaggaagggctgtccttcgccgaatgcctcaaggatgcgcagcggctcggctatgccgaggccgacccgtccttcgacgtcgacggccacgacaccgcgcagaagctcgccatcctcgccagcctcgccttcggcacgaaagttgctcaaagcgccgtgtatgtcgaaggcatctcatccatcgcgccggaggatctgcgtgcggcggccgatctcggctaccgcgtcaagctgctcggcgtcgccgtgcgcaccgccaagggcatcgagcagcgcgtgcatccgaccatggtaccgaaatcctcctcgatcgcgcaggtgatgggtgtcacaaacgcggtcacgatcgacggcgagggcattccgccgatcacgctggtcgggcccggcgccggcggtgcggcgaccgcatccgccgtcgttgccgacatcgccgacgttgcgcgcggcattcgcgccaatccgttcggccggccgatctcgcaactccacgacaccaagaaggcgccgatggagcggcacgagggcggctactacatccgcctgctcgcgcgcgacttccccggtacggcggccgcgattgcgacccggcttgcagagcagaagatttcgatcgagtcgatcgtgcagcgtcatcccaatggcggcgctgcgcctgcaaatggcaaggcggcacccgtgcccgtcatcctgatcacctatgccacacacgaggacgccgtgcgccgcgcactcgccgccgtgcagaaggacaaggtgatcagcggacggccgcaggtgatccggatcgagaagaactgacacggttcgaacgaactgtgggtgctgtgagttgatgcgggcagagaagtctgtcccaaactgtttcgaaggagtcagccgatgtcgacccatatttcagtcccgccgcaagcgttgcttgagcggatcctcacgctggagatcgtgcgggtgacggagcgggcggcggtgtcgtcggcgcggctgcgcggccacggcaacgagaaggcggcagaccaggccgccgtcgatgccatgcgacgcgagctcaacaagctgccgatccagggcaccatcgtgatcggcgagggcgaacgcgacgaggcgccgatgctctatatcggcgagcaggtcggcctcaaggcggggcccgaggtcgatatcgcggtcgatcccctcgaaggcaccacgctctgtgccaagaacatgccgggctcgatcgctaccatggcaatggccgacggcggcacgctgctgcatgcgcccgacgtctacatgcagaagctcgcgatcggccccggctacgacaggggcgtggtcgatctcgatgcttcgccggccgacaacgtccgccgcctcgccaaggccaagggcgtcaagccggaaggaatcaccgtgctcgtgctcgaccgtccgcgccatgccgacatcatcgcgagcgtgcgctcgaccggcgcggccgtgcgcctgatcacggatggtgacgtcgccggcgtgatccactgcgccgaccctgataacactggtgtcgacatgtatctcggcaccggcggtgccccggaaggcgtgctcgccgccgtggcgctgcgctgcatcggcggccagatgcagtgccgtctcattctcgattccgaggagaagcgcgagcgcgccgccaagatgggcgtcaacgatcccaagatgatctacggcatcgaggacatggcgcgcggcgactgcctgttcgccgccaccggcgtcaccacgggctcgctgctctcgggcgtcaaattccgtaaggatggcgtgatcgagaccgagaccgtcgtgatgcgctccgtcaccggcaccgtgcgctacatcaaggccgagcaccgcgagctggccaagttccatttggattgacgctttccgtcattccggggcgacgggaccgcgcaagcgcgggcccggagagcccggaatccaacgggcggcagactccgacgcgaaatggattccgggctcgatgctgcgcatcgccccggaatgacaacaagacaatagcgacaacaagaacaagcagggaaaccgcccatgtccgatctctccgccgtcaaagccctcgtcttcgacgtgttcggcactgtcgtggactggcgcaccagcttgatcaccgacttcatgtggtgggcgaaaggccgcggcatcagcgccgactggaccgcgctcgtcgacggctggcgcggcatgtacatggcctcgatggacgacgttcgccagcatcccgagcgcggctatgtcatgctggatgatctgcatcgccgctcgctggacaagctcgtcgagaagttcgcgatcaaggggctgacggaagccgatctcgattatctcaccaagggctggcaccgcttgcacccgtggccggacagcgtcgccggcctgacccggctcaagacgaagttcgtgatctcgccgctgtcgaacggcaatgtcgcgctgctcaccaacatggcgaagtttgcggggctcccgtgggacctcatcctgtcggccgagttgttcgagcactacaagcccgatccggaaacctatctcggcgccgcgcggctgctctgtctcaagccggaagaggtgatgatggtggctgcccacaacggcgatctcgcggcggcgcagaagaacgggctgaagactgccttcgtggcacgaccgacggagtatggtccgcttcaaaagattgacttcgaggcgaccggcaattgggacatcgtcgcgaaggattttggcggcatcgccgacaggttggggtgctaacggcgtttccggtgatgtgcgcggcaacatcggtccgggcagcgcaagcgccgcccggagctgatctgcgttaaagcgtcattttcatcggctccggatagtagcggaagccttcgcctaccttggcgacatggccatagcccggccaggcgaagtgataggacatcaccgggatcttgttcgttgcgagcatcgtcaggagcttgacgcgcgactcggccgcctgcttcgggtcggagtcataggagaactccatccgcggccgctccagcagcagcaccgaatggtgcgagaggtcgccgaggaacgcgaacgatttccccgccgaggagaccatgaagatggtgtggccgacggtgtgtccgggggcggcgatcgcctgtacgccgggcaggaattcctggccgtccttgaagaacacgatgcggtcgcgaaccggcagcaggttcttccgggcgtgaatgacgaaatccttggcggcgctgccgagcttgccctcgtcggtccagaagtcgaaatcgctctgggcgatgtagatctgggcattcggaaacagcggcttgccgccttcgtccacgatgccgccgatatggtcgatatgggcatgcgagcagacgacggcgtcgatgtcgcccggcttgataccggcttccgtcatgctcttctgctgccggccggtgctggcgccgaacatcttcgagctgcccatgccggtgtcgaacaggatgagcttgtcgccggtgttgacgatcggcgaattctgctcgagcacgacgttgtccggcgacaggaaattgtcggagagcatcttcttgacctcttccttcggaacgccggtgaaggtccccgaggggtctccgaggggcagcggcccgtcggatacgacggtcacctcggcgtcgccgagcacgaagcggtgccagtagggcgtctgagtaccaagcttgggcgcccgcgccatcgcgctgctgccgagcatggcgctagcacaagacccgccccgagtgcgagcagggaccgacgagagacatcgattgtcatgcgtttcctccgctttatttttcgcaaccatttgcgcgttgcgaccggcctggagccggccgcgcgatgctgcgctggtttgaacaagctagcaagtggaattggttcggggttgatcgctgctctcaaagctggcacggaaattctggcgcatggcatacgcgccgtcgccgacgttcttgccgtcagaacgattccatgggtcggcgcaagacaagcaaggtttgtgtcgtgatcatgtctgctggtcgcgtgacctgctcgatctcgtgaggatctcgtaaggcgaccggcggcgttcgcctcatgctccgcagacaatcacgccataccagccgagcccgcgatacgtctcgtagccgggggttgcatggaatgccaccagcgtacccgtgcggtcgtgatagaagccggagcgctggccgttcagcgaaagcgagatgcgctcgctgaggatgccctgaccatcggaggccgcgatcacgcgaaaattcgaatcgaccagcagcacccgggccttgtcgctgtcgccgacgcggacgccttgcacgatggcgcgggcttgcggctcccagtcaaagtggatggcgagcacgccgatcggcgcgccattggcctggccgccggcgcggacgctggcgcaataggtcgcgacctgcgcattgccgagcagcggttggttctcgacgtcgccggcgacataatcgtcaccggagcgaagacccttcgcctcgcgaaaccacttggtgtgagcgacgttctcgccgacgacgcgaaagcgatcggcccgaccattggcgatgacgttgccgtcgagatcgcagagccagaggtcgagatagacggtgtaggcccccaggatcacgccgaggcgctgcgaggcatgggagacggcggcagcgctgggcgaggccgcgcaatcgaccacggcagagtcggtcgcccaccagcgcacgtcgcaggtacgttcatagagattgcggtcgatcagctcgatggcgttcagcgacaggtcgaccatgcgttccccgcgggagcgctggctcatgcgctcgatcgaggcgacgagatcgccggtgcgcttcgtcaattgggtttcgagctcgcgggcgatggtctcgacctgctgtccgacgccgcgcacctcctgcgcaaccaccgcaaagcccgcaccttgggcgccggcgcgcgagctctcgatcagcgcgtttagcgccagcatcttcatctggttggtgatctgctggatcgatttggtcttgtcgaccgcgatctggttgacctctgccgtaaggcgattgatcagcgcggagacatcggaatcatcgtccgcgggttcggtagcactcggcttggttttcagacccagcgcagcagacatcggggagcttcccttggcaatgaggtctgatctgcaatgaacccggaacaatcaattacagatcgaatacgattctttttcgaggattccacctaacgcccgcttaatttgctgttcgacgggatgcctaaatggtagtcactctctcccgggccgacggccatccaccgctttgtgcggccgggccgttgcaaatccgggccgattgccggccaatccccggaagccccagtgaccgtgcgtccgcgtgatcgcctggacccgagttccaacagcctgcctcccgtcatgacgccgcctgctaccgccttgcccgtcgaagcgccccaggctttcctgggcgtgtcgcgctcgctgaccgacaagctttggcgcgaccgtctggacgggcgcggggcggcccaggcgctcgccatcgtgcagcgacaccaattgccggagctgctggcgcgggtgctggccggacgcggggtcgatatcgacgccgtgcccgattttctcgatcccaccatccgcaagctgctgccggatccgttcacggtgacggaaatggaggccgccgccaagcggatcgccgatgctgcagcgaggaccgagaaggtcgccatcttcggcgactacgacgtcgatggcgcgacttctgctgcgctgctcgcctggcacctgcgtcattgcgggcttgatccgctgatccatattcccgaccgcattttcgagggctatggcccgaataccgaggcggtgcgagcgctcgccgcgaagggcgcgacgctgctggttaccgtcgattgcggcaccaccagcatggagccgcttgccgaagccaagcgcctcggcatgtccgtggtcgtgatcgaccaccaccaatgcggtctcgatctcccggaggtcgacgcgctggtcaatccgaaccgccccgacgatctctccggcttgggtcatctcgccgccgtcggcctcgtgctggtgacgctggtcgccgtcaatcgcgagctgcgccagcgtggcttctggagcaacgagatgcctgagcccgatttgctcggcatgttgcatcacgtcgcgctcggcaccgtggccgacgtggcgccgctgatcggcctcaaccgtgccttcgtggccaagggcctgatcgcgatgcgccggcgcgaccacgtcggtcataccgcgctgatggacgtggcacggctcaacggcccgccggaggcctggcacctcggcttcatgctgggaccgcgcgtcaatgccggcggccgcatcggccgcgccgacctcggcgtgcggctattgctcgagggcgacagcgtcgaggcggcgcggatcgccgccgagctcgaccggctcaacagtgagcgccgtgtcatcgagcaggccgcggaggcgcaggctgaagcggaggcgctggcctcgatcggactggaggataagctcgcggtgatcgtcacggcctcggaaggctggcatcccggggtggtcggcctcgtcgcctcccgcctgaaggagaaattcgcgcggcccgcttttgccattgcgctggagcccggcggcatcggaaccggctcgggccgctcgatcgccggcgtcgatctcggcaaggcggtgcggcaggcggtcgccgacggcatcctgctcaagggcggcggccatgcgatggccgccggcgtgacactgcggaaagagaagctgtccgaattccgcgcctatatggagcaggcgcttgcgcgcgacgtcgccgaggcgcgccacgtcaacgagctctatatcgacggcgcggtctccgcacgtgcggtgacgccggagcttgcgacgacgctcaaccgcgccggtcccttcggcagcggcaacccggagcctgtgctggcgctgccggcgcaccagctcgtgtttgccgacgaggtcgggcaggcccatctgcgccttcgcttcaagtcgggcgacggcgccatcgtcaacggcatcgcattccgttcggtcggccagaagctcggcaatgcgctgctcgccaaccgcggccagcagctgcatgtcgcgggatcattgtcggtcgatcgctaccagggtgccgagcgcgtgcaattccgcgtcgtcgacgtcgcgctaccggaccaggggccatccgtgattagatagcaacggtcgctaacaacaaaaaaagggagtgaacatggcagggcaggttgagggcaaggtcgcgctggtgacgggcggcgcgtccggaattggcgaggccgtcgtcgagctgttcgcgcgcgaaggcgccaccgtcattgcaaccgatatcgacgagctgaggggccccgaactcgccaggcgcgtcacccaagccggcggcaaggcgatcttcctggagcaggacgtcaccagcgaagagcgctggatggaggtggtcgccgaaattgcgaagcgctacggccggctcgacatcttggtctccaacgcgggtatcggcatcgccgtgccctcgatcgtcgacatgacgttatctgactggcgcaagcagaatgccatcaacctcgacggcgtgtttctctcggtgaagcattgcctgccgttgatgcgcaagaccggcggcggctcgatcatcatgatgtcctcgctggcgggcctgcgcggtgcgcccggcctttccgcctattcgctcaccaagggcggcgtgcggctgttcgccaaatcgatcgcgatggagtgtgcggcggtgggcgacggcatccgggtcaattcggttcaccccggcattatcgatacgcccatctggggaaagatcccgacgggagcgaccggcgcgggccagaacgccccgatcgatcccgaggagcgcgcccgtgtcgtgacgccgctcggccgtgccggtcaggccgcggagatcgcctcgggcgtgctgtatctggcctccgatgcctcgcgctacgtcaccggcagcgagctcgtcatcgatggcggcatgaatgccgggggcgtgccgcggcgcgcataagccacgcagggcagggcggcgcacgcaaggggctgacgtgcaagcgccagccctgtacaacgcggggagcttaccgacagaggtgtccttcgccatggcgcacagccttcatgcttcctcacccgcgccagcgccaatccgctccaaccggccggaccttgcgaccgatgcgatccgcaccgcacgcgaggatcttgccgcctgcttccgcatggcggcgcggaacggcttcgaggaaggcatctgcaaccacttctcggccgtggtgcccggccatgacgatctgttcctcgtcaatccctacggctacgccttccgcgagctgacggcgtcgaagctcctgatctgtgatttccatggcaatgtgctcgacggcgacggcgtgcccgaggcgaccgccttctacatccatgccgagatgcacaagcgcctgccgcgcgcgaaagtcgccttccacacccacatgcctttcgcgacggcgctgtcgatgactgaaggcgaccccttgatctgggccggccagaccgcgctgaaattctatggccgcaccgcggtcgatcgcgactataacggcctcgcgctggacaaccgcgagggtgcgcgcattgcctctgccgtcggcgatgccgacatcgtcttcatgaagcatcatggcgtgatggtgctggcgccgaccatcgcggaagcctgggacgatctctattacctcgaacgcgccgccgaggtgcaggtgctggcgatgtcgaccggacgcaaggtgctgccggtcgatccggccgtggcggccgagacctacaggcagatgcgcgagggggatgccgaatccgcgcggctgcatctcgtcgcaatccgtaggcagctcgatgcggaagagccgcagtatcggcattgatctcagcgggtccttcccgggcgcgcgaagcgcgaacccggagtgaccgtatgagaggacgtcggcctacaacccctgccgcagcttggccagcaccttcagcccgccatagccatccgccggcgtgatcccggcgcgctgctggaaatccttgaccgccttcatcgtatcgttgccgacgcgcccgtcggtgccgccggtgtcgaagccggccttggtcagccgcgtctgcatctcctgtacttcggccagcgtcaacgcgcgctcggagccggggaacggctggatgaagggcggtgcgcccaggcaacgatcgccgagatggcagatcgccagcgcatagttcatggaagggttgtagctcttcaccgaatagaagttcggtcccagcaggaaggtcggcccgcccgcaaccggcgtccacatctgcgcggatgcgttcggctgcggaaacgaacggccgtcggcgcgggtcacgccggctgcctgccacgccgcataggtgcggcggccgctgaggttgccgggcgcgcgcacctcgtagccccaatgctcgccgcgatgccatttgccgcggttgacgaggtattttgccgtcgaacccagcgcgtcgtcgggcttgccgaacggcgataccctgccgtcgccgtcgtaatcgatgcccacattgagccagacctccggcatccattgcgaatgtcccatggcgccggcccaggatccccgcatttcttccggcgtgctccaacccttctcgacgatgcgcagcgcgttgatcagctcggtctcccaataggtcttgcggcgcggctcgttccaggcgagcgcagcgagcgagggaaacaccggcctcatgtgattctgctgcaccaggggatcgccataggcggactcgacgccccacagcgccagcagcgtgccgcgctcgacgccgaaatcgcgctcgatgcgcgcgaacaaagcctcgttgttcttcagcgcgatcttgccgttgatgatgcgccagtcggacacgcggcggttgatatattgccagatctcctcgcggaattcaggctggttgcgcatctgcctgaacacgctcatgtcaggctcgacacgtcccatcgcgcgctgccatgtcgcggcggagatacctttggccgtcgcgcgcacgcggaaggtctcgcgccactcgtcgaagcccgcgggtgccgcgagagcgcggtccgccgacgcaagcagggcggtcgcaccgagtgcagatttcaggagggtgcggcgggtgtattgggcgcaggaatcagtttgtgtcatccagccattctagcgggaaacgtggcccatgtgagccggttcccacagggccggaacaacccgtttcccgcggaacaaagtgtcgcagtcctgcattccctccgaaggaaacgaggaggagaagatgaggaaagttctgtttgccgccgccatggctaccgcgatcgcggcgcctgcattcgctggtgaagtcggcgttcatgttggtccggtcggtgccggtgtcactgtgggccagtcgccggattaccgcgtccgcgagcgtgatcgcaccacggtcatcaaggaacgcgagccgtcaagccgcaccacggtgatcaagaaggaagatgaattcggcaatcgcagcaaaaccgtgattcatcacgacaacgactgacgaataggggcctcggctttggctggggccttccttcaccattgattgatcgagccgggggtcggatgaagatacgcgcgcatgcggaaagccatgttgtcgagctcgacgacggatcgcaatggcagatctttcccggcgacctcgcggccacgctgagctggaagcccgagaccgatctgcacttggagcggagcgccgaccgtgtgagttcgcatgtgctggtgaacaccgccgaccaaagctgtgtacgggtcatcgcggccgatgagacctggcccgacggcgaggtcaagaatgcgctgaaagatgggtagaggggcgcgcccgcggctccgaggggacgtcgtctaaccctcctgtaggtcagtcgcaatcgcggcaagccaatgccggattgcggcttcagctttcctatccaaatccctggcgagacgcttttccagttcgagcacacgctgccggcactccttcaacagcgtggcgccgcgcagcgtcagtgtccattgctggatgcggccgtggaccggatgaggcgtcatcgcaatggctccgtcgcgatcgagattgcggatgatgacgcccacggtctggggggtcaggaaggtgaggcgggcgacgtcggcgcctgacaggcccggataggcattcaacatcgtcaataccgcgaattgcggcgacgttacgccgagatcggcaagggtgcgctccatcttcagccggaccgcggcatgggcctggcgcaggaggtagccgagataaccctgctcgccgcgcttgccttcgcccggagcaggaacatgcacggtgccggcttcgagcgcttttcgtcccggtctcacgacgtgtttcgccttgcgcgtcatatcagagctcttataagatgtaagggttcatataacaagacgaggtgaacggcaatgtcacacgcccgcagcgaatacgaggatttcaagaagatcgctcccgatgcctatgatctggtgttggcgctcggccagctcgcggccaaggctgggctcgacaagcagctgctcgaactcgtcaagctgcgcgcctcgcagatcaacggctgcgctttctgcgtgcagcatcacattctcctgtccgaacggattggtgtgcctgcggacaagctcaacctggtggcggtctggcgcgaggcgccgatcttctcgtcgcgcgagcgtgccgcgctggcctgggcggaggcgctcacctgtctgcccgagggcgtcagcgaggaggtctacgccgaagcgtcccgcgagttctccgagaccgagctgatgtacctgacctcggccgtcgcatcgatcaatgtctggaaccgctttggcgccgcctatcgctggacgccggcgaagcgaccggccgtcgcggccgccgctgcctcctgatcagcagaaggggaggtcacgatgtcggccatcagcgtttcggccctgccatacccggcaccgtcacgttcgacggcgctcgccgtcgttgcaggactcgcctgcgcgcttgcgattggaaaagcgctgccggtgacgatcgacagtgtatcagacgcgctagccccgctctgtgccactgcggcggagagttcgccgctcgacaagatcgagccgatcggctcctacgcgctgccgaacgtccccggcaagcgcgtgaccatcgtgcgcgtgtcctatggtcccggcggattttcacggccgcatcgtcatgcgggctctgtcaccgcctacatcaccaagggcgagatccgctcgcagctcggtggcggcccagtcgagacgttcggggtcggccagtccttcttcgagccgcccggctcgacgcatctggtctcggccaatgccagcatgacggagccggcagagttgatcgcggtgttcgtcgcggatgagggcgcgcagctcacgactttcttggattagccgccattcgtcgtctcggctgcgtattcaagccggctccgatcgcctcaacagcttccatgccggcgagaggccgtattcgacaaccggaatagcaatcgcgccgacaagcagtccaacgacgcccgagatggccgcctcgaccgaccaatcgatgatgccggcgacggagggaagaaggtgtgcggccgcctcggttgcagcatggacggtgtgaccgaccgcgggcgggccgtatttctcgatgccgtgcaggatgatgccgccgccgacccagatcatggcggcggtgccgatggtgctcagcacggccaggaagataggcatgccgcggaccagcgcgcgtcccagcatgcggatcgcgccgccgatgactgaggcgccgtcatagcgcgcaagcgccatgccggcatcgtctgccttcacgatcagagccaccacgccgtagaccccgacggtgatgaagacaccgaccagcgccagcaccaacgcctgggtccagatgctgcccgccggaatcgccgccagcgtgatcgccatgatctccgccgacaggatgaagtctgtcttgatagcgctcgcgaccttctcgtcttcgaccgagcgggcattcagcgcaatcggctggagctgagcttcgtggtgatgcgcatgatggggcagcaccgcttcgagcaccttctcggcgccctcgtagcagagaaaggctccgcccagcatgaggagcggcgtgaccgctgcaggcaggaagtatccgagcaacagggcaacgggcagcagaatcagcagtttattgcgcagcgatccgagcgcgatcttgccgacgatcggcaactcgcgtttcgatgcaaaaccaatgacgtagttcggcgtgacggccgcgtcatcgatcaccacgccggcagcctttgtgcccgctttggcagcctggcccgccacatcgtcgagcgaggccgccgccaccttggcaatccccgcgatatcgtcgagaagaccgatcagtccgacgctcatcaatcctgtcccttcttcgttcgaactggcggtggtgcgcgacgacaatcttgcatagccaggcattggaacgagcaagccgtcaattgtcgccgctcgatccctcgcgccggtgcggcttgatcacgtcttccggcagagcgtgagccaccggctgcgacgtgactgcgatatctgggccgatctcgcggccgcgggcgcgtatcagccgctcgtaggccgagaccagcgtgacatagggactgacccagatccagccgtcgcgggtgaacacctggacgtcgaaatgcaggtgcagcgaggttccggcgggacggtcgagatagttcgagaccacgccgatcttttcgccttcgctgacgaggcggccgttgacgaggccgtcggcgttcatcgcctgcgggttcatgtgcatatagcggaagcggatgtgctcggtgcggctgttgatctgcagcgtcgcggcctggtccctgacgccgcggatcacgatggcgtcgcgcaccgcgacgacggcacgctgcttggggtcgcagggctcgcggccttcgccgggcgacgggcagtcggcggcgcgaatgtcctcgccctgatggccgtatccgccggcgcattgccacacctcgaaactgcgcgcctcgcagaaattgtcgcgccagggataggcggtcggaccttcgccgctcttgtcgcgcttgccgtaggattgcgagcgcacgaaagcgggtgccttctcgagcggaaagcggatctgcgcataggccatcgcgtcgggatggccgccttgcttacggtagccggtattcgggatgatatcgccgctcggccggtagctgaaatccggcgaacgcgccgcggggcgatcgatgacgttggaggcaatgtccgtcaacggccgcatgcgctggccgcctgcgactcgcagcgccctcaggaagcgctcggcgaccggataggcctccttgcaggcgagccgccgcggcttggcgacgctgtcgaggcattggatcgataccacataggcggcgccgaagcgggtgaaagcgtagcgcacataaccttcccggatgaacctgcgcagatccggataggttgtcgcgagcggcttgaccggctcgcccttgccgccggcgggatcggcgatgtcgtagacgagtgccgagccggtgatctgtacctccacgggccttgcgaacacccggctcggcatgccctcaccggcgccgggctccaacgagaaggtcgcgctgtaaccggccggaccggcatggaacatgtcgacgggattgaagtcggcctggtagcgtgacagcgcgagcgtcaccggcgcgccgctgcgctgcgcctcgatgtatgcggcgacgtcgaacggcagcagcacaggtacgggacttcgggcaatgccggtgaagaagcgcgaagagaccgcattcagctgcaccaatgccggcatcgcgcgcggatcgtagcgcggcaccgagcggcggggtgcgaagatgaactcgcccgcaatctggggacggctgttgatctcgatccggagttggtccagcgctgcgcgccagtcgacgcgcagggccgtgagcgaggggctgcggaattcatccgcagcgaggggggtggcaacgagaagcggcagcgccagcagaagcgagacgaagcggagactctttctgcccactgcctcgccccccggcggtacctgttccgatcctcgattgctcgctcagtccttggcgcgctcggcgtaggagccgtcttcggtcatcaccaccacccgggtgccgacggtgatgtgcggcgggacggtggtgcgcacgccgttggagagcaccgcgggcttgtaggaggaggaggcggtctggccctttgtcacgggttcggtctctaccacttccagcgtcacgcgctgcggcagcgcgatcgcaaccgggttggtgtcgtgcatggacagcttgacggtcatgctctcctgaaggtaggcggcggcatcaccgacgacgtccttcgagacctggacctggtcgtaggtctcggggttcatgaagtggtagccgtcgccatcctcgtagaggtaggtgtagttgcgctcctcgatcgtggccttttcgacctggtcggtggtcttgtagcgttcggagatctttaccccgtccgagattcggcgcatttcgatctggctaaccggggtacccttgccgggatggatgttctcggcgctcacgacgacataaagcttgccgtcttgctcgatcacgttgcccttgcgaatagaactggcgatgactctcaaggctgtatttcctgcttgcttggcccggctgcggccaggacgtggtcaaattgatgggggacttggggcctcaaatcggaccttggcgcccgtttcgggccgcaacatactgattttgccgttggaagccagcactttgctgccggctggggccaccggttgatggccggggacaagccgttgtcgccattctgggcgccctcgcggcaccttgaccggcgtccgttcctccaggccaggggagccgtgaccggggcgttgcggggctttttcgccgaacagggcttcacggaggtcgaaacctcggtcctacaggtctcccccggcaatgagacccatctgcacgcccccagcaccgagatcatgcggcccgacggcagccgtgcgagccgatacctgcggacctcgcccgaatttgcctgcaagaagctgctggcggcaggtgagacgcgaatcttcgagttcgcgcgggtgttccgggaccgcgagcgcggcgacctgcatctgcccgaattcaccatgctggaatggtatcgagcggacgcgccctatgatgccatcatggccgattgcatcgtcgtgatcgcccgtgcggcgcaggcgaccgggatcgggtccttctccttccgcggtcggaccgccgatccgttcgccgagcccgagcttctgaccgtcgcgggtgccttcgaacgtttcgctgggatcgatctgctgtcgacaatcccgggcggcgaggctaaccgtaccgcgctcgctgcggcggccggggccaaggtccgtgttgccgaggacgacagctggtccgacatcttcagcaaggtcctggtggagcatgtcgagccgcatctggggcaggggcgtttgaccatcctgtttgaatacccatctccagaggcggcgctggcgcaggcgaaggcggacgacccgagggtcgccgagcgtttcgaggtctatgcctgcggcgtcgagctcgccaacggctttggagagctgaccgatgccgacgagcagcgaaaacgtttcacggagtcgatgatcgagaaacagcgccgatacggcgaagcctatcccctcgacgaggactttctggctgcggttgccgcaatgccggaggcgagtggcgtcgcactcggcttcgaccggctggtcatgttggcgagcggcgcaacacgaattgatcaggtggtgtggacaccgcccgcggatgatagatgacgaaggcgaatcttgcacgcaccctgcgtgagcctgccgagctcatcgccgaggggttggcgcccgcggcagcgctaccggcgctcgaacgcgttgccgcgcgctatgccgtggcggtcacgcccgatctggccgagttgatcgacgcatcggatcccgacgatcccatcgcgcgacaattcgttccgaccgcggccgaactggacctgaagccgggcgagaacgccgatccgatcggtgaccatccgcattcgccggttcccgggatcgtgcaccgctatcccgaccgcgtgttgttcaagctcgttcacgtttgcgcggtctactgccgcttctgcttccgccgcgagatggtggggcccggcaaggagaatgcgctgtccgacagcgcctatcgcgcggcgatcgactacatccgggcacatgacgagatctgggaggtgattctgaccggcggcgatcccctgatgctgtcgccgcggcggatgagcgagatcatggccgatctggccgcgatccaacacgtcaagatcatccgtcttcacagccgcgtgccggtggccgaacccgcgcgcatcagcgacgagatggtcgctgcactgaaggtcgatggcgccaccacctggatcgcgctgcatgccaaccatgcgcgcgagctgactggagcggcgcgcgccgcttgcgcgcgtctggtcgacgccggcgttcccatggtgagtcagtccgtgcttttgcgcggcgtcaatgacaacatcgtcgctctgtcggatttgatgcgagctttcgtcgaatgcaggatcaagccctactatctgcatcacggcgatcttgcgccgggcaccgcgcatctgcgaacgacgttggcgcagggacaggacctgatgcggcaactgcgcgggcgcgtgtcaggactctgtcagccggactatgtcatcgacattcccggcggcgccggcaagtcgccggtaggacccagctacctattgacgacgcaaaataccgcactgcctgcggatgatgcgggagccgaaacgcgctatcgtatcgtggattattgtggcgacgttcatctttatccgccagagacttgagcggaagtggagagcgccgatttaagaatggagcaccgaaaatgaaaaagatcatgctggcagcatcgcttgtgctcttgctgggtgacggcgcgatggcacagaccggtggctccaaggggccgacgtccggcagtgggatccctgcaacggtattgccggcgccggtcggtcaccgtcagccgcgcgcggccgatgtgccgagcgagaagaatctgagcaatccgaacacgcccgcgaacaaggaagacgcggagctcgatcgcaagatcaagagcatctgccgcggctgttgaggcttccacctctcccgttgggagaggtggtggagcgacagctggttgctcgagagctaggccgaccgctcgtgccgcccagcgcgtcggatgttgtggcggatctcgacggagtcggcgagctgctcgagcgcgcttgccgtggtgggccagtcgatgcagccatcggtgatgctctggccgtaggtgagcggcttgcccggtacgacgtcctgccggcccgcgacgaggttgctctcgatcatcacgcccatgatgcggctctcgccgccggtgatctgagcagcgatatcggccatcaccaccggctgattctccggcttcttgctcgaattggcatgactcgcatcgaccatcaccagcggcgcgacgccggacgtggtcaaatcgttgcaggcggccgccacgcttgccgcgtcgtagttcggcttgctcccgccgcgcaggatgatgtggcagtcctcgttgcccgcggtcgaggcgatcgccgaacggccgagcttcgtcaccgccatgaaatgatgcggatgcgaggccgacttcaccgcgtccgccgcgatccgcacgttgccatcggtaccgttcttgaatccgaccgggcaggacaggcccgacgccagctcgcgatggatctggctctcggtcgtgcgcgcgccgatcgcggcccaggacacgaggtcggcgatgtattgcggcgtcgtcatgtcgaggaattcggtgccggcgggcaggccgagattgttcacagccgacagcacgttgcgcgccagccgcaagcccttgttgatgtcgaagctgccgtcgagatcggggtcgttgatcagccccttccagccgacggtggtgcgcggcttctcgaaatagacgcgcatcacgatctcgagctggtcggcaagatcttcccgcagcttcgcgaggcgctcggcatagtcgagggcggccttgggatcgtgcaccgagcaggggccgaccacgaccaggaggcggtcgtcctggccgctcaggatcgcatggatggcgttgcgcgcggccatcaccacgcgcgtggcggtgagtgtccgcgggacctcccgcatcacctcttccggcgtgctcagttctttcagttcacggatgcgaagatcgtctgtcgtgctcagcacggcgggctcctgtctggtttagaacctgccggccaacaaaaaagccgccaggtctggcggcttgttcggacgtctgctgcaatgtgtcagattgagcgcgatcctcccgccgccagcgagctgtcgtagctaaagtaccaaaaatagctggtggcgacggtgatcatggcaggccatatagcgtgccgccggcgggttgtcaccccccaaatcggcgcaagacgtgacgagcgcttcaggtgctgtccttgcgtgccgcgagggccatgccgatcagcgaggcgccgccgaacagcaggttgataccgacgagaacgccgatcgcccagtccgccgagctcggcagtcccgtgatcaccatgaacgagatcgcgatgtcgacaagccccgagatcaggagccaagaccagcggccgctcagctcccggcggtgctccagcgcgtacatgatggtggcaacgccctcggcaaggaagtaggcgccgagcacgatggtgagcgtcagcacggcctgcatcggtcgcgccagcaggagcatcccggtgaggacggcgagtgcggcggagatcagcgaccaccaaaaccctggcgtgctgcgcgcccaataggtcgcgatcagtccgccgataccgccgatcaggaacatccagccgaggaagatcgtggtcgcaaggcttgcgagtggcgggaggatcaaagcggcaatgccgagaaccacaagcaggattccctcgaacaggaaagccttccaatgcgtcttgaccgcctggttcatagcggattgcagccgtgaaaattcttcaggcgatgtcatgattgcctcgatcccgtaagcagccctgcagatcaatctaatctagtatgcgcgcccggcgcttgccattgcgcgcctcagccgccgccgggtgccgaggaaaagccgtccgcgctggtgcggatgcggttgcggccgagaatgtagatcgccgttgtgacgatcagaagtgccaggccgagcaggatcgagacgaaaccgatcgggatcagagccagcgtcaggttgcgctcggggttggtcagccagtgatggatcgaggtcaggacgaaggcgagcccgaggaagccgatgccgccgccggcgagcagcagtgcccacatccgccggagctggctgagccgctcgcgcgcgagatcggtccggggcgcatggtggcgcgcgacgcgccggaccaggcggatcgcgaatgcgatcgagccgaagccgatcaggaggctggcggcgcccagccacatccgcagggtcggatcgagatcgggcatgcgctggagcgtcagcaacgggaagtcgaaggccgaatgcaacgcgagcggcgcagcgaagatcaacagccggctggaaagacgagcccaatcgcgatgatggcggttcgcgcccagcgccgtgcccgcgcgcgcgatcgtcaggtaggcgcctgcgatgatgccgagagcgccgtggaacggcacggtcagcacgctgcggagggcggccagcgagcgccacatgtccgcgtgctggaccaggtaagcgaggttctcgtaagcggcgaagccgaggccgaccgcagcgccatagacgacggtgtccatcggattggcaaaggttcgccgcttggtcgaggagatcagcacgatggcgatcaccttgacggcttcctcaggtaacgcgacgccgaagatcgaatgcatcgcaagcgcggcccacgggtcgtcgggggccgcgaccatcttggcgaagggggcgcgggcgaggcccaagagcgaaatgctggctgcaccaagcaagaaggcagtccagacctgggccggcgggccggggcgctcttcagcggcgatgacgagccataacatcaggagcgccggggcgatggcggcagttccaacgacggtggggagcgcttcgatcaaatacattggcgccgaaaataggttcccttgatccgcttatctacgttcgccgatgcgaccatgtgtcatgcgcctgctgtcggctcgcttcatgggtgcgatagctcccgttcaatcgcagcgtcgatggagatgtagaacacaagcgcaatcaattgcatgacaaaagatgctcgccatccatggcagcgtccgcgcgcctttggatcgatcgagatagccaagccagatcaaggaaatgcgcaggtttcttcgattcaccgtgcagcatcccgccgcgaggacctgtcggccagcgctcaggccggccgcgcttgatcgcccctggtgacggccgcgctctccgggctcagtgggtggtgatgggcggcggggcgtcgggtgcgacgtcgaaggcgccgagatggaattcctcaccaacggattcgagcgattcggaaggctgggccagcagcgtgaatgcagcctgcggatatcgtctccagatttcgaggtcaccggcggtgatggtgagccagccgaacgtgtatatgtagcgtccgggctcggtgacccggccgaccctgtcccaggtgatcttgccaaccttgatcttatcaaccgtgatcttgtcgactgccattcggtcccccgatcgcaagtctgcaaaatgacgtccggcccgcggcacggacctcgaaaggctgatccggcattggggctgctatagggcaggtggtgccgagggtcaggccgacttcagcatgggcgcgcggacgatcaggcggacgaggtcgtcccgcggctgcttctcggcgaacttgaccgcaaagccgtggttgaatttgcggatcacccgtccgacgcaggcgccgaccgcgagcggggttcccaccgccggatcatgctccgaggagaccgcgacgccggccgtggagacgtcgatgatgaagcaggggtgagtgctgccgtccgcgagggtcaggacggtgtgcgagacctgcggaacgaaacgcgcgtcacgtcgcaattctcgaatgctgtcgtccttctgtttcttctcgagccacgtcagcttttccgacatccaggcgcgccgcgcccgcgtcatgtcgagctccatcagaaagcccgacttcagtgtcgcgctgatggtgctttggaattcgccgaaatcctggaagtaggaggtcacgcgctcgccgaccttgccgaccaccggcacgtccacgatcatccggaagggcgagacgcgcttggtccggcaagcgaagctgcggagcttgccctcgcaatcataccagcgaggcagcgagtagctgccgctcaccgccacgtccaccgctcgttgcctgaggaactctgcgacggacatggacgccaatcttcttggattattcccgtagtttcacggtagggcgcaaactctaagcaattgatacccgcgctcatgagtgggggtaaatttccggtaaatgcggggagcgaagatggggcgacgacgcgcggcacaaagtcacaacggggtgcattgccgggcggtggtgtcaaaccgcgccgagaagcaccagcaaggccagcagccccacgacgatggcgaacttgatcgtcgtccatatcaggctgtcggggcggattgccaatccgaaccgcgcacctgcgcgccggatcgccagcgctgcgactgcatcgaaagcagcgagcgccagaatgatgacggcgatcgaagcccatgactcggctggcggcatccacggcgcgagccaggcgggggcagagccccgcaaggagacgagcagtgcgatccaggcgaaccagaaggcgcagcccttgacgatatcgggcccgatcgcatcaggctcgaacctcaagccgatcgctccgagcaagctttcgatgcgcttgccgtcggcaaggaaaagaaacgcgccgaggtaaagaggaacgtgagactggaacagaagcgtgatggtgccgaacaggattgcgtagccgcaggcatctccgagaatggcgaggcccgccgcgagcggcgtcttggccgtcggccgcaaagcagcggcctggggctgcggaagcgatcgggcgcgcgccatgtgctccagcatcctggcccggcggtccggcgggtgggcggcagcacgatgcatccagggcggcggcggcgaggcagcgccggacgagtcgttcgggatggtctggcgctgctccatggcctcttgccggttccgatcgcaggttggtcggaaatcggaggtgcggaggttcatgccaggcgggtggatttcccgcctttggcgctccctagcggaatcgaaccgctctctccaccgtgaaagggtggcgtcctaaccgatagacgaagggagcaaacagggccctgccgcttgccgcggcacggccgctggccggccgaacagcgcccggcggcttgcagcggcgaacgtatagtggcctttgcgctcccgggcaagccgttcgggaacggagttttgggcctcggtgaacagcggcgggcctcggcatgatcggcagcgatctcaacggtttcttagggttccctgcgtagcgcttgagtaggagatttccgatgccaccgccgaaaaagcgcgcagcccgcaagctgttgtcgcagcacgcttggatcacgctcgacggcggcttcgccgcgcggcattgcctggtccaggacatttcggactccggggccaggatcacgctggacgaggacgcgagccagcttccgggcgtgatccggatggccttcgcacgcgacgcccgcacggggcggagctgccaggtggtctggcgccgcggcaagtcggccggcgtcaaattcatctgacatcgcgccgcagcggggccgatggcgcgcccgctccgttcgggctacaaggcggcaatgcgcatgccgctcctcgtcctgatctcgctcatggccacgtccgcagctgcggctgagagcctgcgcctgccgcctgccgagcgcccgcaagcaggcaaggccctgccgctgaagggcaccgccggaaaggccggggcgggctcctgcgcctcctacggcccgcgcttcgtcatggtcgagggcaccgggacctgcgtgaagatcggcggcgcgatcagcatcgacaccgccgtcaggcgctgaagcccatgccggcggatctgctgcggctcgacctcatcgttcccgtcctgatgtattgcgcgctgctctggtggatcggccgcgggatgagctggacggcgcggctcgccaccgtcgcggtgacgctggtgctgatcgtcatcgtgctgctggtcgagcgcggctggcgctaaggcctcaaacagaaccgcgaaaacaaccccatgcacagtagccgtcaagcgctgccgtagcgcccggcggcaggcgcgcgaacgacgattcctcgcgtcctcgccgcggcttgagccgcatcaccggctcaggacatcggcggtgcgacgaattgcgcaaatccgggccgtttgccgagctcggagagccagcgggtgagatgcggctgcgccggccgggtgatgccttcgaccccgagccagcgccgcgcatagcagccgatcgcgatgtcggcgagcgtgaacgcatcgccgtcgatgaagctgcgcgtggtgagcaggcggttggcgatggcccagacctcggcggccgcatcggcatcgcgctgcacctggatcatgtcgcgctcggcgggcgccgtgcgaacgatgccccagaacaccgggcggtcgaccggctgcaccgtcgacagcgtccaatcgagccagcggtcgacgctggcgcgctgcttgggcgcctccgggtagatcggcgtgccgcggccatgcgcgaggcagagatagcgcatgatcgagttggactcccacagcacgaagtcgccctcgaccagcgtcgggatccgggcattggggttcatcgcgaggtagtcggcctcgcgggtcttgccatattgcatgccggcatcgatgcgctcgaaaggcaggccaagctcggtgcagcaccacagcaccttctgcacgttgaccgaattggcgcggccccagatcgtcagcttggtctcaggcatcaggcgtctccccgcagcgttgtccggagtcgtagcccggatggagcggagcgcaatcnnnnnnnnnngggctttgacatcggctgtcccggactacgcttgcgctccatccgggctacaagtccaccttgcgcgggtgatagcggaatttcccgaaagacgcgatgcgcgatgcggcgcgcctctcatgcaaaaagctccgcacgtggcggagctttcattgcaaagttcaacctgacggtcagcggccgaagaacagccacaacagaatgatcaccgggatcggcacgccgatcatccacagcaacagccctctcgccatcgcatcctcctccaattgcatcactggagggtgaacgcgggccgtgcgcgcttgttcccgcgcgcagctaccaatgaccggtgttcggcatcgaagcccagggctcctgcggcggcttcggatctcccttctgcaagagctcgatcgagtgcaggtcgggcgagcgcacgaaggccatgttgccgtcgcgtggcggccggttgatggtgacgcctgccttcatcagcttctcgcaagtggcgtagatgtcgtcgacctcgtaggcgaggtggccgaagaagcgatcctcgccgtacttttcttcgtcccaattccaggtgagctcgacgagcggcgccccgcgcgtcggcggctgcgtcttcagcgcctcgagatcgtccgacgaacacaggaagacaagtgtgaaccgccccttgtcgttctcgatccgccgcacctccttcaaccccagcgcatcctggtagaacttcagcgcgacatcgagattgctcacgcgcagcatggtgtggagatatctcatggttgttgctccctggaaaagatggagggtcttgaggcggcgaagccggcaggagcgagagatagcaaaaaagagggaggaagggcagggctctcgtcgagcttagaacgagaggatctgagaatggctcgcggcaggcgcgattgaagggaagaggctgcgaacgatcacttgccgagcatggagctttcggcattgctcacgcaagcgacggttgacgcaaagccgacttgccgaagtgatggctttgactccgcagaacatcgcgctgtgctggaaagcgctcgctaggggcgataccgccaccgccaccgcgcgaagcgtacgcgcggaagcgatgcgtcgaatggggcaatactactgcatgtgaccgaacatcgggatcgttcaggccgaagcgctgtcggcggtcgcgtgcgattgactgaactcgccgccaagtgtcacttcagctactgcaacaccttcggcagcacgaccacgacgtcaatgttctgcttcaagatgtggccggcaatgtccgcgacgagcagcgcgaagtcgtcctcgatcgcggcagcggcggcttcgtctttcgcatagacatacaacagcggcccctcgacctcggcaaaacgaaccccggcgaagacgcggtcgaactcggctgcgccgaggaccgccgctaggcgggcctggatcgcaaaatcctgaatgtcggatatttccatgcgagacagatagagacgatgcgtctgaaaacaagggtgaattcaatccggcaggacgtaagcagcttgcgtgtgcttcatcacagatgatcgggattgggtcagaagcggctgcgcgataacgtttgacgtatttggctcggcagccttggcagagaccaaggtctcggcacctgctggtctacgaatccgctcaacccgagaccaagctgaccgagcccgtcagaagccgaaggcgatctgggtcgagccgacacacgatgtggacgacgagtatcgcgacacgacctccgaagggttgtcgcgcaggcctattcaaaggatcgagcagaggaacgcgccgctcgtgatcgcgttttgcttcacagagtgagtaccggcatgccggatcgcgggagggaaggcgtcggccgggccgggactgcgcgactgcaacaagacgactgatggtcttttggatgttctcgatgacgaagaactcatcgaggccatggagagggaagatgcgaaaggcgctggcagaactaaatgaggacgaacgtcacgcgttgctttacgtggccgacctcggcaccgcggcatgtctgtccggcctgatcgtcagcatcatcaagctcgtcggcgacttgctttgacgaagctcgatcgatgcggggcgcgcggtcaagccgccaccaaggtccaatacgcgaaccttgctgatgaggccgcgtctactcaaggtcggccttgtcatcgtcgctctcgagctgggcccgatattcctgcgcagccttcaacagagcctctctgatttcgccatccgccgtctgggcagcgagggcttcggcgcggtcggcttggtgctggagcgatactttggtcatgcacggccaactcgccccgagcgcctccgttccctcacgccgccttctcgactcccttcgcgacgatctcgacctcgaaatagcccatgtcgcggagttcggcggccttcttctcggctgcctccttggtgtcgcgcttcaagatgatctggcccgctccgtcgcgggcgcaaacgaaatatggcattttcgattcccaatttcgtttgcatacacatggcggcgagttcccgcaattctactggctcactcctccagcccggccttttgccgcatcttgtcgatcagctcggaggcctcggccttggacaggtcttccgctggcgggtcctgatgggcctgctcggcaagtgtcttgagataggattcctgagcacccgtcatcgggtcgtctccggaaacccagtctttcgggtccttctgggtgttgtcggccattgcacatctcctattccgttttccgtagaacgtcggactcgactcttcgttccgtttttgttctcattgggccatattcaaaatcgcgaggccagacatgccggacctggactttctcaggcgggagatcgaacggatgcgcatccagatgggcagacagaggaaggagatcctccagctgcagcgcgcggggatcgggacggcctcggcgcaagcgctgctgtcgcggatggaggcgaaggtcgagagtctctgtgccgaacgcgacgcgctgaaggcggcacagccgcgccagaccaagggcagggtgctcggcgggagaacatggtgagcaggcgatggttcgacgacgagagagacctgtcgcccttcctgaccgcgctcgaggacgttcgtcgcagagcgacgcgggaagggtggtgctatgcccacgtccaggccatcatcgtggccatcgaccagtacgcggaagccgcgacgggcaatcgcgagtatttcctgaacaagccggtttcgatcggggagagccggaaagctgccgacattccttgattgtctatccgctctatttggtggaactggcggagctccacccatgcacacgtcactcctcgcgggaccactgcgccgccgagtatcgttcatccgacttagcccctgggactgatgtttggtcatccggttcaggcaacattccgcaaccgggcgtcctgtccgcgtcggtcagctccggcgcggcgtgcgggccggcagggtgctggctgcgttcagcggatgcatccgccggaacgactgcagcctggtttctgagtgctctgcattgcttctgcctgaccgttcgaacgggagcgtcaaaggggccgatggactgtcgggcatcgccccttccaagcaccgcaggcgattgcgctgttgtcatcgttgtcgcgggtgcggacgcaacgttccaaatcaaggatgaggcgccggacagaggttggccgaagctcaggaggaacggacaagcaatgcccgggttggccacaagcaactggaggcacctcgacatggccagagatctttcccgggaccaagagagagaaggcacgcgcaagttgatgatgtggggatcggcggttgccgcgatcctgttcgtgggctccgggctttggcttgcggctccccagatgttcggcatgaccgattacgttgggcgcccaacgaccggagccgacagcagcgcgccggcgaccacggtcggcactggtgttccaacacagcgcgacgcgatcagcacggctgcaaaagaagatccggctgtaaacgaggattcgagcggcggtcgcgcccgccagatcaagcagagcagccagcccgcgaacctttccgagcagcaacgccagcaactccagtcggtgctctcgacggcgcaaggtcctgcggtggatcggccgaatttcgaaatgatggtcggcacgtcggtcccgcgacaaaccgagaccgcggatcttccggctgaggtgacgcaaatcctcaacgggttttggggcgatcaatatttgatagcggggaagtccctcgtgatcgtggatcatcactcgcgccgcgtcgcagccatcattgccgacgtacgatgacgggttcctcgaagagccgcgtgctctgtgcaaactgttccggtgcgggaacgtcattcgcttgagagcttgttaaccgagcacgctcaggatgccgctccaattcggagggacacagcgatgtcagacctggaacaagcgatccgcgagcgtgcctatcagatctggatggagagcggcggtcaggacggccacgccgagacgcattggctcgaagcgcagcgcgagattctttccgcgtctctcggttcggtcgcgcgggtctccacggtgagcaccgaaaaaccgaagacgaagtccgcagggccgcgaaggaagcgccgagccgcatgagcttgcggccggcgctgggaagcgcacgcgcgcgcaaggcgaacgggtgcgcgccgccgtttgctgcgatcagcgaggtgagacaggggagggcactgatctggcccggccgggtgaagcagccttcctgcgcggcggagacgttccaccggttttgccggacttcggccgagcttttgatacgatcccgttctgttcatcgaactgcttcagccacgccgcgatgtatcgcggatcgtcgggacaaagccgctcgagcaaacgaaggttctgcgctctgaattccacaagggttttcggcatcacggctcctcaaaaccctgcccggcgcaaaaagtgcgccgggaggggtagcgaggtcaacggcaaagagcgcttgaaatcccgggcaagctgatgcagcgcgcgaaagcggaaaaccccgcctgggggaagcggggttctctgtcggggggaagccttgggggcttcaactgtaagacgcgcgagccggtcgaaagttcaaaacaaaatgcactgcctcgcggaggaggcggctcttggatcagtcgcggatgaacctcggcgagaccggctgtgaccaatcgccatgcttcagggcctgctcagcgccatcgtggaaacgctcctcacttctgtgtggaacgccgtcgtcaggttcttgcgcctggagaacgccgtcgaactcaccactgcaatcgtcggtctttcctgcattgcaatcggactcgcagcattctttctcgatcattgacgcggaaagttcgcgaatttcgctgaacgcgggcgcgagacgtatccgcgattacaaatccgtaagtcgattgaaaagctgcgtctaaaaactatctctggatcaggcggcagcgtaacaagccgcccttcaactgacacccagccgccgcgctcagaaaaggcgaagctgggtcctttgacattcccccgcttggccccgcctcaccggcctcagaggcacatgtccatggctgcccgaacctacaatcacgaacgctggtcggaagacgacgaccggctgctgcgatccatgtgtgaaaccggaaagagcctcacgctgatgatcgtgaaactcaagcgtcccattgcatcgatcaggtcgcgggcgatcgagctcgggatcaatctgcccggcacccgcatcggtctgcggcggaagccgcgaaccgcctagagccgggccgctgaagcccgcgcataattcggccgcgccgctctgctgcggagcggcgcggccgggaagcaggctctgcgaaaagcgatttacttcatgttgctgcgcgtcttggtgccgccctggtcactgcccgggcccgagccgccctgaccggacgcgtccggcctcaccattccgcccttgctcatcccgtcgttgctcattccggtcgtgccctgattcatcgagcccttgtccgtgctgttcatgccgggcttctgcatgttgttggactgcggggccgggccggtctggttctgcgcaaaggcggaaccgcacatcagaccgagggcggcggtggcgatcatgattttcttcatcgcaaactcctggttggttgcctggagccaacgggagtgcggaaatcatgttcccgggaacaggatattcaagagcaaagaaattccgcgaagctgtagcccccggcctgcaccacgttcgagcaggcgcggatgtttacgtgcggccgcggcattgcagccgaggccggcgaagttgcgcggcgtcaggccgcaatccgctgttcgacgggcctcgtcaggaacttgagggcttcggcatgggcgaggtcgggaactgcgatcgccgtatggctgtacatcgcatgtgtccgcgattttgcaatgccatccaggatctcgccgcccttgatgacgtgaaggcccatgccctcttcggtggggaagatcgccagcacaacgtcgtaagccgcgatgacggccctcagcgcctcggccttgtcttcggcgacgtcgacaaaaatacgaacatcggctgcgagttcacgcagctcgtcaaaatccagcactgtggggtactccaacgcaacgaacctgatgggagcttggcggcgttgggttactgaagtgtcaacaacgcctgcagagccacagatttcacgcggaggtgactccacgctctatcgctttgcttcgtccttgcgaagccgtgcctccgcggcctcgtccacgaggttcaaggcgagaccgtcatagctcagcttgaagccgcggccgacgatccatgtccatccctcccggctcttgatggcctgtgcgttgtactggtcggagatcgacttcacggcagcttcctgcgagcccggattgctcaacgtcgcattgacgcgccagatcgggtgcctggcgtcggactcgtcgctgtcgacggagaccttggctccattgatctcgcattcgaggctgggcgagctgcggccccggcggcagagataacggcgttgactgacgagcttgctggtctcctcgaacgtcattccgggcgagaagccgaagatgtcggacttcttgacgagtgcgagggatgccggcttcaggaagcttggctgtatcgcgacgaacgctacgacagcgatgacgatcaaacctgcgacgacgatagcaaccttcatgagcgccccacgagaatattcgggtcactatagcagcgggggcgttctgccggcacgcaaaagcgaagacccgcgcgggaggtggctctctcgtggatgaagcgcagggacatcgtcgacgagacgcgcccgctgcagaatggttcaaggaaattgcatcccgccgtctttcacaacaagtcgggaacctcgcagaacccgtgcttgcgttttcggcctcgatgggctctaagccccatcgcttcatggcttctggcatgaatcagcagcgcgccatcgcggtccgaccgcgtctccagcaggcattgctcgcgcgaatccattcgaaggaattcagacatggcgaagatgacgaagacccaattgatcgatgctattgccgagggcacgcagctttcgaagaacgatgtgaagtccgtgatcgagtacatggcgacggtcggctacaaggagctcaacgagtccggcgagttcgtcgttcccggcttcgtgaagatgtcggtcgtgaacaagccggcgaccgaggcccgcatgggcgtcaatcctttcaccaaggagccgatgcagtttgcggcgaagcccgccagcaaatcggtcaaggcctcgccgttgaaggtggcaaaggacgccgtctgaaaagcctgcgatgccgttgcagcgcgtcctcgcaggacggtgcaacgataaacggctgaggacaggtggtgctcggggccatgccgaacattgccacgacgatgacggcagtccccgacgcgagcactctcagacctgaaagaaaaaccccgcgctctcacgcggggtctctggctgacggcgttgggattcagcgcctggccgccagccgtgtcgctaacttaaagttgaaatatcaaaaagcaacagcgccgcggcgacggagtatgttcgtcaggcggcgctgccgtatcactgggcgctgaaatccccagcctccatgagttcttggccggctgaaaaggttcgacggtctgcgaaatttctgaagagggctggacatttcgttctctttttgttctagtgtgagccgcctttgtgatcaattggaggtgactcatgaccgtcgaaaagcagcgcgaagtgatcaggctctggaacgaactcaggaagctcgaggggccggccgcggaagaacttcgtatccagattctcgaatgtttctcggcgaaggacaagacgaagcgggcggcttgatcagcgccggcgctgcggcagcacgtgagcgcgatctcgtgcctcgcggcgcgcgcttgatttgcccctgatggattcctgacgacgagtggtgccgccgaagggtgagagcgtgcttcactgattgttaggagtcgctgcgcgctgctcatccgattccgattcgttcttcgggaacgaaatggagtcggatgcagaacacgcgctgcccgctgtctgcgataagaccgtgcgtatcgcaaggcgtggtgcctggcacagtcctgtgctcatcgcccctatgaggcgaagagagagcaaatgcgagcggcaccacgctctcattccgttccagtgcggccgcagggatccgcaatcgaagacgacgcgacgcgaccatgtcgttgcgaaccccctgttaagaattgctccgcatcgatttctgcgattccgattcgttctgcgagaacgaaatggtatcgaagccggaacaagtcggctgtccgtctgggcttttcgcgaaggtgcccgcctgtggtgcctaacgatagcttgcacgaatgccgataacgctattcggttaggttaaaagctcaatcgcattgcgcttgctgcgggttgcgataggtgtcgggcaaagacaagcaagaaacgacttcgccaagaagcaattttgccatgacacctttttcagaaacgtccttttatcagggcgaccggcacacctaccgtcgcgtcgccatcgtcggcgcgctgttctgtcttgccttcgtggagatcagcttctcgctgcggccgccgcaggccgaggacacgcgcgtcgccgtgaaggccgaccggctgttgcgaacggcagggcaagtgccgcgcgcgaattaacgttccttgctgcacatccgatcgtcggtggacgtgtcggcgcagccggcgccgcaggtcgccagcgcaacgaaacccgcatagccggacaggttcaccaggacttcgagccacaccggcatgtcatacctcctcgtcttgaagggacgaacaacgtgcgcgcggagcgcatgttcccgaacgagtgccgctcaaatcaaggcgggcgctgctcaaaggggagaggaggggtcgaggcgccggccgagcgtcgcgaccgatttgctcgacggctgctccttcaggaactcggcaatggcccgcgccagctcacgatcactcatcggtgtcggcggcgggcgcagtgtgccgacgccgaagctgcgcacgatttcctcgtagtgctgatcgtcggacttgggaaccaatctgcggatacgggccagcaaagcggataacggcaagctctcctcctcgaacgtcggccccgctggcaaccgtcatggtctgctgccatctgctcccgtgaaactgaaaaccccgccagcatcgcggagatgctgacggggtcttcgtgccgttgcctcgacccggatggcggaggctcccgcacttggaaggtcaatctgcgctcgacgattctgttcccggtgtcgcgacattttttcgagcggtcggtttcaccgggcccgcaaccatcgctggcgctgacggttatctccgcacgacgcgaaggagagagcatgaagaagacactggcagttctggccaccatggccgccgttggcgtgacggcagtagccgcgccgtcaccggcagaagcgcgcggtcgtggcatcggcccgggcctcgcgttcggccttgccgccggcgcgatcaccgccggcgcggtcgcagcctcccggcctcatgggtactacggtccccgctacggctattacggcggcccgagctattattacggaccgggaccccacgcctattacggcggcgggccgtaccaccgccatcaccactggcgccattggtagtcatggatagcgaaaagcccggagcgatgctccgggcttttttcgttcgcgcgtcttcccgctcatgcttgcgtgaccggcctacggccaaagcgagggccgctcgaccttgcgggcgttctccagcgtcgacacgaaatattcgtcgcgctcgcgcttgaacttttcctgcgtggcacggaaggcggcgacacgggcagcgatctcttcgcgttcgcgctctttccgttcttcatcttcggtcatgtcaaatcccctctacacctgagtatgtgcacacctaaactcaagcgctgccgccgcaatcacgttgagtcgcgtcaacacatccattggcgctcttgaatggggcgtcaatggggaggaggcattgcaggattgtgataagcgaagatcggaaaggattgccgggcgcattgcattcgcgcttgataaaagcgtcaacgatcttgccgcttgcgcatattgctgtcaggcaaaacgagtcgggaggcgcgattgatcgcattggatcttcagagcggcgtcgagcggctcggcgacatgattgccgagtcgaggatcatcgttccgttcaccggcgccggcatctcgaccgagtgcggcattcccgatttccgctcgccgggtggaatttggacgcgaaaccgtccgatcccgttcgacgagttcgtcgcgagcctcgaggcccgcaacgaatcctggcgccgccgtttcgcgatggaggaggtctttgccgcggcgaagcccggccgcggccaccgcgcgctggcttcgctctatcgcgcaggcaaggttcccgccgtcatcacccagaacatcgacaatctgcaccaagcctcgggcttcgccggcgagcacgtggttgaacttcacggcaataccacttatgcgcgctgcatcgggtgtgggcaggcctatccgctcgactgggtgaggcgtcgtttcgacgacgatggcgcggcgcccaactgcacggcctgcgacgagccggtgaagaccgccacgatctccttcggccagatgatgccggacgacgagatgcagcgcgcgaccgcattgtcgcaggcctgcgatctcttcatcgcgattggttcctcgctcgtggtgtggccggcggcgggctttccgatgatggccaagcgggccggcgcacgtctggtgatcatcaatcgcgagccgaccgagcaggacgatatcgccgacctcgtcatccgccacgacatcggcgagacgctcgggccctttgtcggcaattgaggcatcagtttgattcgcggctgtgcaagctgttcataggttccggcgaatctcttttttgtctatgcctcgcaaccgagagtgttatcttttgagtcgaaagattcgcgtcgcgtcgaattgagaacattctcttaaagacgcgtgattcgagcgccgccgatgtggcgggctgcatggcagtgtggggtccggggttatggggtcgtcggacggatttgagtccaagaagctcggggttcccgggcagggagtatcgcccgggcgaatgacgccgggcgagcacgggggggccggccgggatagtgggctcagtccgttcagcgggcttggtgagaccagcgccaatctcgtcgaggtccatggcgtcatcaaatggttcgacgcctccaaaggttacggcttcatcgttcccgacaatggctggccggacgttctcctgcacgttaccgtgctgaggcgcgacggttttcagacggcttatgaaggcgcccgcatcgtcgtcgaatgcatccagcgcgccaagggttaccaggccttccgcgtcgtctcgatggacgagtcgaccgcgatccacccggcgcagatgctgcccccgcgcacccatgtcacggtcaccccgaccagcgggctggagcgggcccaggtcaaatggttcaaccggctgcgcggcttcggcttcctcacctgcggcgagggcacgcccgacatcttcgtgcacatggagacgctgcgccgcttcggcatgacagagctcaggccgggccagtatgtgctggtccgcttcgggcccggctccaagggcatgatggcggccgagattcatcccgagaccggatcgccgggattgcagtcgcactgagagcaccaattcccgccatcgtgagcagaggcgtgccggcagtccggcgcgcctctttcctttgcggctgccgccgcgtaaggactggccaagtgccacgcctcgagagcccacatgaattctgatcgaaaggccatctggtccgctgcgaagggctggcttgccgccatcctcgtcatcatcggctgtgccgccgccgcgcctgccggcgccgccaccttccagccgctcgagatcgtcaccaagaacggcgtacaggtgttctcggtggaaatggcgacgaccgaggacgagaggcggactggcctgatgtaccgcaaggaattggccgacggcaaaggcatgctgttcgacttcaatcccgagcaggaaatctcgatgtggatgaagaacacgtacgtgtcgctcgacatgatcttcatccgcgccgacggccggatcctgcgcattgccgagaacaccgagccgctgtcgaccaagatcatctcgtcccgaggtcccgccagggccgtcctggaggtcgtggcgggaacggcgcaaaagtacggcatccgccccggcgaccgcgtcggccatcccctgttcggcagcaaatagcgccagcgggccgggacgattgcccgccgtgctgctgcgcgttgagccctgctgatgggctgggaaagcttgctgaccgctcgggaagcgtgtatcgacgaggctcgccggacattcggggtatagcgcagcctggtagcgcggcagttttgggtactgcaggtcgttggttcgaatccagctgccccgaccagtcccgagaaggctcgcagggcatgggatcgcagagctgcgaccgcaactccgctcagaacagcagccagtcgacaagccgccaggcgccccaggcgagggtgcagatccagcccagcattgcgatcacggccacgccaagtccgaggagcggcaacagcgagcttccggtctccgggacgttggatagtttctcggtcctatcgatctggctcactgctcccccttggttatgcggcctgctcatcattggtctcggctcgatcgcagaaattcaccggccgcgcttctgctcacacggacgtgagacgagatgactccgtccatggcgggcgcgcgctgatagttgacattcacggggaccctgagatcgctgggaaaaacctgcaacgcacggcgctgcgtttggttgctccgtccgagctagtagatctgccgggccgattttttcgcagcgccgcgcctgctttgcgggatgtgtgcgtgaagcaaggatcgggcgcgcaaccagcactttgcccgaggtctccttcgagcgaggtctccatgtcgatcagcgcgattgtatccaccaccgcggccgtgacgacgtccgcttcgaccgcgacgccgtcgtcgtctgcggcatcctcaacgtctgcggcctcgtcgacggaggtcgcctcatcgacctcgtcggaatcgtcctcgcaagcggcggggggaagctcgggatcgggcggcggcggctcggccaagaccatcgtcagcgaggtctccatgactatcgacggcgtcaccaccaccaccatcacctattccgacggcaccacagaggtcgagacctccgcgagcacgcaaggcagtccgtccgggcagacctacaacgcgcaaggcgcgctcgggacaaatgcgcagaacgcgtccggcagcgcctccagcgccacgtcccagtcggcttgatcgccgaggcggggcgggcggcatagtgcgggtgagtcgtttgcgcgaggtctgtccaatcactttgaagccctggcgctcatagcctgcgccacacgacttctgcgggatttttcaaggtgttgctgaggggcgcgcggcgccgaattgccaaagattcatcgaacctttagctgttgccgcagacatatgtgtgttggggatttcagcgcccaatgtctaaacggacgccgccaagcgatgatattccgcttgcgcggcgttgcgcttttccgatcgggcgggtcagcttgacgcgtaccagccgggcgggaacggggcgaacggccagaccgcctggttgtcgttagcggcttgcggcgtctcctgagacggcgtcctcgcggccagtgcaggcggcgtcatgcgcagcgctaggcgtgaacatagcaatttcatgatttggcccccggcagaacgattaattccaaacgaccggttgctttcaaagttcgaggtcagcatgaaaatgacggtgcgccgaaacagcgcgcccgttctcgaatgatctgcattctagaaaggctgcttctggctttcaaccggtcgcttcgctccatcccaaggagtaaggttgatcggttaggttaagggcgggcggttgttgcggccgttttgccggctgttattagatcaacatcggctcgcgacggcctgcctttcaatccgggcgaccacagctcacggttcgtcgcgccgcgcgtatcagtcgagttctgcgccagcgagtgtcgtccatgcccttcgatcgcaacctgaagaccgttggttcgcggtcgagctggaccgagatctggcatctgtggacagtgatcgtgccgcgccgctccatcaatgggcagttcgtggtcgggaaggtctggcgccgccatgacggtcgcgactggatctacaagaagttcaccgagttcgacggcgaagaggctgcctgaagcgcgcgaggagattgtgataatctcctcgcggctcaagcctggctctgtgcggttctagcgggtgtgccgctcgcctgcggccgatcccggtgcctgaacgcggggcagcggcagtttgaaatgacgcttcgcgtacgcgatgatctcggcgtcggagggatgatcggccgcttccaccgccacgatccgcttggccagatcgggtgcgctcgcgcgaatgtggctggcgagctccgtcttggcgcttgccggaccgatgatgaggatctcaccggcctcggcgagggccttggtcacgtcagtgtagaatgccttgtcgggtgcagcatggccgctgccgatcgaattggccttgtgatgaagatggcgtgtcgccagttgcggatgcagcgtgacttcatccgagccgctcaggccgagatggaagatcctggcctgcgaatggtcgatccaaaccacggcgtggaaatgagtaggcatgtgtctgggccttgtgcgagaggaggccgccggcgtcgatgcggcggcgcatgtcgcggcgacactaagccggccggcgccgcctctgttgacccatgtcaatcaggtccgtcccggctgagcaagcacgggcaaccgggcgccgcgctccggtgcgggttcaggccgcctttgccgcagctgcccccggcttggacggtggcggcttcagcggcttatcctgcttcttcgaccacgaaatgtagtaggccaccgtcgtcatgatcgcgatgccggcgacgctgacgaagatctgggcgagcagcgagcccgagctcatcgtcagctcgaaatggccgacgaaggacaggaacacgccgacgcagaacacggcgagcgactgctggccgcagacgatcaaggggtcgaagatcctccactccagtcccggccattccttcggcacgaagcggatcaccaggattacgatcaccacgaaatgcaggaagcgatacggcgcgaggttggtcttgtcgttcgggttgaaggccgagaacagccattccgggaacatggcgccgaaggtggggaagcgcccggccatggtcatgaccagcgcgaacaggagatagccgaggcagacccacagcgtgatcggcgagttgatcagcgtcatcgaacgccgggcgccgcccatcgcgcaccatgcgccgaacacgaacagcacctgccagcaataggggttgaagtaccactggccggccggataggcggtgaggttgaggccgtaatggcgcgcggtcagccacagcacgatcgacaagatcatcgtcaggtcgggcttgcgcagcatgagccacagcaccggcggaaacaggcccatcagcacgatgtacagcggcagcacatcgagattgagcggcttgaagcgcaggaaaaggccctggcgcaacgtctcggtggcgttgtcgacgagcccggcgacgttgaactcgttgatcatctcggaatcgccgaagcgcagcgccagatagctgatcgaggcgatgtagatcacgaacaggatgatgtgggcgacatagagctgccagacgcgcttggtcagccgcgtggcgccgacgatgaagccgcgctccagcatcatccgcgcatagacgaaggaggccgtataacccgagatgaagacgaacagatcggccgcgtcggaaaagccgtagttgcgggtcgtgatccagttcacgacgttgtcggggatatggtcgagaaagatcgcccagttcgcgattccgcgaaacaggtcgagcctgaggtcacggcccttttcagggagggtggcggtgatgttcaggaaggccatgcgacgggagctctcgaaggggacggatacgctggtgtcgacgacaaagtaccgccgggtggcatcccggcgaaggcgggtacgcaattgtcacggtgcagcataatgactataccgttggcgagggtgccgggagggcccggaatcaccgatcagttcccggtcggtgtctctatactatccccgaggtttccaccaactgccaccgtgacgcatcggaatcggacgaaaagaccaagaggcccggaccaaccatgaccgcacgcattttcaagcccgccaagaacgcgatgcaatccggccggtccaagacccgggaatggcagctcgactacgagccggagcagccgcgttcggtcgagccgctgatgggatggacctcgtcggccgacatgaagcagcagatcacgctgcgcttccacagcaaggaagaggcgatcgcctattgcgagcgcaagggtatcgcctaccaggtgatcgagccgaaggaatcgatccgccgcccggtcgcctatgccgacaatttctcgttccgacgcggcgaaccctggacgcattgatcctcgacgagtgccatcggcacggcatgcccgggcttgtcccgggcattcacgttttggtagccgatgaaggaatgtggatgactgggacaagcccggcctgatgaggagggccgccggccgcccgccgcgagagccccttggcagcaatttggcctcgtgcttcgctaccgcgcatgacagctcatcggcgaggttaggagatggccgggcgtgaccagctcgacggcatcgatctgaaaattttgtccgagctccagcaggacgggcgggttcgcaacaacgagctggcgctgcgcgttggcgtgtccgcgccgaactgcctgcggcggctgaaatcgctgttcagccggggcgtgatccgggcggtgcgcgccgtcatcgacgagcggctgcttggctatgaggtgacgtcgttcgtctcgatccagctcggcagccaagcccagccggtgctggaggcattcgagggctcgatcgccgcaatcccgcgcatccagcagtgctggcggatttcgggcgataccgattatctgctgaaatgcgtcgcgccgagtgtcgagagcatgcgccagcaactcctgcatttcgcggcgatgcccaacgtgaagaacgtccgcagcttccccgtgctgggcgtcgcaaaggatgtgcccctgccgctgcaggaggtctccgcggcgccggcaggatagcgatctgaacactccccagatgagaatgaaactgcgcacattaagtatgagttaatcacctaagtgcaacatgtgatttttgaagtcctgcaatgcgctgggccgtgattgctggttcctgtgcgccgcttagctccaagatgtgaacctcagcatgcttggcatgccgagggtctcttgtgagaccctgaagcaggaacagactccatgacatcgatttcgaacacgttcgtcgcatccgctgcaacgctgtttgcgtccgcgttgctcacgatgaccgcacccgcagcaacacaggcggaagaatactgcatcaccaacggcgcccaggccgctcatggctgcggctatccgacgatggaggcgtgccgggccgcaaccgctggcatcggcggcatctgctcgcagagcggcggcgccaagaccgcgaacgacgcgttcgccttgcagccgaaacagtcgcgatcgcgcaagcttcgaccgggcggacagaccaactcgaactagggctgcaagcgagagcagcttggcgacgttgcggtctgcgacccatgtcggggccgccgatacagagcaattaagccagatcgcactggcttgcgcctcagcgatagcggccgcgaaattcgcgcgggcttgatcttcccccgataaagtggacgggt

SEQ ID NO: 207 - DNA, 56805 bp, Bradyrhizobium colbertium
  misc_feature (3196)..(3205): n is a, c, g, or t
aggtgtccactcattcggaggaagttcattagagaccacgatgggtagggcggggcgcaagaacaaggtaaagttcttatcgtcctggtccacgatccgcactaggccgcggcggctgaagccggtcaggatctccttcacccgtccgaagtttggccgctcccgatgcgtccggtcttcatagatctggaggatctgatcgctgtcgacctccacctcgccgaactccttggcctcgaagcgggtgaatgcctcctcataatggaggcgcagcaccagcaggagcaggctttcatcgagcttcatgctctgccggggcggaagctcggtcgcgacaaggccgacatagccgtcgttcggccgcccgaccacgcggtagccgagcgcgtcgaacagattctcgaagtagccgatgtgtcgcctgagcacctcgtaggcgcccttcatgccccaatcgttctcgtagatgaactgcgcgcgccaaagctgctgagccgcctggcgcaggtccttctggagctgctccccgtcgccgccctcggagtcttcgtcgtcgatcagtttcgagagatcacgcagcatctgccgtggtcccagttctctcgatccggaaggcggtcacgtcgatccagtcgttggcggtgcgcccctcctcgagcgtgatcgtgaattcgcccagccgcacggagcggccaaccgcagccagattcggcagggcccgataggcgaagaggtccgggatgctctcgatcgcgatctcgacggatgatacggcatcgcgcccctgcatctgccggcgagcgaacccaagcagcctctggtcggacatgcgcaccatccggtcgaactcggtcgtggcctggacgtacgcgcgcagatatggatcctgtttcggaaccttgaagcgcgtgcgttcgggcggcgccttcggtggcggcggggtgtacagcgccagcgacgtgatcggcagaccgacatccggcgacctcgggcggacctcgacatcctcgctaccgatcttcgcgagttgctcgatcagccggacgatccgctcggcggagccttctcccatgacgtccatgtagtggacggtggtgcggatgcggcgttcgagccggtcgcggaagtcctcgatcttgtccatgaacggcccgacatcctcgaacacgctcttgatcttctcgagctcggcgacgacgcgttcttcggccgtggccatcgttgcgccctcagccatgacaccctgatccatgtaggcgcgcgcgattttgccgaggcgctcggcgtccgccagcatatcccccgccaaggaagcgatcatgcggcggtgacgatacggattgtttgacgtcttgagctgcttgtagtctgcgatgagcaggccatcgacgaagtcttggaagaacgtacggaggatggccgccgcgttcggattgcctaggatccggtcctctatctcgcgcatgccggcgaggatacgacgcatgctgcgggcgaaccgcgaggcggtgtcgtgcgcgttggcgagaccctgggccatcgtctcgggttcgcggtacgcggcctcgaggttgttcttgacgtcgaccaccgcgcccgcgacacgcacgcggctgttgccaaaatcggtgatcgcccccatgaccatgaacgcgtcggggttcatatccacgtaggtgcgccatttctcggtttcttcggtgagccagccggtgtcgcgcaagcggtagtaggccagatagtgagcctggctcgtggtctgatcttcgtccggatcgccctcggaaagatcgcccatcgacccgatgccgaactccgaaagtccgatctcgatctgcttgacgacctcctcccggagcggcgtctcaaggatgcgagcggaatagacccgctcgtatagccgcatcagcaagcgggcatagacgtgcttcttcggcccggacaggggcttgaacagtgtctccggaaggtaaccaaacagcttcatctttcggtccctcagtcagcggattgaaccgcggcgactgcgcaaccgcaaggaaaaacaaaggattttcagagcgttctcttcgccttcctgcgcttaagaaactccctcgccgcctgctccaagatgtcccaagcggccctgtgctcctcattcgcaacctgcttgatgtcggcgatcacgttcggatgcatcatagtcaggaattgaatgcggtccccgatcggggttcgcttgccctttttcgctcccttcttcttaccgaccattcgccgtccgctgtgcgattagttcgctgaaccataatgcggcggcttcgcgggcgccagcagagggcaatttcttcttatataagaacaggatcgcttcttatataagaagaaacagctaaacgcttgattcaccgtcacttctggtttacgatgtgcctggcgcggtccagcatgtccttggtgaccttcacgtcctggatctcgccgaaatattcctgctcgagacgaacggcacctgccggttccgacaaacggccggccatccccgagatgcattcctgcgcgccgtcgcgccaatgggaattcgaagggaggcagcttgactcttcagaacgaaaagggaacataatcccatgagcgcccctcgcgagcagcctgagccgaccgtcgacaatctggacgccgccgccgattaggcaatcgcggcctgcggaggcgacgccggcgaaggcgtgaaggccttgatcgtggccaacgacttcctagagacccagctcgaagaactccggtcgaaggtgtctaggcccggggacggttcccaggagtgcgagagcgcaaggcagatggctgatgtgacctactatctcgctccaccgttcgttttctccgacgacggcctggccgccggcgaggcgacagagtgcctgagcgccaacgcggcggtgatgcgggccgaggcgctgtcccgaaagcccggtcacgccggtgccgtcgcgttctcgcggacgggcgacccctcgtccggagacttcagcgatgccacgctgatccggaacgtcggcgaggtgccggacgatctcagcaccttgtgatgtccggcgtccggctaatcggccattgacgctcgcatcaggagacctcggtgatatagaccttgctcatcgatgatcactgatcatcaccgcttcactcccattcgaaagaggaacaacgtggnnnnnnnnnncccgccccgaacccgttcgcgaccctaaggccgatcaccttctgacctcgcaaaactgcgttctggtcctgatcgactaccagcctgagcagtattccagcgtgacttcgtcctcccgcgaggagatcaccctcaatacgattgcgctgtgcaaactcgctcaagcgtacggcatccctgtggtgctctcgacggtggcggtcgacatgggcgtgaacgaaggcacgattccggagatccgcgcggctctgccgggagtgaaagaaatcgaccgaacgggcgtcaacgcgtgggaagacgaagacttccgcaaggcggtccaggacacggggcgacgcaaggtggtcatcggagcgctctggaccgaggtctgcctcgccttccccaccctggacatgctggccgaaggctacgaggtctacccggtcgccgacgcagtgggcggcatctcgccggccgcgcacgaacgcgcgttcgaccgaatgatccaggccggggcaaggccgatcaccgcgatctccttcggctgcgagatcatgcgcaactgggcccgggaagattccgacaagctgcgagaagtcatgcgatggtatttccctcagcatcgccgcctgcacaagccggcttaagggacaacttcgcagtcccccacagttgagctggctcaaagcgaaaccgcgccggcgggcttagagttggcttcgtaccgagcggcatgagttcgcgcaccggtgccgttacggttgcggagccacggactcctgggcactccgggctccgccccttctattcgaccgcagatgcgacgtcggctcgacagcggcgggcgggcacttttcgctggaacgaagtccgggactgcgggacggcgaaagcatttgaacagtttgagagcgcgatcggtctcggcagcaatacggctgccggggccgaacgatttgcgacttgggtcacgatccatttttgcgctttccggcctcaagagcgctcggcatcaccaaggccaactcgttggccgagatctcgatcgcgtggtgcaaggactcgttgagtttctccgcttccctgcgctgcctgacgcaatggtcgaccagcctctcgacggttctgcgctcgttcgacggaaacgagaagctgaagatgcggttcgtgtcgtgaacaagctgaccgaacacgatcctcttcccgttcagatcgtcgatctttttgacacgatataccccgccaatttcggccgacttcgcggtgtcggcgtagagccaaaagctgactacgaacgcgcccgagggcaaggtccacgaattgccgtggtcgatgtagaacggatggtcgtcgccgtagtgccggatttcggctcccgaatagacgggagggcggagcgcctttatcgccgtccaagtatcgtcgtactccctgttggaccgcctgagagacggctcgatgaacgccaggaaatggatatttaagtccgcgagcagcacgggcgccttggtcagaagtttcaggaacgtcagagaggcctgaggcggcggggccgccttgaggatctcctcgtcgacatcgagagattcctcgtcgtcccagagtccgtcgaaccactctcgggcagccgcgacggacgccacatcggaaatggcggcttcgaggtcggataggttcttcaacccgcggctggacgcgttggccgatcctacgaccaccgtcttctgaccgaggtaaaccttggaatgcagtccgttccgggtcttgatcatcgtgtttttgcgacccagaagacgcttgagctcttccggatcgcaaaagccactattcagatcgcataggattcggacaggtgccgccgttttgaagaggttcagctcatctgccatgccgcgcccccaatatgccacggcgaggtcgatcggaccggacttggcgcgggtgacggaggagttgatcgcgttgagtatcttggggccgaataggaattcagacatcgcagtcactcacgaggggcgcggattgactcatgtcgattcttgttcgtcaagctccgcgacccgctgctgttctttttgtaggactgagagtcctttgcttccgcttcgcagccacgacccgaacgccgtcttggggtcgaccggcagtcgctttcccctcgccaactcagctacggtttcacgcgggtcgcattcgcagcccgccgcggcaataatcctgcagattgatcaccgaggggtctgacacaatctacgggtttcctcttgggttagactcgataagcattgtccgcattgccgtgatgcggctcgcgaacagcggatcgtcgaggaacacccaggcttcgtcgaggacgagcaaagtcggccggccgtcgaaccgcctggccgcggcaccggcggagacgagtccggacgaaggcacctttctcgattacctgcgcctgcattcgttcgacgcgccgggcggcacgctgttgcgggccttcgcgcaggcgggtctcaggagggggatggatctggcaccggagctcagcggcttcgggtaccgcgtgagccgggaccgcggggagacgcctgaagaggcggaagcgcactttctggagaaccgcgcgcagatgctcggcgagcacggcgtcgacgagttcatccgagccgccgaattcctttttaagttcggccggcgcaagtcgatgaaccgcaagcgcagtagctacgggctgaagcacgacgccgagcgcgaaacgggtgactatgtcgcgaacggcatctcatcgccgccgcgctggcgcttggcttctccgccgagcggacccacgtcggttcgccgaacgcctacttcaacatctcgtcaggatgacctccgcgggtggcagcgccgacgccgcttaccatgacggaacacgcccagacgcgtggcgcagttcacgacggcgctgcgctcggcgtaccgtccggcttcgtccagttgatcgcgtcgaaccccattgtgatggagtaggtttcacctttgataacttcggcacctcctaggttgagcaccgcccgcccggtcaccggaaaccggagcgggtccggcgagcctggtgtcgggaacgtcatcagatccatcctctttccgtcgatacctttgtccttttctgtcggtagcacgaactggaagacctcgttgccgtagccgagtacgaagaacgcgtagggcagtcccgtaacgccgtccttcagcctaagcacgatcgccgcaatgaaatcgttcggcattggaccgggttgaaaggcgtaaaatactggcaggtcattggcgaaccttcggctgtgatccttgtccttgatccacgccaaagcctgccgaaaattcggcaactcttcggcgggaagcaaagtcagacccatcttgacgaacgccttcatgacgccgaccggggtgtatggatcgcgcttgagcttgaaagagattgatttcttctcttcgtcgatagccgtcaccggatccgtttcgtaatccttgattttgaaggtgcgggcatcgtcgcactcgatgcgccagcccgtatctccgcctctcttgagcgtcggcacgccggactttccacggatgcgcgccatcgtccgcatcggcttcgaccagtttcccaagtcctgttcgatgcccttgccgaaatcgccgttgcacgtatcgcattcataggcggtgaagaggcttttattgcccagcatttcggagacggcgtgggcgtccttcctgaactgcacctccggcgttgtctttccgcaaaagcggcagacgcgattttccttgtcgccaagcatgatcttctcgccggggctgagcatccagctacccagcatgtcgtaattctcttcgtaaaacttgatggcgtcctctaatgtcggcattcgtgctgctcgcggttctgagccggctgatctaggcaggccgaaagtcgccggcaagttgcgccttccggatagcacctaagttttgtcgctagaaagttcaggcgcgaatctgtgcagggcgccatcctctagattcggtttcagcgagactcttggacgcggagcgttcggaaatgccttattttacaaggagaaagtcggttggagcgggcgaagggaatcgaaccctcgtatgggaagctgtttaggcccttcgagagactggcttccaacgagttggaccgacggcggagctgatcagcctgcggatggtcgtagctcgaatgccagcatttcggccctggattcgtcttccgccagcggtgcaatggtggcagattgggacaaaattgaatgatccgcggttctccaccgcggttctccaccgatgaaaccggtggctctcaatgccccttgttttacaggggttttcgcacgtcgcggtcagatggcggagagggagggattcgaacccccgataggcttgcacctatgccgcatttcgagtgcggtgcattcaaccactctgccacctctcctgaaggcgccatgtaggagcagcggcccccgtggttgggggcgttaataggcgaggatggcgggccagacaaggcgcgggatacgaaaatcggaccggtttcggccgggcgaccggctccagcggttggggcggcgcgtttcggcggcatttcgcgcgatttgtgctgagcatcgggtcgatcggcacgggcggtgacgcgccgtgcatctgaacgaatcatcgctgccctccgtcgggtgaacgggaggggcccacagctcgcgaagcgggaagttcgcctgcggccatccttcgagacacctgcccgcggcgggtcctcaggatgaggtctcgtgtcgtggcgcgattgttttgccggcgcgatgggtccctcatttgaggagcccgctcaagcaggaggaaaacggggtgggaccgccagacgcggtaaatactggcggtcccggtgccgctcattgaaatactggccgtgaagggcggcttcgccggccgagtggaagcgacgattcgaccctaacgtgcggcgggcctgccgcaacgcaatccggtccttaacctaaccggtcaaggttacctgggcgcccgcgccggcaagaccgggcggagcatccctcgcgccgcattggacggatcgaaacctctcacccgagcggcatctgcgatggcatccgacctctcgctccgggagaggtgggcaacggtaggccgatcgaccttggccgcttcagtcgtccttcttgctgtccttggtctttttcttgccgttctccgcggaatcccggtccttgtccttgccgttctccttgcggcggttggtgaagcgggcgttgccgagaccggtgccgatggtgagcacgccccagcgatcgacgtcctgcatgaacggcacctccgacaggccctgaaccacgccgtcattgtgcatcaggatcgcggtgtcgtgctcgccgatggcggggatgccctcgatcaggctcgccggcaggttgaacttgctgctctcccaattgccggggagattctgcgcgcccttctcgatggagccgtcggcgttgatcacgccgggacaggcgatgccgatgaagggcgcgagcttgtagccctcggtctcggcctcggtgatcagccccttcagcatcttggtgagccgcttcaccgcgccttcgcgggtcggctcgtcgtcggcgtgacgccacagctcggatgtcacgaccttggccttcgacaggtccttggccttcttccagccggtctcgacgaggccgcagcggatgttggtgccgccgatgtcgacggcaatgatgctgtcatgggcctcgaagatccaggacggcgccagatgcaacgcgccgacgaggccggcttcgtcggggtgatggcggatcggctgcaggtcgatcttgaaatcctccgatttgaggatgatctcggtgcgcgcgatcgcgagctccccgagccgggaatcgcggaaaccgccgccgaccacgatgcgctcggtcttggcccaggccttggtcttgaggaagcggcgcgtgacgtaggcaagctcctgcgcgaagtcctcgatggcgctgtgcaccacggcggaggcctcgacgtcgtcgccaaccatgatgtcgtccagcgtcttcttgctgatgttctccgtctgctccttgccgaacggatcctcgccgctcttgcgcaacggcttgcgccagcgctcgaggatctcgcggaacgcgcccctgctggcgcggtcgccgaggaagccgtcctcgtccttgatctcgatgttgaaactgtcgacgtccaccgagggcagccgctccgccccgtggtgggcgatgcccgtcgtcttgaccagctcgtctgttgccatgatagcccttgcccgcatgaagatttgcgggacaacggcgagggaacccgttggttgcgtccccggcggagattccgctccagccgctcgaacggcgcaaatccttctaatccgtggctttttcccggggttttccttgactcgcggcgaccagcggctataagtcccacagccggcgcggggcgtttctcgcgccgcttgcttttgcgtgggttttcaatgggctaagccccgcccacgcaaacgcgcataaacccttagcgactgacaaaaagccggcccggacgagtcccgtcccgaggccgggattgaacacgaaggaaaaaaacgatgttcgcagtcatcaaaaccggcggcaagcaataccgcgtcgtgccggatgatgtcctggaagtaggcaagatcgaaggcgaagtcggctcgatcgtgcagctgaatgaagttctggtggtcggcggcgacacgccggtgctgggcgttccgacggtcgaaggtgcctccgtcgcggtcgaggtgctcgaccacaagcgcggccccaaggtcatcgcgttcaagaagcgccgccgcaagaattcgcgccgcaagcgcggctaccgcgacgagatcaccgtgctgcgcgtcagcgagatcctgacggacggcgccaagcccaccaagggcccgcgtccgaagaaggaaaaggtggccaaggagccggcagcggaagccgccgagtagacagaattgatcacgccaattcacgaattgatgcgtgagacgttttgaaatgattccgtcaaggaattgacctagacatacgcaggatttcggagacgagccatggctcacaaaaaagcaggcggttcatcgcgtaacggacgcgattccaagggcaagcgcctcggtatcaaggcgttcggcggggaggtcgtcactcccggcaacatcattgcgcgtcagcgcggcacgacctggcaccccggccttaatgtcggcatgggcacggaccacactttgttcgccaagatcgagggtcgtgttgcgttccaggccaaagccaacggccgcaccttcgtatcggtgctcccgatcgccgaggcggctgaatagacggtggatcaaattggagtccgccggtcccgactgaaccggcggagtcctagagatcgcaagagatcgaaggctccaggggaggcgggaaaccggcctccccttttcattgctcacattgacttagtgactttcacggagccggacatgttgcaggatttctcgagcgtgaccttgcgtgaggcgagacctgatgtcgtcgccaccgagcggctgactttgcggcggcccactctcgccgacgtcaggaccatcgcccggctcgccaacgaccgccgcgtcgccgagaacacgcgccgcctgccgcatccctattcccaggacgacgccgccgacttcatccgcgccaccgccgagctcggcagcgagaccgtgttcctgatcgagcacgataacgggccggtcggcatggtcggcatcgactgctccacaccgggcaatgccgagctcggctactggctcggcgtcgagcattggggccggggctttgccaccgaggccgcgcgcggcgcgatcgacttcttcttcgaggagttcgaggacgagcatctctatgcgggcgcgcgcgtcaccaatccggcctcgcgcaaggtgctggagaagtgcggcttccagtggagcggcgtgcagctgcaccgcttcctggcgctgggctcctcgacgccggtcgactgcttccgcctgtcacgcggggtgtgggcgtcgctgaagagctggagcagcgcaagacgggtgaggtagggcgccaattcccctccccctccaggggagggtaagagctacgccggcggattcacgtccgcggtctcccgccccagatcccgctcccgcaagaagatgtagaacccggcgccgatgatgatggccgcgccgacgagtgtcgcgatcgacgggacgtcgccgaacacgacgaaaccgaagatcacggcccagacgatcatcgaatattggtagggcacgacgacgctggcgggcgcgagcttgagcgagcggttgacgcagaacagcgccgtcaccgaaaccagcccggcggcagcgaagaacacgaggctgccaggcgtcggcggcacccagttgaacgccgacaggaccgcgcccagcgaaaacgtgccgacgaattgcgaggacgccatcacgatatcgggcgtcttgcgcaggctgcgcgtgatcagcatcagggtcgcaaacgacaggctgccgccgagcgcgatcagcgccggcaggctgacggtctgcgccgacggccgcagcgcgatcagcacgccgcagaaaccgatcaggatcgcggtccagcgccgccagcccaccttctcccccaggaagatcgccgacatcgcggtgacgaaaatgggaccggcgagataataggtgatgacgtccgcgagcggcaggtaaaccgtcgcaaggaagaaggcggcaacctccagcgtcgacagcacgacgcgaaccatctgcaggcccggccgctccagatgcaggaactggtgacgctgcgtccagatcagcggcgacagcaagagcagcgcggcgcaggcacgtagaaacaagagctgccccaccgagtaggtcccgaccaggaacttgcccatggcgtcgccgaacgagaacatgaagatcgacagcaccatcagtgcgatgccggccagccgcgcggaacggtcgtcataggcggagagtgacttgaacaggggcatgacgaaacacgagttcggggatcgtcattgcgaggagctcttgcgacgaagcaatcctgactgcttccgcagcggcagtctggattgcttcgctgcgctcgcaatgacggggagagcgcgtcaggaatcggctggtagtggtgcttgccatcgttttaatgacgtaagcaccagggacaagcccacttccgccgaattgaacgcattgtcgcactgcgcgtggcgcgatacggatcgcaatccgaaaacgcgacgatggtgcagcgcatgaccgacttcgatcccacccagcatcgcatgatccccacgcagcgctggttcgaggatttcgtcctcggcgagcgtttcgtgctgccgagccgcacccagacgtcggcggtgttcgccgcattccagaccgcgagcggcgacacccatccggtgcactatgacgtcgaatattgccgcagccgcggcatgccgcatctgctcgcccacggcttccagaccttgatccacaccgcgcccggtgccggcctgtttccattcatggtcgaagactccctggtcggcttcctcgagcagtcgagccggttcctcaagcccgtctacgcggacgatacgatctatccggcgctcgaggtcaccgaactggtgcccggacgcacgaccggcgccgtgacgcttcgcagcaccgtgttcaaccagcgcaaggagctggtgctggaaggcatgcagaaattcctgatccggcggcggccggcgggttaagcaagcggcgaaatcgccagaaattcggccgattggcagggcgctcgggttgccgcgcgggactggctggcctacctatggcccatgaaattcctcgacgaagcaaaggtctacatccgctccggtgacggcgggaacggctgcgtggcgttccgccgcgagaagttcatcgaattcggcggtccctccggcggcaatggcgggcgcggcggcaacgtcatcgtcgaggtcgccgacggcctcaacacgctgatcgactaccgctaccagcagcatttcaaggctcagaagggcgagaacggctcgggctcggaccgccacggcgccaacggcaagaacatcgtgctcaaggtgccggtcggcacgcagatcttcgacgaggaccgcgaaacgctgatccacgacttcaccaaggtcggcgagaagttcgtgctggccgagggcggcaatggcggcttcggcaacgcacatttcaagtcgtcgaccaaccgcgcgccgcgcaatgccaatcccggccaacccggcgaggagcgctggatctggttgcggctgaagctgatcgccgatgccggcctcgtcggcctgcccaatgccggcaagtcgaccttcctctccaaggtcagcgcggcgaagccgaagatcgccgactatcccttcaccacgctgcatccgcagctcggcgtcgtgaatgccgacggccgcgaattcgtgctggcggatattcccggcctgatcgaaggcgcgcatgaaggcgccggcctcggcgaccgcttcctcggccacgtcgaacgctgccgcgtgctgctgcatctcgtcgacgcgacgtgcgagcacgccggcaaggcctacaagaccgtgcgcaaggagctcgacgcctatggcgggcagctcaccgacaagatcgagatcgtcgcgctgaacaagatcgacgcggtcgaaccggaggagctgaagaagcagaaggagcgcctcaagcgcgccgccaaaaagacgccgctgctgctctccggcgtcaccggccagggcgtgaaggaagccttgcgcgcattggccgaggtgatcggcgaaagcccggtctccgccaaggccaagagcgcggcggaagcggagccgtggtcggcttagtcgagcgacgctctctccacatctcccccccccaccggggagaggtcgatttgggtagcaaatcgggtgagggattggctcctctgcgagacaccgcaaaccctcacccggcgctacgcgccgacctctccctccgggagaggttgtcttagtgccatcgatagagcagcatccagcagataagtatcgggcggagatagacgcatggcgcgcgcgaagaacgttctctggatcatgtgcgaccagcttcgctatgattatctcggctgcaccggccacccgacgctgaagacgccgaacatcgacgccatggcccagcgtggcgtgctgttcaccaaggcttacgtccaatcgccgatctgcggcccatcgcgaatgtcgttctacaccgggcgctacatgcgctcgcacggctcgcactggaacggctggccgctgcgcgtgggtgagcccacgctgggcgatcacctcaagaagatcggcgtccgcaacgtgctggtcggcaagacccacatggcacccgacctcgaaggcatgaaggcgctcggcatcccaccggagtcgatcatcggcgtgcacgtcgccgaatgcggcttcgagccgtatgagcgtgacgacggcctgcatcccacgggacgaccgcgtccgaaatacgatgagtatctgcgcagccagggattcgaggccaccaatccctgggagcattgggccaattcaggagcggcggaagatggttcgctgcagaacggctggctgctggtgcatgccgacaaggccgcgcgcgtgccggacgagcactccgaaacgccctacatgacgcggcgcgcgatggacttcatcagcgaggccgaggccgacggccggccgtggtgcctgcatctgtcctacatcaagccgcactggccctacatcgcgccggagccctatgcgagcatgtattcgactggtgacgtgattccggcgatccgctccgagcgcgagcggcagaatccgcatccggtgttcggggcgtatatggacatgcgctattcccgcaacatggcgcgcgatgatgcccgcgagaaggtgatcccgacctatatgggactgatcacccagatcgacgaccagatgggcgtgctgatgaaattcctggaggcgcatggcctgctggaaaccaccatgatcgtgttcacctccgaccacggcgattatctcggcgatcactggatgggtgagaaggaccttttccacgagcagtcggcgaagattccgctgatcatcgtcgatccgtcgcaagaggctgacgccacgcgcggcacgcgcagcgatgcgctggtcgaggcgatcgatctcgcgccgaccttcgtcgattatttcggcggcaaggtgcccggccacatcctcgaaggacattcgctattgccgctgctgcgtggtccgaccccgagcgattggcgcaaggtcgcgttctcagaatacgactacgccatgcaggacgtgcggctgaagctgaaccagccgatcgagcgctgccgcctgttcatggtgttcgacggccgctggaaatacatccacgcctccggcttccgcccgatgctgtacgatctcgataccgatccgcaggaatatgtcgatcgcggcgacgacccggaatgcgccggcgtcatcgcgcggcttcaggccgaactgttcgactgggcgctgcatccgagcggccacatcacgacaccgcgcgagaagatcgcagcctatgcggacaaccagctgcaggtgaagggcggcatcttgatcggcatctgggacgacaaagagctcgccgcgatcaaggacggcatcgcacagcgcgcgaagatgtgagcggaggaaggctctctccatcgtcatgcccgggcttgaccagggcacgacgcctgagtgtgtggcgccgcgagagactcaattctcgatcttgtatccggtcgccttcacgatcggctgccacagcgcgatgttcgctgcgagctccttggtcaatccctccggcgccgagccgaccgggatgagaccgattgccgtgagcttctccttcacctcgggcttggcgagtgcggcgcttgcggcggcgccgatcttgccggcgaactccggcgggctgccggcgggaagccacatgccgtaccaggcgtcggcaacgagatcgatgccgctctgcctcagggtcggcacgtcgggcgcaaagggtgaacgctccgcgctcgacaccgcgatgatcttcacgcccttggcgcgatgctgcggcaacgcatcggccaatgtcgtgatgccgaacgagatatgaccgccgacgagatcgttgagaatgggcgcgctaccgcgatagggcacgcgagtcaggggaatgcccagatccttctcgagcttggagcccatgaaatgcggaatggtgccgttgctcggcaccccgaacgaggtcttgtccggatgtgccttcagccaggcgacgaagctcttgaaatccggggcatcgacgcccgggccgatcacgacggcgaattcgaaccgcgccagcagcgacaccggcatgaagtccttggccgtatcgaagctcggtgtcttctccaccatcggcagcaggtacatggtcggcccggtcgtcaccagcaccatgctgccgtcggggctcgcccctttcacggccttgatgccgatcaggccgtcgccgccggtgcggttctcgaccacgacggtccgctgcagcaacggcgccatctcctgcgcgatcagccggcacagcgtgtcgccgccggctcccgctgcaaacgggaagatgatcttcgtcagccccgcctgcgcctgcgcgtcacccgcccgcgccagcagcggcagaccaagacatccggccatgaatttgcggcgatccatcgttccctctccggctcgttttgattgacggcaattagagcctcgcgagacgcccgacacaaggccggcattgggggcggttacctggcctgccgccttgcgccggtcgtcgtcctgctgcaaaagcagggctcatcggcgccgcccatcgctccgccgtttccagagcagtcccgtcctgttagcgccatggccagccccgaactcagtcaattccgccgcatcgtcgtcaaggtcggctctgcgctgctggtggattccgacaggggtgaggtgcgggcatcctggctcgccgcgctcgccgacgatatggccaagctgcacaaggaagggcgcgacgtcctcgtggtctcctccggctcgatcgcgctcggccgtagccggctcaagctgccgcgtggcccgctgaagctggaggagagccaggccgcggccgcggtcggccagatcgcgctggcgcggatctggtcggaggtgctcggggcgcacggcatcggcgccggccagatcctggtgacgctgcaggacaccgaggagcgccgccgctatctcaacgcgcgttccaccatcggcaagctgctggaatggcgcgccatccccgtgatcaacgagaacgacaccgtcgcgaccaccgagattcgctacggcgacaatgaccgtctcgccgcgcgcgtggccaccatggcgagcgccgatctcctggtgctgctgtccgacatcgacggcctctacgacgcgccgccgaagaacaacccgaatgccaagctcattccggtggtcgaaagcatttcctcggagatcgaggcggtggccggagacgccgagtccgagctgtctcgcggcggcatgcggaccaaggtcgaggcggccaagatcgcgaccacaggcggcacgcatatgctgatcgcctccggcaagatcgagcatcccttgcaggcgatcgccgatggcggccgctgcacctggttcctgacgccggcgaatcccatcacctcgcgaaagcgctggatcgcgggctcgctggagccaaagggcacgctgacgatcgacgccggcgcggttgccgcgctgcgcgcgggggcgagcctgctgccggcgggcgtgatcaaggtcgagggccagtttgcccgcggcgatgccgtggtcgtgcgcggccccgacaccagcgagatcggccgcggcctgatcgcctacgacgccgacgacgccgagcggatcaaaggccgctcctccccggacgtcatggccatcctcggcatcagcgggcgatcggagatgatccaccgggatgacctggtggtgggcggataaggcctttgccccgtcattccgggatggtccgaaggaccagacccggatcccgagattccaggtttgatgctccgcatcccccggaatgacggcgcactgaccgagccagcccgccgccggggaaccagccataccctgcctacccttcgcagacgcgggatttccgtgctaggacaccgccttagcagaaggttgaacccccatggccgctcccctcaaagccgtcgacggcaatgccgatcttcaggcgctgatgtccgatctcggaacccgtgcccgcgctgccgcgcgcgtgctggcgctggcgccgccggagcagaagaaccgggcgctggaagccatggagcgggccattcgcgccaatgcgaccgccattctcgccgccaatgccgaggacgtcgcggaggcccgcgcctccggcaatgccacctccgccttcatcgaccgcctgacgctgacgcctgcgcgggtcgagggcatggccgagggcatcggcatcgtgcgcggcatcgccgatcccatcggggtcgtcaccgagagatggcagcggccgaacggcatgagcatcgagcgcgtgcgcgtgccgctcggtgtcgtcggcgtgatcttcgagagccgtcccaacgtcgcggccgacgccggcgtgctgtgcctgaaggcgggcaatgccgtgatcctgcgcggcggctccgacagctttcgctcctgccgcgcgatccatgactgcctggtgcagggcctgcgcgaggccggcctgcccgaagctgcgatcacgctggtaccgacgcgcgatcgcgccgcggtcggcatgatgctgtccggcctcgatggcgccatcgacgtcatcgtgccgcgcggagggaaaagcctcgttgcgcgcgtcgagcaggaagcgcgggtgcctgtgttcgcgcatctcgagggcgtcaaccacgtttatgtcgacggcagcgccgacctcgcgatggcaaagtcgatcgtgctcaatgccaagatgcgtcgcaccggcgtctgcggcgcggccgagacgctgctggtcgatcgcgccgcggccggcaagaccttgaagccgctggtcgagatgctgctggatgccggctgcgaggtgcgcggcgacgaggccgtgcagaaggccgacgcgcgcgtgaagcctgccagcgaagaggattgggacaccgaatatctcgacgccatcatcgcggcgaaggtggtggacggcgtcgacggcgccatcgcgcacatccaaaatcacggctcccatcacaccgacgccatcgtgagccaggatgaggtcgccgcgaagaaattcctcagcgaggtcgattccgcgatcgtgctgcacaacgcttcgacgcagttcgccgatggcggcgagttcggtttcggtgccgagatcggcatcgccaccggccgtttccacgcccgcggtccggtcggcgccgagcagctgacgagcttcaagtatcgcgtccacggcaccgggcagacccggccgtagacgtcgcgaggcgcgcgcattgagcaacacattcctcgtgccgcgtttcgtggcgcaagcgatcccgccccacatgccgggcatgcgcatcggcctgctcggcggatcgttcaatccgccgcatcaggcccatcgcgccatcagccagttcgcgctcaagcgcctgcagctcgaccgtgtgtggtggctggtcacaccgggcaatccgctgaaggagaacggcacgcttcatgagctcggcgcgcgcatgcaagccgcgcgcgaggtcgcggacgatccccgcatcgcggtgagctgtctcgaatccgtcattcgcacgcgctacactatcgacacgatcaacaccctgcgccgccgcctcccggctctgcgctttgtctggatcatgggcgccgacaatctcgctcaattccaccgttggcaggactggcggcgcatcgctggccaggtgccgatcgcagtcatcgaccgccccccgcagagttttcgcgcgctcggctcgcccgccgcccaggcgctagcgcgctaccgcctacccgaaggcaaggcagcactgcttgcagaccggccggcgccggcctgggtgttcctgaccggattgaagctgaacctctcctcgacaggcctacggaacccggacgggagttggaaaggtacgaagtgagacgaagtgtgcgggctggggcgctctggcatattgaaacccttaaccccacatgatgtagtgtaaccagtgagcgccggattcggcgttcgcgatacagtgaaaggaatggtccctgaccgcatctgtattgtccaagtcgacttccacgaagccagcttcgacgaagtctgttttacccaaggttgccaagccgacgcgtaaaacatcgaccaaagctgcggccttgaaggcgcaacccgacgccgacaagacgctgagcctgatcctctcccgcctcgaggacatgaaggcggaagagacggtcaccatcgaccttcgcggcaaatcggcgtactccgactacatgatcgtcaccaccggccgggtgaaccggcacgtcggcgcgatcgcggaaaacgtcaccaagagcctcaaggaaaacggcatcaagaacatccatgtcgagggcttgcccaattgcgactgggtgctgatcgattccggcgacgtgatcgtgcacgtgttcagacccgaggtccgcgaattctacaatctcgagcgattgtacacgcagggcccaggggcggcgaaggcgatctaggctcatcgagccgatttcgaatcggctgacgcgcatgctagcgtcgtgcgcgcgcccgatgcgcgcgaccttgaaaacacgacgctgaaagcgtcgcccctagaagacgtcatgcgtgttgctgtcattgcggtgggccggctgaagcagggccccgaacgggagcttgccgaccgctatttcgagcggttcgacgacgccggccgcaagctcggattccgcgagctcagcatccacgagatccccgaaagccgcgcgcgcgacaccgcgacacggatggccgaagaggccgcggcgatctcggcgcatattccggagaaatcgatcctggtggcgctggacgagcgcggccagaacctcgaatccaccgtattcgcacggcatctgtcgcgctggcgcgacgagggtgccggacatactatcttcatgatcggaggggcggacggactttcgcccgaattgcgccgtaaggccaagctcgcgatcgcgttcggctctgcgacctggccgcaccaaatggtccgcgtcatgcttctggaacagctttatcgggccgccaccattctggccggccacccctatcaccgcgcgtgacacgcgccacgacgagcacctttgccgagacgatgcgagcgccgctcctcaacctgttgctgatcacaagccttgccggcgcaagcctggcgcaagctcagacggcggcgcccccgcagaccgcggcgatttcgcccgaagcgatcaagcagcgcgagcaggagctcgaggccgcgcgcgccaggcagaagagcgcggaagaagcgcaggccaagctcaaggcagagatcgccgcgctcggccaggaccgcagccagctcaatcagcagctgatcgagaccgccgccaatgttcgcgctgtggaaaccaagatcgatgaggccgaagcgcgattgggcgcgctgaatgcccgggagcaacagatgcgcgcctcgctcgattcgcgccgcgccgacatcgtcgaggtgctggcggccctgcagcgcgccggaaggcgcacgccgccggcgctgctggtgcgccccgaagatgcgctgcaatcgctgcgcacggcgatgctgctcggcgccgtcgtgccggaattgcgagggcgagccgagaagatcgcggccgagctcggggagctcgtcgccttgcgcaagaccattgccaccgagcgcgaccagctcgcctccgatcgcgacaaggtccgcaacgaccagacccggctcacggctctggtcgacgaacggcagcgccagcaggcggcacgcgaaaaggatctcgatgccgagaagtcgcgcgccatcatgctttcaaaacaggtcggtgatctccagggactgatcaccaggatggagcaggacctgcaaagcgccgccaaggccgctgagaaggcggctgaggccgccaggcaggccgaggcaaaagcggccgccagcgccaagtccggtccggccgctttcaaggaccgctcccgcaccaccccggcgatcgccttcgcctccgccaagggcctgctgccgcttccggttaacggtaacaagatcagggattttggcggttccgacggggtcggtggggtccagaagggaatttcgctggccaccaggcccggctcccaggtcacgacgccgtgtgacggctgggttgtctatgccgggcccttccgcagctatggacaactcttgatcctcaatgccggtggcgggtatcatgtcctgatcgctgggatggagcgcatttcggtcaacatcggacagtttgtgctcacgggggagccggtcgcgaccatggggtcgacttcgcaagtcgcctccattctcgccacgaacgcgagtcaacctgtgctgtatgtcgagttccgcaaggacggcactccaatcgatccaggcccatggtgggccacaaatgaaggcgagaaggttcgcggatgatgcgcaagacttcagtaatcctcctcagcgccgccaccggtgcagcgctgacgctgttcgtgacccagccccgcgcggtgttcatgggctccagcgcgcgagccgccactgccgacacttatcgccagctcaacctgttcggcgacgtcttcgagcgggtgcgctccgactatgtcgagaagcccgacgacaccaagctgatcgaatccgccatcagcggcatgctcaccggcctcgatccgcattcgagctacatggacgccaagagcttccgtgacatgcaggtgcagacccgcggtgagttcggcggcctcggcatcgaggtcacgatggaggatggcctgatcaaggtggtctcgcccatcgacgatacaccggcatcgcgcgccggcgtcatggccaacgacatcatcaccaacctcgacgacgaggcggtgcagggcctgaccctgaaccaggcggtcgagaagatgcgcggtccggtcaacacaaagatcaagctcaagatcatccgcaagggccaggacaatccgatcgacgtcacgctcgtgcgcgacaacatccgcgtccggtcggtgcgcgcgcgcgtcgagcaggacgatatcggctacatccgtatcaccaccttcaacgagcagaccaccgaaggcctgaagcgggagatcggcaacctcacgaaccagatcggcggcgacaagctcaagggcttcatcatcgacctgcgcaacaatccgggcggcctgctggaggaagcggtcaccgtttccgattccttcctggagaaaggtgagatcgtctcgacccgcggccgcaacgccgaggagacccagcgccgcaccgcgcatgcgggcgacctgaccaagggcaagccggtcatcgtgctggtcaacggcggctcggcctcggcgtcggaaatcgtcgccggcgcactgcaggaccacaagcgcgcgaccatcgtcggcacgcgctcgttcggcaagggctcggttcagaccatcatcccgctcggaagcggcaacggcgcgctgcggctgaccacggcgcgctactacacgccgtcgggcaagtcgatccaggccaagggcatcgtgcccgacatcgaagtgctgcaggacgtgccggacgagctgaagtcccgcaccgacaccaagggcgaggcttcgctgcgcggccatctcaagaacgacggcgacgagaagaccggttcgcagtcctacgtcccgccggatgccaaggacgacaaggcgctcaagctcgccggcgacctgctccacggcatcaagaacagcgcctcggcggcgcccgcgcccggcagcgacaacaaggcgacgaccgacaagcccaaagcggccaactaaatcggcgcattgatgcgatctggcagagggcggcttgctgaagccgccctttttgcttgggaactcctgaagcctccggcctatcccggcctgccgccgcttgaccttggcgtggtatcgtcggctggagtgattcgggatctcacatgactgaaacggccgatgatctgagcgccccgctcggacaggacaagccgcgccggaagcgccggctgcggctgccgttcacggccatgcagttgcttgccgtcctgctcggcctgttcctggttaccttcgccggcttcgccatcttcaacaaggatccgctcggcggcgagccgatgacccggatcgcgatcaagccgacggacaaggctgccgacgagaggcccgcagccgcaagccatgcttcggatgccaaacacgacggcaagcccaacaccaaggaggtgccgaagcaggccggcgagcaaaagaccatcaccatgatcgacggctcgaccggcgcccgccacgacgtggtgattggagccggcgagagcggcagcgacaagggtggtacggcttccgcaccgccgcccgtcatggccgggatcaacccgaagctgctggagaagtctcgctacggcatgatccccgtcgtggctgacgggctgaagccgttcaacgtctatgcagccgacgccgaccgcgccaaggctgccaccatgccggtggtcgcgatcgtgattggcggcctcggggtcggcgcggccaagaccaatgatgccatcatgaggctgccgcccgcggtgacgctggcgttcacgccttatggcgccgaccccggcaagctcgccgagcgcgcccgcgcgcagcgtcatgagatcttcctccagatcccgatggagccctacgacttccccgacaacgatccggggccgcagacgctgctgacctcgctcagcgccgaccagaacatggaccgcctgcactggcacctgagccggttgcagggctatgccggtctcgccaatttcatgggcgcccgcttcatcgcgaccgaaccggcaatgcagccgatcatgcgcgaggccgccaaacgcggcctcggcttcttcgacgacggctcctcgccccgcagcatcgcctcccaggccgcggcgaaccaggccatgccgttcggcaagggcgacattgcgattgacgtggtgccgaccccgaccgagatcgaccgcgctctgaacaagctcgaatcgaccgcgcgcgagcgcggcatcgccgtcggcacggcctccgccctgcccgtctcaatcgagcgcatcggcgcctggaccaagacactgagcgaccgaggtatccttttggtgccattgacaaccgcgatgctgaaatcaaaatccagctaaatcaacgaattggtacggtacggctccccgcgggccgccggacctgaggcatgcgagaggtctggcggaatggcgcgttacgaggatctgccctaccggacctgcgtcggcgtgatgctgatcaatccaaagggactggtgttcatcggccgccgcgccggcggcatcgagcatgtcgacgacacccatgtctggcagatgccgcaaggcggcgtcgatcctggcgaggacacctgggaagccgccaagcgcgagctttatgaggagacgagcgtacgctcggtcgagcggctcggcgaggtccccgactggctcatctacgacatcccccgcacggtcgccggacgcgcctggaagggccgctatcgcggccagcgccagaaatggtacgcggtgcgcttcaccggcaaggacagcgagatcaacgtcgagcatcccggcggcggccacaaggccgaattcgtgagctggcgctgggagccgatgaaaaatctcccggaactgatcattccgttcaagcgtccggtctatgagcgcgtggtgaaggaattttctgcgctggcaggtcaatagtctctatggtcgtcccggcgagatgcgaagcatcgcctcggaatgacgacgagagacactagcaagtgaccaacgaaaagccctaccgccccaacgtgggcatcgcgctgttcaataccgagggccgcgtgctgatcggccatcgcttcaagggcgacgggccggaaatcatcctgccgggcctcgactggcagatgccgcaaggcggcgtcgacgagggcgagaatctgcgcgacgccgcgatgcgcgagctctgggaggagaccagcgtggtcagcgcggactacctcggcgagaccggctggctcacctacgagttcccgccttacgacggaccgcaaacgcaccggctggcgaagttccgcgggcagcgtcaaaagtggttcgcactgcgcttcaccggcaaggacgacgagatcgatccgctgacgccgcgcaacggccagccggcggaattcgacgactggcgctgggagcgcctggatcgcgtcgccgacatcgtggtgccgttccgccgcgaggtctatcaggcggtggcgcagcagtttgcagccttcgcaaactaactcgcgaaaacaaccccatgcacagtagcgaagtgtttggcaggacgagataaatgggcgggacggcgtaagcgtcgcagctgcgtcgatcgcctagcaagattgcagcgcccgccacttccgtgacgagcgctgaaccaggtcaggaatctggagcttgagccccggagcagtgccccggggcttagtgcatagccgtcgcgttgagctggtgctggatgctcttgaagtggtcgagccgctcgatggcctgatcgagctcgtcgccttcgtgctccttgaggctttcttccatctccgcgatcgtctctgcgaactgcgcacggtcgagctcggcgagcgacgtcgcgacgtcggcaagcacggtcaggccgttctcggagacttcggcgatgccgccgagcacgatgatcttctcgtgcttgccgccggtggtgacggtgagaatgccgggccggatcgcagccacgagcggcgcatgtcccgccagcacgccgaaatcaccttcgacgccggggatgtcgacctgatcgacctcacccgagaaggcgagcttttccggagagacgagatcgaagtggaaggtggccatggagaacctgcgaatacgaatggcgaatagcgagtggcgggcaggagcagcgtatgattcgcggctccctgttcgccattcgcctcttaagccgcttcagcggccagcttcttgcccttctcgaccgcctcttcgatggtgccgaccatgtagaaggcggcttccggcaggtggtcgtacttgccttccaccaggcccttgaagcccttgatggtgtcggcgaggtcgacgaacttgcccggcgaacccgtgaagatttcggcgacgtggaacggctgcgacatgaagcgctcgaccttgcgggcgcgggccacggtcagcttgtcctcttccgaaagctcgtccatgccgagaatggcgatgatgtcctgcagcgccttgtagcgctgcagcacctgctggacctgacgggcgaccgcgtagtgctcctcgccgacgaccagcggggagagcatgcgcgaggtcgagtcgagcgggtccaccgccggatagatgcctttttcggcgatcgagcgcgacagcgtcgtggtcgcgtcaagatgcgcgaacgaggtcgccggcgccgggtcggtcaagtcgtcggccgggacgtagatggcctgcaccgaggtgatcgaacccttctgcgtggtggtgatgcgctcctgcagcgcgcccatgtcggtcgcgagcgtcggctgataacccaccgccgaaggaatacggcccagcagcgccgacacttccgagccggcctgggtgaagcggaagatgttgtcgacgaagaacagcacgtcctggcccttgtcgcggaaatcttccgcgatggtcaggccggtgagcgcgacgcgggcgcgggcccccgggggctcgttcatctggccgaacaccagcgcgcacttcgacttcacgttcggatccgggttgtgcggatcggcgttgaccttggactcgatgaactcgtgatagaggtcgttgccctcgcgggtacgctcgccgacgccggcgaacaccgagtagccgccgtgcgccttcgcgacgttgttgatcagctcctgaatcagcacagtcttgccgacgccggcgccgccgaacaggccgatcttgccgcccttggcatagggcgcgagaaggtcgaccaccttgatgccggtgacgagaatttcggcttcggtcgactggtcggtgtagctcggcgcttcctggtggatggcgcgcaggccttccgacttgaccggaccggcttcgtcgatcggctcgccgatgacgttgatgatgcggccgagcgtgccctcgccgacgggaacgcggatcggagcgccggtgtcggtcacttcctggccgcggacgaggccctcggtggtgtccatcgcgatcgtacgcacggtagattcgccgagatgctgggcgacttcgagcaccaggcgattgccgccgttcttggtctcgagcgaattgagaatggccgggaggtggccttcgaactgcacgtcgacgacggcgccgatgacctgggtgacgcgaccgacctgggctgccattgaatgtctccttcgatccgaacttctagaccacggtcagcgtgaccgggatgttgcgtgtggtggtactgaagcgccttggtcagacggcttcggcacccgagatgatttcgatcagttccttggtgatctgcgcctgacgcgtgcggttgtagaccagcgtctgcttgcggatcatttcgccggcgttgcgcgtcgcgttatccatcgcgctcatctgcgcgccgtagaacgaggcgttgttctcgagcagcgcacggaagatctggactgcgaggttgcgcggcaagaggcgggtgaggatctcgtcctcttccggctcgtattcgtaggacggggggttggcggcagcgccctcctcgaccaccagcgggatcacctgctgcgcggtcggaatctgcgcgatcaccgacttgaagcgcgaatagaacagcgtgcagacgtcgaactcgccggcctcgaaacgggccagcaccttcttggcgatctcctcggcattgacgaagccgagctggcggacgctgcgcaggtccatgtgctcgacgatctgcttgtcgaactggcgacgcagctgctcgtagcccttgcggccgacgcagaagaacttcacgtccttgccctgcgccatcagcgccagagcgcgctcgcgggcgagacgcacgatcgatgagttgaaggctccggagaggccgcgctcgccggtgcagaccagcagcaggtggacctggtcccggccggtgccggccagcagcactggcgcgccgggcgagccgacagcggcgctggcgatgtttgagatcaccgcgctcatcttgtcggcatagggacgcgccgcttccgcagcggtctgtgcacggcgcagcttcgatgctgcgaccatctgcatggccttggtgatcttttgcgtcgccttggtggaggcgatgcggacgcgcatgtctttaagtgacgccattcttcgttccccccggcggttcgatcctcgcgatcaagccgctagccaatcccagtcgatacatggccgggctcgtcccggccgtccacgcgttgccgcgtggagaggaatagtttgatgcccgggacaagcccgggcacgaagactcttacgcgaagctcttcgcaaaaccttcgaccaccgacttcagcttggcggcggtttcgtcggtaagatcgcgggtgtcgcggatcgcgttgaggatgtcgacatgcttgccgcgcagcagcgagagcaggccgtcttcgaacgcgcgcaccttgttgatcgggagcggatcgagatagccgttggtgccggcccagatcacgcagacctgctcttccatcttcagcggcgagaactgcggctgcttcaggagctcggtgaggcgagcaccgcgattgagcaggcgctgggtcgaggcgtcgaggtcggaaccgaactgcgcgaacgccgccatttcgcgatattgtgcgagttcgcccttaatcttgccggcgaccttcttggtggccttggtctgcgccgaggagccgacgcgcgacaccgacagaccgacgttcaccgcgggacggataccctggaagaacaagtcggtttccaggaagatctggccgtcggtgatcgagatgacgttggtcggaatgtaggccgacacgtcgttggcctgggtttcgatgaccggcagcgccgtcagcgagcccgagcccatgtccttgttcagcttcgccgcgcgctctagcaggcgggagtgcagatagaacacgtcgccgggataggcttcgcggcccggcgggcggcgcagcagcagcgacatctggcggtatgcgacggcctgcttggagagatcgtcatagatgatgaccgcgtgcatgccgttgtcgcggaaatactcgcccatggtgcagccggtgaagggcgcgatgtactgcatcggcgccggatccgaggcggtggcggcgacgacgatcgagtattcgagcgcaccctgctcttccagcaccttcacgaactgggcgacggtcgaacgcttctggccgaccgcgacatagacgcagtacagcttgatgttctcgtcgggctgcgcgttgagcggcttctggttcaggatggtgtcgagcgcgatcgcggtcttgccggtctggcggtcgccgatgatcaactcgcgctggccgcggccgatcgggatcagggcatcgatcgccttgaggccggtggccatcggctcgttcaccgacttgcgcgggatgatgccgggcgccttgacgtcgacgcgcatgcgcttctcggcctggatcggacccttgccgtcgatcgggttgccgagcgcgtcgacgacgcggccgagcaggcccttgccgaccggcgcgtccacgatggcgcgggtgcgcttgacggtctggccttccttgatctcgcggtcggcaccgaaaataacgacgccgacgttgtcggtttcgaggttcagcgccatgccgcgggtgccgttctcgaactcgaccatttcaccggcctggacgttgtccagaccgtagacgcgggcgataccgtcgccgacggacagcacctgtccgacttcggagacttcagcttcctggccgaaattcttgatctggtccttgaggatcgcggaaatttccgcggcgcggatgtccatcagcctgcctctttcatcgcgtgcttgatcgaattgagtttggtgcgaagcgaaccatccaccatgcggctgcccagcttgacgacgaggccaccgatgatcgagggatcgactttcacgttcagcgcgacgtccttgccggtcaccgacttcagggcaaccttgagggcatcgagattcttgtcagagagcgcttccgccacggtgacgtcggccgtcgtctcgcctttgaacttggcgacgagcgcgcggtagtcgcggatgatgtcggccaccgcgaacagacggcgattggcggtcagcaccttgaggaagttggcggagatgccggcgatacctgccttggccagaacggccgacagggccctggactgggtgtcggccgcgaaaaccgggctgcggacgaggcgcttgagatcagcactctcgttcagcaaggcaccgaatttgtcgagatcggccttgacctcgtcgaccactttctggtcgcgcgccaattcgaacaaggccgttgcataacggccggacacacctgaaacggacgtatcttctgcagccacagacgcgctctttttgctgtcaaactcgcaagggaaaaaccgtcgccacgaagcggcgcctagcgatccaagcccttggaattcaagcgggacttcgattttcgaccggcacgggaggtgccgggctcgttaaaatcgcggctttgctaacatagcaggtgcgcaggtgcaacatgacgccagattaaaggcacgaggttctgtcgtcagttcgtcgcagccaatgccgcatccgaaggcgacgctgcgaggcgtgaccgattacatctcacggcgcggaaatttcgatcggcccacgccccaatctcctgcattggttcctgcctccagcgcatagcggccatgaacacggatcgctgagccgtgaatccgagcacgtgggttccgcgcgccgaatacttaccaatttctgaacagcggcgacgatgacttcgctctacagtaaaaacaagtaatcgctaggttaataattcgttaaagcgaaagattacggaacatcggctgaatatcggctccgggtcacaagatgtttcgtggtgacacatagcggatttactgcccaattcacgccgcattgggaatcgaaacgcgaacccgctcacaaactgatgggggctccactagccacatatgtggcaatactagcttagggaccactaaatgctgtctttgaagacgctgggctctgtgacccggccgcgtacggctattgctttcgttgccgcaactctcctcgtcggtggaactgccaccgaagcttccgccaaatctcggcgtcaccatcaccgccaccacgcccagacccataccaatgcgacctccgactggcgcaacgccaatgcgtcgatgacgccgacctccggcaccggccgcagcttctccggcgtggcttcctattatggaaacgaatccggcagccggaccgcgtcgggccagcgcttcaaccagaacgccatgacggcggcacaccgttcgctgccgttcggcaccaagctgcgtgtcacccatggcagccagagcgtcatcgtgaccatcaatgatcgtggcccgttcattcgcggccgcgtgctcgacctctccacgggcgccgcccgtgccatcggcctcaccagccgcggcgtgggccgcgtcacggcggaagtcatctcctgacggcgcgttagagcgctcatctcacacgcgcagttttcatcagtttgttgcgcgcacgaacaagcccgcggtcttgggggaccgcgggctttttgtttggtcatgatgcactctctccacctcgtcattgcgagccaacggtccgcgcagggcgcggccctatgacaggctccgcgaagcaatccaggctggttccgcggagggaccctggactgcttcgtcgcttcgcccctcgcactgacgtggagagagagtgcgcagcctttacaagaagctctgcggatcgacgtccacttcgagcttcagattgcccgtcggcttcgggcagaccgccagccaggtccgcaggtagtcggacaaatcgaacccgcgcgccgacttcaacaggatgcggaagcgatagcggcccttgatcaccgcgagcggggcctctgccggaccgagcaccacgacgcgctcgtcgcgcggggcgagcgtcacgagcttgcggccaaagccttccgcgctcgggcggtcgccggccgagatgatgaggctcgcgagccggccgaacggcggatagagcgtcttctcgcgcagctcgatctcgctgtcgtagaaggcctcgcggtcgcaggcgaccagcgccttcatcacgggatgatcgggctgatgggtctggagatagccgacgccgcgcccctgctcgcgtccggcgcggccaatcacctggttaagcaattgccaggtccgctccgccgcgcggggatcgccgttgctgagaccgagatccgcatcgacgacgccgaccagattaagccgcgggaaattgtgaccctttgccacgagctgggtgccgatgatgatgtcgacgcggccctccgcgatctcggtgagctccgagcgcatcgtctcgatcgaggtgatgagatcgctcgacagcaccatggtgcgcgcttccgggaacagcgctgccgcctcctcctgcaggcgctcgacgccgggcccgaccgcaaccagcgattcctcggccgagcagttcgggcagatatgcgggcgcggcatcgagaagccgcagtggtgacagaccaagcgctggcgaaagcgatgatcgaccagccaggcgtcgcagatggtacaggcgaagcgatggccgcaggcacggcacagcgtcagcggcgcatagccgcggcgattcaggaagagcagcgcctgctcgcggcgctcgatcgcaactctcatctccccggcgagccgcggcgagatgaagcggccgcgcgcgggcggctcgcggcgcagatcgatggcctcgatatgcggcatgtgctggccgccgaagcgcgagggcagcgcgatgcgctgatagcggttcttgcgcgcgttgacctcggactcgaccgatggcgtcgctgacgccagcacgaccggaatcctggcgatatgcccgcgcaccaccgccatatcgcgagcgtggtaatgcacgccctcgtcctgcttgtaggcctggtcgtgctcctcgtcgacgacgatgagcccgagatcggcatagggcaggaacagtgccgagcgcgcgccgaccacgaccggcgcagtcccgccggagatcgccgcccaattgcgcgcgcgggtgcgcggcgtcagctccgaatgccattcgatcgggcgcacgccgaaacgctgcgcgaagcgatcgaggaactggccggtgagggcgatctccggcataaggatcagcgcttgcttgccgcgacggatcacctcggccacggcttcgaagtagacctcggtcttgcccgacccggtcacgccatcgagcagcgcgacgtggaacgtgccgttggccgcgagcgcgcgcatcgtgtcgacggcagtgcgctggagcggcgtgaaatccggccggccgaattccggatcgggcgccggaggcggcggaggcggcggcatcggctcgaccgtgagcgtgccttcatcgacgaggccgtcgatgacgccagcggacacgcccgcctccctcgccgcctcggactttgcgtgcagcagccggtccgacagcagcgcgatcacgcgctgccgtgccggcgtcagccgcttcgggggatcgccagtgaggcgtacgccggcgcgcgcccgctcagggccgaggttctcgcccatgcgcaggcacatgcgcagcaccatgccgcgcgggctcagcgtgtaattggcaacccagtcgaccacggagcgcagctcgggcttgagcggcgggatatcgagcttctcgctgacctccttgaggcggttgtgcaggcgtggatcgggattggcgttttcgccccagaccaccgccagcacctcgcgcggcccgagcggtacgccgacgaggtcgcccgccttcagatccatcccgcgcggcaccttgtaggaataggtctggtcgagcgcgaccggcaccagcacgtcgaccatgcgggtcgcgttggcggaggtggggctgcgcggtgtgtgatccatggatggagaatcggaactcggggtcttgaagctagcgccctgggccggccttagcgaacgataaacgagtgggatgcgatatactgtgcggaatcatcacgtccagagcgcatgagcaaagcggccgccccacagatcgagctcgccagcgccgatccctcgatcgcgcaggagatggcgcgctggctctcgcatctcggcgccgagcggcggctgtcgccgaagacgctggaggcctatggccgcgacctgcggcagtgcctggattttctcagcaatcattggggcgagcgcgtcaccctcgagcgcttcgcgaggctggaagccaccgacgtgcgtgccttcatggcgatgcgcagggccgacgacattgccggccgctcgctgatgcgcgcgctggcgggcctgcgctcgttcggacgtttcctggagcgcgaaggcaagggcaaggtcggcgcgttgtctgcgatccgcgcgccaaaagtcgcaaagagcctgccaaagccgctgccgatggcctcggccaaacgtcttgccgatgccgacgagcgcgccggcgaggaacgcgagacctggatcctggcgcgcgatgctgcggtgatggcgctgctgtacggctcgggcctgcgcatctccgaagcgctcggcctgaagcgccgcgaggtgccgcgccccggcgaaggcgacgtgctggtcgtcaccgggaaaggcaacaagacccgcatggtgccggtgctgcagaacgtgctcgcactggtgcaggagtacgtttcgatgtgcccttacccgctgccggcggaaggcccgatcttcgtcggcgcgcgtggcggccccttgagcccgcgcatcatccagcttgcgatggagcggctgcgcggcgcgctcggcctgcccgacagcgccacgccgcacgcactccggcactccttcgccacacatctgctctcgcgcggcggcgaccttcgcgccatccaggaactgctcggccattcctcgctctccaccacgcagatctacaccggcatcgattccgagcggctgctcgaagtctatgcgagcgcacatccgcggcgctgacacactgacgtcataacttccttgcctcttgcgaaggccgcgcggttggttcaatcgtggggaaccgaggcaggagggatttatgggcgcacacgaaagcatggagcacgccgagcacgccgaacatgcgtccggctcgaacaagaagatcgcgctcctgatcgccgtgctggcgctgtttctggcgatctcggagacgctcggcaaaggcgcccagaccgaatcgatcagcaagaacgtcgaagccgccaacctgtgggcgttcttccaggccaagagcatccgccgcaccgtgatgctgactgctgccgagcagggcaggctgacgctggcgggcacggccgacgatgccatgaaggcgacggtgcagaaacagatcgatgactggaccaagaccgcgcagcgctaccgctccgagcccgagaccggcgaaggcaccgagcagctcgccgcgaaggccaagcacgccgagcacgcgcgcgacgaggcgacagccaaataccaccatttcgagctggcatcggcagccttccagatcggaatcgtgctggcgtcggcgaccatcatcaccggcatgctggcgctggcctatgtcagcggggtgctgacgatcgccggcctgatcatgaccgcgctcggcctgtggtggccgcatctgttgcacttgcactagggagcggagatcgctgtcctctcggcgtcattgcgaggagcgaagcgacgaagcaagtttctggattgcttcgcttcgctcgcaatgacggaagaaccagataagcccactcaataagctcaccgcgcctggtgcacgctcctgcggaaacgctggaccatgcgcagcgtgcgataggaccacccctcgccgttgccggcgatcagctcgcggatgcgccgcttgatcgggtcaaccagctcggcagccttggcacgcaccttcagcaccagaacgtagattcgctcgaaccagtgcatctccagaagcttggcgcgggtcacgtcgaacacgaaggcggtgacgccgacaccgaccagctttgcgaacacgatcatgaagaacgcgctggtccagtattcgtgggcaagcagccagaggccgaccagcttgagcggaaacagcggaacgacggggaccgcgaacacgatcagcgtcatggctggcgacaatgcattgacgcgctccgtcagccattgcttgaagcgcgccagcgggatcgctgcgacgacccgggcgacgatcggctcgagatggtcccacagccaagcttcgatcaggaagatgatcgcaagcagaacccagaccggttgaagcaggcggcgcagcatatgtttcccgcccggttcggtgctgggcgcgcggttacatatggatggcccgcttgccgactgcaagcgcggcttccttgacggcttccgagcgggtcgggtgcgcatgacaggtgcgtgcgagatcttccgcactgccgccaaactccatgagaacacaggcttcatggatcatttcgccggcttcgcgaccgataatgtgcacgccgagcacgcgatcggtcttcgcatctgcgaggatcttcacaaagccgtcagtggtctggttgaccttggagcggccgttggcggtgaacggaaacttgccgaccgtataggccacgcctgcctgcttcagctcttcttcggtcttgccgacggaggacacttccggcgtcgtgtacacgacgccgggaatgacgtcgtagttcacgtgaccggcctgccctgcgatgatctccgccaccgcaacgccctcgtcctcggccttgtgcgccagcatcgggcctgcgacgacgtcgccgatggcatagatgcccttcacgctggtggcgaaatgcgcgtcgatctgcacgcggccgcgcgcatcgagcgcgacgccggcttccttcaggccgagaccctcggtgtagggcacacggccgatgcagacgagcacgacgtcggcttcgagcgtctctgcggtgccgccggcggcgggctcgaccgtcgccttcagcgtcttgccggaggtgtcgaccgcggtgaccttggcgccgagcttgaacgcaaagccctgcttttccaggatgcgctggaactgcttggcgatctcgccgtccatgccgggcaggatgcggtcgaggaattcgaccacgacgacctcggcgcccaggcgatgccagaccgagccgagctcgagaccgatcacgccggcgccgatgatcagcagcttgccggggaccttgtccagcgagagcgcgccggtcgaggacacgatgcgcttctcgtcgatatcgatcccctggaggcgcgcgatgtccgagccggtggcaatgacgatgttcttcgtttcgatcgtctgcgacttgccgtcggcggagacttccaccttgccggtgcccaagatcttgccggtgcccttgagcacgtcgatcttgttcttcttcatcaggaactcgacgcccttgacgttgccgtcgatgccctgctgcttgaagttcatcatcgccggcagatcgagcttcggcgcggaaacgctcacgcccatcttggcgaaggaatggccggcttcctcgaacatctcggatgcgtgcagcagcgcctttgacggcatgcagccgacattgaggcaggtgccgcccagggttgcattcttttcgaccacggcgactttcatgccgagctgagctgcacgcaccgcgcaaacataaccgcccggtccggtgccgatgacgacgagatcgtaggtagccatgagagaaagtcccgtaaggttaggcgtgatgaggatgtgtcagcgtccgccggcgcatcagcgtccgccggacacatcgagaatggccgaggtgacgtaggaggcctcgtccgagatcagccagacgatggcattggcgatctcgtcggcggtgccgacgcgcttcatcggcaccatgtgggccaggcgatgggcgcggtcgggctcgccgccggcggcgtggatctcggtgtcgatcaggccgggacggatcgcggcgacgcgaatgccttcgttcgcgacctcatgaccgaggccgacggtgaaggaatccaccgcgcccttggatgcggcgtaatcgacataggtgttgggggcgccgaggcgggctgcgacagacgagaggttgacgatgacgccgcccttgccgccgtgcctggtcgacatccgcttgatggcctcgcgcgcgcagaggatagagccggtgacgttgaccgccatcacgcgctggatgcgctcggccgacatctcgtcgacccgcacgccgctcttgccgacgatgccgccattgttgacgagcgccccgagcgtgccgaacttgtcggcttccttgaacaggttgaggatatcgctttcctcggcgacatcgcatttcaccgcgatggccttgccgttgctggccgcgatctgcgcgaccacctcgtcggcggcctgcttgttgctggcgtagccgaccacgacgcggtagccgcgcgcggccgccgcaatcgcggtcgcccgcccgatgccgcggctgccgccggtgatgacaacgactttatccgtcacgcgcgcctccatggttcgacccgcgccgtcgcgaatggcgacggcgctcgcagagctctagggatcagagatcgagcaccagccgcgccggatcttccaggctctccttgacgcggaccaggaaggtgacggcttccttgccgtcgatgacgcggtgatcgtaggacagcgccagatacatcatcgggcgcacctcgatcttgccgccgacgaccatcggccgctcctggatcttgtgcatgccgaggatgccggattgcggcgcgttcaggatcggggtggacatcagcgagccgtagatgccgccattggtgagggtgaaggtgccgccctgcatctcgtcgatcttgagctggccgtcacgggcgcggcggccgaaatcggcgatgctcttctcgatgtcggagatcgacttgtggtcgcaatcgcgcacgacagggaccacgaggcccttgtcggtgccgacggcgacgccgatgtggtaatagttcttgtagatcaggtcggtgccgtcgatctcggcgttgacggccggaatgtccttgagcgcctgcacgacggccttggtgaagaagcccatgaagccgagcttggcgccgtgcttcttctcgaacgcgtccttgtagtgcgcgcgcagcgccatgacgttggtcatgtcgacctcgttgaaggtcgtgagcatggccgcggtgttctgcacgtccttgaggcggcgcgcgatggtctggcgcaggcgggtcatcttgacgcgctcttcgcgggcggcgtcatcggccggcgacggcgcgcggacctgcacggcggcggcgggctggttgaccggggtcggcgcagaggcggcgcgctcgatcgcggccagcatgtcgcccttggtgacgcggccgtccttgccggagccgggaactgtcgaagcgtcgatgccggtctcggccgagagcttgcgcacggacggggcgagcggcgcatcggcgggcggcgccttcggcgcagcggcggcagcagccggtgctgcagcggcgggcgccggcgcggcggcaggcttggcaggcgcggcggcgggcttggctgcaccggcaccctcggtgatctggccgagcagtgcaccgaccgcaacggtcgcgccatcggcagcgatgatctcgctcagcgtgcccgcggagggcgcggggacttcgatggtgaccttgtcggtctcgagctccaccaggggctcgtcgacggcgacaggatcgccggccttcttgaaccagcggccgatggtggcctcggtgacggattcgccgagcgtcggcacacgaatttcagtcatggtcttttccttaagggatcgccaatgcggtcgtgaatttcaggtgtcatcggccggcgaaaaaggcaggccatccagcgagcggggcgttcgcatcacgagaacgccacgacctaccggatgccccgctccggtgcgcggcgcgcacgaggcggggcatgacgcagtccaaaaagttcagctcagtgcttcgtccaggaacgccttcaactgcgcctgatgcttggacatcaggcccgttgcggtcgcggcggaggcggcgcggccgacataacgcggacgccggctcgcaccgttcacctggttgagcacccattccagataaggctcgatgaagtgccaggcgcccatgttgcggggctcctcctggcaccacaccacttcggccttcttgaagcgcgacagctcggccaccagcgccttcagcggcacggggtaaagctgctcgatgcgcattagatagatgtcgtcgatgccacgcttctcgcgctcctcgtagaggtcgtaatagaccttgccggagcacagcacgatgcggcggatcttctcgtcggggacgagcttgatcgcctcgttcggcagcatctgggcgtcatcatagaggatgcggtggaaggtcgtgcccttcgccagctcctcgagacgcgacaccgcccgcttgtgacgcagcagcgacttcggcgtcatcatgatcagcggcttgcggatctcgcggtgcagctgccggcgcagcacatggaagtagttggccggcgtggtcgggtagaccacctggatgttgtcttccgcgcacatctgcaggaagcgctcgaggcgcgccgaggagtgctccggtccctggccctcgtagccgtgcggcaggaggcagacgaggccggacatgcgcagccatttgcgctcgcccgaggagatgaactggtcgaacacaacctgcgcgccgttggcgaagtcgccgaactgggcttcccacagcgtcagcgtgttcggctcggcgagcgaatagccgtattcgaagccaagcacggcttcttccgacagcagcgagttgatgacctcgtaatggccctgctcgttgccgagatggttgaagggcgtgtagcggctctcgtcctcctgatcgatcaagaccgaatggcgctgcgagaacgtgccgcgttccgaatcctgtccggacaggcggacgtggtggttttcgttgagcagcgagcagaacgccagtgcctcgccggtcgcccagtcgatgccgttgccgctctcgatcgccttggcgcggttatcgaggaagcgctgaatggtgcggtggacgcggaagccgtccggcaccttggtgatcttgcggccgatgtctttcaggatcggcaggtcgacgccggtgaccccgcggcgcgcatcctcttcctggtcggcgatcttgaagcccgcccacttgccgtcgagccagtcggccttgttgggcttgtaggaggtgccggcctcgaactcggcatcgagccgggcgcgccagtcggccttcagcttgtcgacctcgccctcggtgacgacgccttcggcgatcaggcgcttggagtagagcgtgagggtcgagggatgggccgcgatgcgcttgtacatcaccggttgggtgaacgcgggctcgtcgccctcgttgtggccgtagcggcgatagcaccacatgtcgatgacgactggcttgtggaacttctgtcggaattcggtcgcgaccttggccgcgaacacgacggcctccgggtcgtcgccgttgacgtggaagatcggcgcgtcgatcatcttcgccacatccgacggatagggcgaggagcgcgagtaacgcggataggtggtgaagccgatctggttgttgacgatgaagtgcaccgagccgccggtgcggtagcccttcaggtcggacaggccgaagcattcggcgaccacgccctggcctgcgaacgcggcgtcgccgtgcatcagcagcggcatcacggagatgcgcatgtccggaggatcgccgtgctggtcctgcttcgcacgcaccttgccgagcaccacgggatcgacgatctcgagatgcgaggggttggcggtcagcgacagatggatgcggttgccgtcgaactcccggtccgaggaggcgccgaggtgatatttgacgtcgcccgagccttcgaccgcgtctggattggccgagccgcccttgaactcgtggaacagggcgcggtgcgccttacccatcacctgcgtcagcacgttgaggcggccgcgatgcggcatgcccagcacgatctccttcacgccgagattgccgccgcgcttgataatctgctccagcgcggggatcagggcttcgccgccgtcgaggccgaagcgcttggtgccggtgaacttggtgtcgcagaacttttcgaagccctcggcttcgaccaacttctgcaggatcgcgcggcgcccttcgcgggtgaacgagatctccttgtccggtccctcgatgcgctcctggatccaggccttttgcgcggcgttgctgatatgcatgaactcgacgccgagcgtctggcagtaggtgcgctcgcagatcgcggtgatctcgcgcagcgtgccgtattcgagaccgagcacgtgatcgaggaagatcttgcggtcgaaatcggcctcggtgaagccgtaggtgcgcggatcgagctcttcgcggttgcgtggggcttcgatgccgagcggatcgagcttggcatggaagtggccgcgcatgcggtaggagcggatcagcatcagggcgcggacggagtcgcgcgtggcctggagcaggtcggcagaggagaagtcggcgcccttctcgcttcccttcgcctgcgccctggcggcgatcttggcaccgaccgccttctcgacctcggcccaattgccgtcgagggcggaggtcagatcatcctgcggcgtcaggggccagttgtcgcgctcccaggacggaccttccgcgttcttgctgatgtcggcgggcgcgtcgttcaggctcttgaagaactcctgccactcgggatcgaccgaagacgggttcttctcgtagcgggcgtagatttcgtcaatgtaggtggcgtttgtgccctgcaaaaaggatgacaaggcaaaggctgcgttcgcgtcctggcgagacatatggagttcctggcgatttaggttcgcgcataacaaacggcgctggcgccgagctccccggcagaggctcggcgcgacaggcaccctttaccctatttgctgcgaaacttcgcccggaaaagcacgaagaactgaattagcctttcaacttttcggcaagcgtgtggccgagccgcgcgggcgacggggacactgtaatccctgccgatttcatcgcctcggtcttggagccggcatcacccttgccgcccgagatgatcgcgccggcatggcccatgcggcggccgggaggggcggtcacaccggcaatgaagccgaccatcggcttcttgcgcccgcgcttggcctcgtccttgaggaactgggcggcgtcctcctcggcggagccgccgatttcgccgatcatgatgatcgattcggtcttgggatcggcaagcagcatttccagcacgtcgatgaattccgtgcccttgaccgggtcgccgccgatgccgaccgcggtggtctggccgagaccttcctgcgaggtctggaacacggcttcataggtcagggtgccggagcgggagacgatgccgaccgagccggtcttgaagatgttggccggcatgatgccgatcttgcactcgccggcggtcatgacgcccgggcaattcggcccgatcaggcgggacttggagccgagcagcgagcgcttcacccgcaccatgtcgagcacggggatgccctcggtgatgcagacgatcagcgggatctcggcatcgatggcttcgcagatcgcatccgccgcgcccggcggcggcacgtagatcaccgacgcgtcggcgccggtcttctcacgcgcctcgcgcacggtgtcgaacaccggcaggcccagatgcgtcgagccgcccttccccggcgaggtgccgccgaccatcttggtgccgtaggcaatcgcggcctcggagtggaaggtgccgttcttgccggtgaagccctggcagatgaccttggtgttcttgtcgatcaggatggacatcagttacttcctcggctgacggtgagtgtgaaggccccggagcgcttgttgtcctgcaggccatattgaagaacgaatttcatcggtcgtcccgaaatcgacttttcgccacgggtgatgacggagacgtcaaaggactgcgcagtcggttgcggcagatcgaaggcggctcggaggcgggtcgccaagctcgccatgtcgtcggcataggacacgaagcggcattccgtcaccggcgctcgccttgaagacgccgacacgatgagaatggtgccgccgctgccgagctttcgcagcccgatctggcgcgcatactttccgtcgttgtcggaatcataattgaaagcgtcgtaaggcatcttcagcgcgcgcttggcgaggccgtccacggtctccgaaccattgacgcagagatcgttgacggcgttgaacaggacctcattttcatcggcgcccgccctcgccgctgatactgcggcagcaagagccactcccgaaagcaacgcggcattcgctatcacgcggcaccgtccaggtagacgtttgtcatcgacccgcacctgcctcagtgggcccgtcgatagacgcccgtgagcacgtcggcccaaccttccgcgtccggcgagaactggatcttcatcgagtaggaattgtcgtcgatgatttcgtagacatggcgcgcattgccgcggagcgagccgcgcaccagcgtcagggtcttgccgacccacccgcccgaggcgggcgagggcggcgtgtagccgagcgaatcgtaccagaacagtttgtaggtccggtcgtcgcggtcgtaggtgaagatgccgtgggtggcgaaggcctgcttgccgtcgcgcatctggacgctgtcctggatcagatagaatccattgaggtccatgcgcgcaacgacgcgggaggtggccggcccgccctccgtccagcgcgacgggaagaccgtctcttcgccatcccattcgccggcaaacgcggccaggcgcgcgtgttcggggagcggagatgatgcggcgagatggtcctgggccatggccttagcctcccttgacggccttcacgattttctgcgcggcgtcgtcgagattgtcggccggcaccacgttcagtccggactcgctgatgatcttcttgccgagctcgacattggtgccttcgaggcgaaccaccaaaggcacgctgaggccgacctcgcggacggcggcggtgacgccctcggcgatcacgtcgcacttcatgatgccgccgaagatgttgaccaggatgcccttcacgttgggatcggcggtgatgatcttgaacgcggccgcgaccttctccttgctggcgctgccgccgacgtcgaggaagttcgccggcgccattccgtagagcttgatgatgtccatcgtcgccatggcgagaccggcgccgttgaccatgcagccgatgttgccgtcgagcgtgacgtagttgaggtcgtatttcgacgcctcgatttccttggcgtcttcctcggtctcgtcgcgcagcgcgagcacctcgggatgacggaacagcgaattgtcgtcgaacgacaccttggcgtcgagcacacggagctggccctgcttggtgacgaccagcgggttgatctccagcatcgccatgtccttggcaatgaaggcggcgtacagctgggcggtgagcttctcggcctgcttggcgagatcgccggagaggttcagcgccttcgcgaccgtgcggccgtgatggcccatgatgccggtcgcgggatcgaccgagaaggtcacgatcttctcgggggtgttgtgcgcgacctcctcgatgttgacgccgccttcggtcgagacgacgaaagagacgcgcgaggtttcgcgatcgaccaggatcgagagatagaactccttgtcgatgtccgagccgtcctcgatgtagaggcgattgacctgcttgccggcgggaccggtctgcacggtcaccagcgtcgcccccagcatctgcttggcgaactcggcaacttccgcggcggacttggcgatgcggacgccgcccttgtcccctgcgctggcttccttgaacttgcccttgccgcggccgccggcatggatctggctcttcaccacccagaccgggcccggcagcgccttggcggcagcctcggcgtccgcagccttgagcaccggcacaccctttgagatcggcacgccgaactcgttcagcagcgctttggcctgatattcatggatattcatatggtcgctccctgaacccccgggcggcgccctcgcgaggccgcatcattcttttggcttggcataccatataccaaaggaactacaacccggattgtcgtcgaaatctctggcctgccggtccggagccgccacaccctcgacgggacttggcctgtcctccggaagtgaaaccgccgaagatcgggcttcgatcttcggcggggatgacttgaattacttgccgagaagatcgggggcaatcttcttgcaggcgtccaccagaccctgcaccgcgccgaccgacttgtcgaaggcctcgcggtccttgccggcgagctcgatctcgaccacccgctcgacgcccttggccccgatcacgaccggtacgccgacatacatgtccttcacgctgtactcgccgttgaggtaggcggcgcagggcagcacgcgcttcttgtccttcagatagctctccgccatggcgatcgcggacgcggccggcgcatagaaggcggagccggtcttgagcaggttgacgatctcggcgccgccattgcgggtacgatcgacgatctcgtcgagacgcgcctgcgaggtccagcccatcttgacgaggtcgggcagcgggatgccggcgacggtggagtacttcaccagcggcaccatcgtgtcgccatggccgccgagcacgaaagcggtgacgtcctcgaccgagacgttgaactcgtcggccaggaagtagcggaagcgcgcggagtcgagcacgccggccatgccgacgaccttcttgtgcggcaggcctgaagccttctgcagcgcccagaccatggcgtcgagcgggttggtgatgcagatgacgaaggcgtcgggcgcgtacttcctgatgccggcaccgacctgctccatgaccttgaggttgatggagaggaggtcgtcgcggctcatgcccggcttgcgcggcacgccggcggtgacgatgcacaccttggcgttgtccagcgcctcgtaagagttcgcgccggtatagtgcgcgtcaaaaccgtcgaccggcgaggactgcgcgatgtcgagcgccttgccctgtggcacgccctcggcgatgtcgaacatcaccacgtcgcccagttccttcaggccgatgaggtgagccagcgttccgccgatctgaccggagccaatcaaagcaatcttgtcgcgcgccatgtgaacctgtcctttggagacgtaaggaggggaaactgagtgggtggttatccctttcgcttcccccgttcaagtcggtggatgcccatttgtcgggcttgccgagagagccgccagccacatcctcgtcattccgggctcgccgcttcgcgccccccggagtgacggcgctggcacataggacttaagtctcgaccaggcccttggtcgagccgctcgcggtggaatccttgcggccatgagccagcgccagataggattccgaactcatttcgatcaggcgcgaggcggtccgcttgaattcgttggcctcgttgccctcggtcgcgaggtagagcgagatcgggttggcgtcggccgaggccatcagcttcacggcgttgtcatagagcgcatcgatcagcgtaatgaagcgcttggcggcgttgcgctgggagaggtccatcactggaatatggtcgaccaggatggtgtgatagtcgtgcgccagcctgaggtagtcggaggcgccgagcggcttctcgcagaggtcggcgaacgagaaccgcgccacgccatgggccgagcacggcacgtgcaggatgcggcccttgatggagatgtcgcgcggcctgcatttggcgccgcccgacatccgcttccaggcgcggtcgagcgcggcgtccgcgtcactatccgccggcgtcagccacatcggcacgccctgcagcttctcaagacggaagtcggtgcgtgcatcgagccgcgcgacgtccatgtgatcggtgatctgcttgatgaagggcaggaacagcgagcggttcaggccgcctttgtagagatcgtcgggcgcgacgttggaagtcgcgaccacgacggtgccgagctcgaacaatttcgcgaacaggcgtcccaggatcatcgcgtcggcgatgtcggtgacgtggaattcgtcaaagcagagcagccagctctcctcgaagatcgcgttcgcggtcagcgcgatgacgtcgccgtcggcgatctcgccgcgcgcgatgctctggcgatagtcgtagatgcgctcatgcgcttccgccatgaactcgtggaaatgcgcccgacgcttgtgctcgaccgaggagtgctgaaagaacaagtccatcagcatggtcttgccgcggccgacctcgccatggatgtagagcccgcgcggcgcctcgtccttgtcattgccgccgaacaggcgggcgagcaggccctgcttgcgctgcggcttgtaggtggcaagccgctggtcgagcgccgcataggcttcggcgacctcggcctgcgcggcatcgggctcgatcgcgccggacgcgatctcggcctggtaggcctcgcggaatggggaactcggggtcgagagcatggtcctttaccgccagagagcggcggaaattgcaagtcgtgaaatgaggtcagaggtatgcgctttcgtgtcctggaggcggcagcggtcttgcccgctgcgctgacggaccttccatgtcgctcgtcctatgtcgttggtcgcggagcgacgggccccggctcgacgtccggggcacgacagcgagctaggcgcacagctcgtaggcgtcctcgaccacatacggtccgccgccggtcgatgcgcgcgacgagaacagcacgaaacgttccgccatgaacgccttgctcgggaagtagccgcgcagcgagagatagtcggcgacgtcgcggtcggacgcatcatgcaggcgggccagcgtgacatgcgggatgaacttgcgtccttccggatcaaggccgatccgctgcatcatgcgttcgagctcggcctgcaattccatcagcggcttgctcggcgcgatggtggcgaccaccgcgcgcggcttgcggccgccgaagctggtcaggccctgcaccttcacctcgaacggcttgcggtcgacgcgaaacagcaaggaggcgatctcgttggcggaagcgccgtcgatgtcgccgatgaaacgcagggtgacgtgataattctcgggatcaatccagcgggcgccgggaaggccgcccctcaagttggaaagcgactggccgatctcggccggaatttccagacccgtgaacaaacgcggcatcgtttcgcactcccgatgcttgggtacagccctcgaggcaggaccatatccaaattagagccggcgacgaatcaccggtaccctgattcctatcgcagttgtgtgactctgcgaagcttcgcccacctcactccggtaaaaccctgggaattaaggttgccgctgcctgctttcaacgccgctgctcagcgatcgtgccaatgaatgcctccaccgcgggcatgatcctgccgacgatgatgtcgatgccggccgccgtgggatgaatgccgtcggcctggttgagcgtggcatcggcggcaacgccttcgaggaagaacggatagagcggcacgtcgaatttcttcgccagctccggataaatcgaattgaagcgcgcggcataatcggcgccgtaattcggtggcgccagcatgccgcacagcatcaccgcgatcttgcgcgccttgagccgctggatgatgtcggtgagcgcggcgcgcgtcaggtcgggatcgataccacgcaacgcgtcgttggcgccgagctcgacgatgacgccatcggttccctccggcaccgaccagtcgagccggtcgcggccgccggaggtggtgtcgccggacaccccggcgttgatcatatcgatctctatgcccttggtctgcaaggcttttttgagcttttgggggaacgcctcctgcgccgcaaggccgaaaccggcgctgagggaatccccgagaaccaccagcctgatcggcttggccggcggctgcgcctgcgccggcgccgctatcgccatcgtcatcaaagcgagcatcaacacggctatgtgcatgaacaatccgtaacgcctctcgaccgcgctatcggagttgccatatgaccggaccatggacacacgcatcgaaacctcttcgctcgccgctaccgacgcggacaccatcgccatctccaacgtcaatctttcattgggtacgggcgcggcacgcgttcacatcctcaaggatatcagcctgcgggtgggccgcagcgaggcgatcggcctgatcggcccgtcaggctcgggcaaatccacgctgctgatggtcatggcgggggtggagcgtcctgatagcggagaggtggtggtatcaggcacggctttcaatgccctcgacgaggatgcgctggcccgctttcgcggccgccaggtcggcatcgtcttccagtccttccacctgatcccgaccatgacggcgctggagaacgtggccgtgccgctcgagcttgccggcaatcccgatgccgcgaagcgtgcggcagaggagctgcaatcggtcgggctcggcgaccgcctgcatcattatccgacgcaattgtccggcggcgagcagcagcgcgtcgcgctcgcgcgcgcgctggcgcccgatccggcgatcctcgtcgccgacgagccgaccggcaatctcgacgaggccaccggaaagcagatcgtcgatctgcttttcagcaagcacgccgagcgcggcatgaccctggtgctggtgacgcacgattcctcgctggcgcatcgctgcgaccgcgtcatccgcctgcgctccgggcgcatcgacacgcagtctgcgccggcatgagcacggttgccgaacctttcgcgaagcccaatggcgtcgcgctgtcgctgcgttacgcgatgcgcgaattgcgcgggggcttgcgcggcttctacgtcttcatcgcctgcatcgcgctcggcgtgatggcgatcgccggcgtcggctccgtgtcggcgagcctctccgagggccttgcgcgggaaggccgcaccctgctcggcggcgacgtctccttcgtgctgttccagcgggaggccaagccggaagagatcgcgttcctgcgctcgcgcggcacgctgtcgacggcggcgaccttgcgcggcatggcgcgctcggctgacggcaagctggcgctggtcgagatgaaggccgtcgacgacgcctatccgatgcttggacagctcacgctggcaccgccactgccgatgtccgatctgctcgcggagcgtgacggcgcattcggcgccgctgccgatccggcactgctgacccggctgtcgctgaaggccggcgatcgggtcaccatcggcgcggcaaccttccagatccgctctaccgtcgaagccgagccggacaagctcgccggcggcatcggcttcgggccgcgctttctgatcagcgaggcgggcctgcgcgccaccggcctgatccagcccggcagcctggtgcgctgggtctaccgggtcaagctgccggatgccgcgaacagcgagcgcgccaccgaggccttcatcgcggacgcgcgcaacgccgcgccgcaggccggctgggagatccgcagccgctccaatgcctcgccacagctcgaacgcaacatcaaccgcttcacgcagttcctgaccctggtcggcctggccgcgctgctggtcggcggggtcggcgttgccaatgccgtgaagagccatatcgatcgccggctcgaggtgatcgctgcgctcaaggccgtcggcgcgaccggtcgcgacgtgttcggcatctacctggcgcaggtcattctgctcgcgggcatcggctcggtcatcggcctcgcgctcggtgccgccatgcctttcgcgatcgtcggcctgttcggcaagctcctgccgctgccggtggtgccggccatgcatgtcgatgagctcgcgctgtccttcgtctacggcctcctcaccgcgctcgccttcggcctgtggccgctcgggcgtgtgcacgacgtgccggtggccgcgctgttccgtgacacgatcagctcggaatggcaccggccccgcctgggctatctcgtgttcatggcactcgtgatcgcgctgctcattgcggtcgtgatcggcctctccttcgacaagcgcatcgccgcggtgttcgtcgcctcctcggtcctcgtgttcgccctgctccgcggcattgccgccctgctgatggcgatcgcgcggcggctgccgcggtcgcggctgccgatgctgcggctggcgattgccaacatccaccggccgggcgcgctgacgccgtcggtcgtgctgtcgctgggcctaggcctcgccgtgctcgtcaccatcacccagatcgacggcaatctgcgccggcaattcctcgcagctctgcccgaccaggcgccgtccttcttcttcatcgacatcccgagcgcgcaggccgagcagttcgacggttatctgcgccggattgcccccggcgcgaaggtggaggacgtgccgatgctgcgcgggcgcatcgtcgccgcgcgcggcgttcgcgccgaggagctcaagccgacaacggattccgaatgggtgctgcagagcgaccgcggcctgacctacaccggcgagctgccgaaaggttccaaagtggtcgaaggcgaatggtggagcgccgattattccggcccgccgctggtctcgatggagaagaagatcgccgacgggcttggcctcaagctcggcgacgagatcgtggtcaacgtgctcggccgcgacattcccgccaaaatcggcaatctgcgcaccatcgactggcagggcctcggcatcaacttcgttctcgtcttctcgccaaacgcattcaagggcgcaccgcatacgcatatcgcgacgctgacggaggccggcggcaatgccgtgggcgacggcaggatcatcaaggaggtcgcggacgcctatccgatggtcaccagcgtgcgggtgcgcgaggtgatggagacggtcggctcagtggtcaccaacctggcgctggcgatccgcggcgccagtgccgtcaccctgatctcggccatccttgtcctgggcggggcgctcgcagccggccatcgtcaccgggtttacgatgcggtgatcctgaaaaccctgggcgcgacgcggctgcggctgctcggcgcctatgcgctcgaatacctcctgatcggcctggcaaccgccgtgttcggcgtgatcgccggcagcatcgcggcctggatcatcgtgacgcgcctgatgacgctgagcttcgtctggcaggccagcagcgcggccggcgtggtggcagcggcactcgtcgttaccgtcgggctggggctcgccggcacgctgctggcgttgaacaaaaagccggccacggtgttgcggaatttgtgacaaaatgtagcgggtcgccgtgcgggagcggaatcgcacgattcctgcgattaaccacgtccgctcgtcaggattgcgggcgagggcgacattcagccgcgcgtggacggttgcatcgaatgtgttagtttcccacatatcgaatgggttcggagtcccgattgtgagccggaatttagtcggctcacatcggggtccgagatagaatttgacgaaccggcggcatggcgaccctcgtgccggaccggaccaaccaacgggaattcgaccatgtcggacctagaccgtaactacgcttctcctttcggcagggccgccgggcgtgttgacgccgcgacggtcgatgccggcctgcgcgcctacatgctgcgcatctacaactacatgagcatcggcctggccatcaccggtctcgccgcgctcggtgtctacatggctgccgtgaccgacgttgcgaccccggacgcggtccgcgtcggcaagctgttcctgacgccgttcggctacgcgatgttcgtcagccccctgaagtggctgttcatgctcgcgccgctcgcgatggtgttcgtgatatcggcaggcatcaaccgtctggcaccctcgaccgcccagatcctgttctgggtgttctcggcgctgatgggcatctcgctctcgtcgatcttcctggtgttcacgcacacctcgatcgtgcgggtgttcttcatcaccgcggccaccttcggtgcgctgagcctctacggctacaccaccaagcgtgacctcaccgggatgggctcgttcctgttcatgggcctgatcggtgtcgttctcgccagcctggtgaacctgttcctggccagctcgatgctgcagttcatcgtgtcggtggtcggcgtgctggtgttctcgggcctcaccgcctgggatacccagcggctgaagaacgactacatctacggctatgcctcggccggcggtgacatcgcagagcgtgcggccatcaccggcgcactgtcgctgtacctgaacttcatcaacctgttcacgctgctgctgcagctcctcggccagcgcgagtaggcgcccggcgagggaacgacacggaccccggccgagagcaggctgtgtggaaagccgggcaaatcg

SEQ ID NO: 208 - DNA, 103807 bp, Bradyrhizobium colbertium
  misc_feature (46456)..(46465): n is a, c, g, or t
  misc_feature (54115)..(54124): n is a, c, g, or t
  misc_feature (67336)..(67367): n is a, c, g, or t
  misc_feature (91291)..(91300): n is a, c, g, or t
aacgatagtttttcagcagactgctagagcattttcggttctgattgaatcagaaccgaagctccagattcttgtttgacgcgttttctttgcgcaaaccggtacccacttcgctcgaaaacgagctaggccagcgtcatcccgccgtccacgacccaggcggcaccattcacatgcgccgcctcgtcggaggcgagaaaggcaacgacgttcgcgacatcctgcggccgcccatgcgctgtcgcaacgtttcgacgcaacgcaatggcgctgtcatgcgcctggccctccagttcccggatcatgcgcgactcgaccggtccgggcagaacggcgttgaccctgatcctcgtcccggccacatcgagcgccgcggtgcgtgtcagcccgatcaccgcgtgcttggaggcgacatagccggcgagccctgcacgcccgcggatcgcggaggtcgatgccgtgttgatgattgcgcccgtcccacgctgcatcatccttgcgatcacgtgcttgaggccgagaaacacgcccctgacgttcacctgcagcaatcgatcgaacgtctcgtcggggtattcgtggagaggcgcgacgacgccctcgatgcccgcattgttggcgaagatgccgatcggccccaggcgtgcttccgtcgcctcgacgaaggcgatcgtatcctgcgcgcgcgagacatccgcgcggatggcgagcgcccttgccccaccctcctcgaccagttgcgccgtggagcgtgcagccgcttcgtcgcggtcgacgatcgcgaccgcagcgctcatccgcgccagcctcaacgcaatggcgcgcccgatatcgcccccgccgccggtgaccagcgcgaccggcggccggtcagcaccgctcacgacttcaggaactcgcagccgccatccgccagcggccgccaggcctcggacggcgcaatggtcttgaccagcttgtaatagtcccagggatatttggaatcgccgggcgtcttcacctcgaacaaatacatgttgtgcagcttgcgaccgtcggcgcgcacgctgcccttgccgaacaggggatcatcggtcggcagcttcttcatctgctcgaccacggccttgccgtcgccggaggcgccgagcgcatcgacggccttgaggtagtgcagcgtcgtggcataggcgcccgcatgcaatgcggtcggatagcggccgttgttgcgcggcgcaaagcgcctggtccatgcgcgcgtgtcgtcattcaggtcccagtagaaggactcggtgaactgcaggccctgcgcgatcttcaagccgagcgaatgcacgtcgctgagatacagcaccgtagcgaccacgcgctggccgccttgcggaatgccgaattcgaccgcctgcttgatcgaattgatggtgtcgccgccggcattgatcaacgcgatgatctccgccttcgacgactgggcctgcaacaggaaggaggagaagtcctgcgtgttgatcggcgtgcgaacggcgccgagaaccttgccgctggatttctgcacgacgttcctgatgtcgccttccatggcatggccgaaggcgtaatcggcggtgagcaggaaccagctcttgccgccgctctcgacgacggcgcgcgcgacacccgacgacagcgcgtaggtgtcgtaggtccagtgcacgagattgggcgagcaggacttgccggtgaggtccgacgatgaggcgcccgacaccagcagcgtcttgttgttctgctgcacgacgttgcgcaccgcgagggcgacggccgagttcggcgcatcgacgatgacatcgacgctctgccggtcgatccattcgcgcgcgatgttggcgccgagatcggccttgttcatgtggtcgccgctgatgatctcgatcggccgggtcatccttggacccgaggcctggaaatcctcgaccgccattttcgctgccagcagcgagcccgggccggtgacatcggcatagaggctggacatgtcggtcagcacgccgatgcggagcggcttcgtctcctgcgcccgcgcaccgagccctgccatgcccagcgccagtccgccggcgccagccagcagccggcggcggctcacccgaaatcgtcctgccatgtcgaggccctccttgccttgtgcgtgtttcttcccggtattcgccgcccgcacgtacatcgcatgcaggctgatcttattgttcagggagtgagccgctcgatgagccgccggtcctcgacctcgaatccgccgccatagacgtccgacaccatgaaatgcgcgccgaggatctccggctcgagttcggcgatcggatcgtacgcgcaggcgtgcagcgtcatcgaggcgcggcccggcagcggcctggaatatttcaacggcgtgcggcggtaggcgatgtcggcataggccgtgccgagccgctcggggtgcggcaagcggcgcacgtggatctcacccgccggcagttcgtcgccatcgacgacccggaccacgggcgcggacggatccggcgtgaaggcgaaatcggcgagcggaattccgcggcgccggacccatccggtgatcgagccgtccggatgctcgtcgaacgcgtagtgcgcatccttcttggtgtagccgaacacttcgcgcccggcgcagatccccatgggatcgctgcaatacatgaagatgtgcgtctcggtgaacagtcccttgtagcgcacgggaaccgagatcatcagatcgaacatctcgccggcgtgtacggcgagggagtggccaggcgaacgcatgaagcggaaggcgacgcgatcgcttgcgatctcgaacggcgtgtcggcgagcagggtcgcgaccttacccggcgccacgcgggtcatgatctcgacggtccgcaacgtgcagccccactcgaccggataggccggcgaatagggcggattgaccccgctgttcggcttgagccgatagtccccgaacatgcgtgcgcgcggatcgtcgggatctgtggccaccgtcatcgggtccgcttcctcttaattcatatatgattttgtaatttcatatatgaaacgaacccggagtcaagtgagcgtcttcgcgccgggttcccgcccaatgggaatcgattggcgcttgcctacgaaaatccttaacgtccggcgcgaccccaaaatgccgaatcgtttgccgatgccgcctgcggaacaactgctcaacgcgcccgaattcaccgtctccgagctctcccagtccttgaagcggacggtggaggacgccttcggccatgtccgggtccgcggcgagatttccggctttcgcggcgcccattcctccggccattgctatttcgcgctcaaggacgagagcgccaagatcgaggcggtgatctggaagggcgtgcacggccgcatgcgcttcaagccccaggaagggctcgaggtcatcgccaccggcaagctcacgacctatccgggctcctcgaaataccagatcgtgatcgaggcgctggagccggccggcatcggcgcgctgatggcgctgatggaggagcgcaagaagaagctcgccgccgaaggcctgttcgacgaggcgcgcaagcagcttctgccctggctccccgaggtgatcggcgtcgtgacctcgccgaccggcgccgtgatccgcgacatcctgcatcggcttgaggaccgcttcccccgccgcgtgctggtatggccggtcaaggtgcagggcgaaggctcggccgagcaggtcgcggcggcgatccgcggcttcaacgcgctgccggagggcggcaggattccgcgccccgacgtgctgatcgtcgcgcgcggcggcggctcgctggaggatctctggtcgttcaacgaggagatcgtggtgcgcgccgcggccgagagcatgatcccgctgatctcggcggtcgggcacgagaccgacatcacgctgatcgatttcgtcgccgacaagcgcgcgccgacgccgacggcagcggccgagatggccgttcccgtgcgcagcgaattgctcatcgaggtcgccgacctcggccgccgcacccgcgcctattggcagcgcgcccaggagagccgccgcagcgagctgcgcgccgccgcgcgcgcgctgcccgcggcctccgatctgctcgccattcccaggcagcggctggattcggcgggcgcgtccctgccccgctgcctcaaggccaacacgcatgcgcatttccgccggttcacggccgccggcgccaagctgaccttgcgggtgctgcacggccagatcgcgcaagccgatcaccgcctcaccgtgtgcggcgaacggctcggcctctcggcgcgctcgctgctgcggcagcggcgcgatcgctttgccgggctggaggtacgcctgcgcgcctcgaagctgtccaacgcgcaggcgcagcgcaacgcgatcgcccgccagcgcgagcgcacgcatcgcctcgccgagcgcgcggggcgtgcgcttgcgacgctcctgcaccggctcgacactcgggtcgagaacagcggcaagctgctttccgcgctgtcctatcgcagcgtgctcgcgcgcggctttgcactggtgcgcgacgaggccggccaccccgtgcatgccgcggactcgatcggtccgggggcacgcgtcgagatcgagttcgcggacggccgcgtcggcgcgacggcggatgcggatcgcccgcctcccgccgcaaagcgcgcgccggcgcaaccgaagccggctgcgcaggaaaccaagcccgcaccgaagcggttggccaagccggtggatcagggcagcctgttctgaggcctcgccattgcgaggcgcaaagccacgaagcaatccagaaatctctccggaacgactctggattgcttcgcagagcctgtcatcgggccgcgcttcagcggcaggacaatcctgcatcgatcgtggtccagaaaccgcaatgtcccggcgcgcggtgcggagctttggcctgggcttcgaacaggaagaccgcgacggtgaaggcgatcagtgcggaagcgaagagagcgatgcggttgcgcatgtcactgcgttcaatcgacatcatggtcgaatgatggcgccgttgcgggccgaaaaccggtcagctcctccgtcgggcgaccgtccggaggaatatgtaatccggtgttgcgccgcgctccatccagactacgggctgccatgcgttgcgagcgttgacaactcccgttgcgggagtagctttttcgtcgacagagcgggaccaaccgctcgcgacctctcgggagaaacgccatgacgatcgccatccggcaactccataagcatttcgtcggcgaggtgtccggcctcgacctgcgcaagccgctgacggcggacgaagcgcgcgacatcgaagccgcgatggacaagtatgcggtgctggtcttccatgaccaggacatcaccgacgagcagcagatggcctttgcgctcaatttcggccagcgcgaggacgcgcgcggcggcacggtgaccaaggcgaaggactaccgcctccaatcaggcctgaacgacgtctccaatctgggcaaggacggcaagccgctggcaaaggacagccgcacccatctgttcaatctcggcaattgcctctggcattccgacagctcgttccgcccgatcccggcgaaattctcgctgctgtcggcgcgcgtggtgaacccgaagggcggcaacaccgagttcgccgacatgcgcgcggcctatgacgcgctcgacgacgagaccaagacggagatcgaggacctcgtctgcgagcactcgctgatgtactcgcgggggtcgctcggcttcaccgagtacaccgacgaagagaaggagatgttcaagcccgtgctgcaacgcctggtgcggacccatccggtccaccgccgcaagtcgctgtatctgtcatcgcatgccggcaaggtcgtcggcatgagcgtgcccgagggacgattgctgctgcgcgacctgaacgaacacgcgacgcagcctgagttcgtctacgtgcacaaatggaagctgcatgacctcgtgatgtgggacaaccgccagaccatgcaccgcgtccgccgctacgaccagtcccagccacgcgacatgcgccgcgcaacggtggcggggaccgagccgacggtgcagcagcaggcggcggagtaggcaacacacgccgtcattgcgcgccaacgggtccgcgcatagcgcggcccgatgaaaggctccgcgaagcaatccagaatgcctccgcagagggtttctggattgctgcgtcgcttcgctcctggcaatgccggcagcgacagctacgcgtggccggcctcgttggagagcatcccgggatcgatgccgatcttctgcaaggcgcgcgtgtatttatcgtcgacgtcgtcgccgaagatcaggtcggcatccgcatcgcaatgcagccagccgttgctctggatctcggtctcgagctggcccggcgcccagccggcatagccgagcgcgaggatggcgtgcttgggaccggagccgttggcgatcgcgcgcaggatgtcgaccgtcgcggtgaggcagacgccgtcatcgatgcgcagcgtcgcgttctcgatgtagaagtcactggaatgcagcacaaagccgcggccggtatcgaccgggccgccgcgcagcaccttcatgctttcggcattttccggcagcttgatgctgtcgcccttcttgacgatgccgagctgctgcaggagctcggggaaatcgatgctgccggcgggatggttcacgatgatccccatcgctccctcggcggaatgcgcgcagagatagatgaccgagcgctcgaagcgggagtcacccatcacgggcatcgcgatcagcagccggccatcgagatagccggccgagccggaaagcgcgaggcccgcactgcgggtgctttcgcccgtcctctttcctgtgggagccatcggtgaagcactccggtttcgattcctatcctgatgtcgggccgggcgactgtcaaatcaaggcttgcacagacttgattccagtgcatccatcacaagcaattcaatggtttggcccaaggcgacactgtaaagacgtgccatgtccagcatagttcccctgcgtgcggcgattgtcgcgacgccaatcttgcttgcgtcgtcactggctttcgccgcccatgccgacgacgcctcgccgtggcagcgcgacggacattccgcggtgcggcttttagcgggatcgcgcagcggggcggtgctgctcggcggtatcgccttccagctccagcccggctggaagacctactggcgcatgccgggcgattccggcgttccgccgcgcttcgacttctcgaagtccgagaatgtcgaggcggtgacggtcatgtggccggcgccgctgaagttcgacgacggcgcgggcggccattcgatcggctatcgcgaccagatcgtgctgcccttgcgcatcgtcgccaaggcggccgacaagcccgtgacgctgcgcgccgagatcagttacgcggtgtgcgagaagctctgcattccggtcgaggccagcgccgagctcggcttcaacagcgtcgcctcgaccgaggatgcgaacttgcgtgccgcgctcgacaccgtgccgaagcccgccaatatcggcgaccccaatccgctcaccatccgcgacgtcaagcgtgacggacccaggaacgtggtggttgacgtggtgacgccggaccgccggaacgtcaatctgttcgtggaaggcccgacgcccgattgggcgctaccgattccggcgcccgtgcagcacagcccgcctggggtgacgcgctttgctttcgagctcgacgggctgccgcccggcgccaagccggacggggccgcgttgaagttcacgctggtcgggccggacaaggcatacgagttcaatacgaacttggagtgaggggtcgtctcggcgaagcacaacgcccgggcgctgctggcgcagacccaaccgaatcttaacgaatggttgctagttcccaggcatgccgcagcacgcgggatgcctttgggggctgttcgacttggccgtgatggatgcacaacctgcaacgaccggacaggccgggctgatcgggcggctgcgggccaagctgacgggcggatcgaacgaggcgtcgctgacgcggcggctggccggcaccatcttcatcatccgcgtcatcagcgccggccttgcctatgtctcgcaggtgctgctggcgcgctggatgggcacgtccgattacggcatctatgtctatgtctggacctgggtgctgctgctcggcagcatgatggatttcggcatctctgcgtccgcgccaaagatcattccggagtatcgcgccagcggtgagcacgcgctgctgcgcggcttcctctccggcagccgctggctgacccttgccgcttccatgctggtgtcgctggccctcgccggcatcgtcaagctgctctcggcctggatggatcctgccgaggcgctgccgctctacatcggctgcatgacactgccggccttcgtcgtcgccaacacccaggacggcattgcgcgctcgcacgactggatgcagctcggcctgatgccgcaattcatcatccgtcaggcattgatcatcggcatcacgggctccgccttcctgctcggctatcacctcggcgcggtcgccgcgatggctgcaagcgccgcggcggtgtggatcgcgatgaccgggcagatggtggtgctgaaccgcaagctcgccgatcacatcgagccgggaccgaaggcctatgacgtcggcggctggctcgccgtctcattgcccatcctgctggtcgagagcttctacctgctcctgtcctacacagacgtgctggtgctgcagcagttccgtccctccgaggaggtcggcgtctatttcgccgtggtgaagacgctggcgctggtctccttcatccactacgcgatgtcggcgacgacggcgcatcgcttcgccgaataccacgcgagcggcgacaaggcgcggctgtcggcttacgtcgcgcacgccatcaattggacgttctggccgtcgctggcggcgaccatcgtgctgctggggctcggcaagccgctgctctggctgttcggtccgcagttcacggtcggctacgacatcatgttcgtcgccgcaatcggcctcgtggtgcgctctgcgatcggcccggtcgagcggctgctcaacatgctgggccagcagaagatctgcgcgctggcctacgcgctggccttcctcatgaacctggtgctctgcatcgcgctggtaccgcactacggcggccacggcgccgcggccgcaacctcgatctcactcaccttcgagacggtgctgttgttctggatcgtgcggcagcgcctcggcctgcatgtgctggcgtttggaaaatagacaacgccgctgcccgatgggaagcagtgtcttcgcaagcggccggcgagcagggtaaatcgactacggccttttttgcctgcagcatgatttttcttatttggcccaagcggttgcgtactggggaaagtttatcttaggtcgtattgccccgtcgacgagatcaacctaagattcgcccttacatgttcgatccactctacgtcgcctctggtttcggtgtcggtctgctcgtcggcatgacgggcgtaggcggcggctcgttgatgacgccgctcctgatcctgttgttcggcgttcatccctccaccgcggtcggaaccgacctgctctatgccgccgccaccaagactgccggcagcgtggtgcatggctggtcgcgcagcgtgcactggccggccgtgctgcgactcgcctgcggaagcattccggcgagcgcgctgacgctgctggtgctgtggaagctcgatctcaagagcgatgccgagcgcagcatggtcaatctggtgctgtgcttcgcgctgctgctgaccgcgacttcgctgatcttccgcaagtcgctcatggagcgctatcgtcgtcggctcgagcaggtcgacgcgcgcgccaccgcgattgcgaccgtcgccaccggcattgtgctgggcgtgctggtgtcgatctcttcggtcggtgccggcgcggtcggcgtcacggtgctgctgctgctttacccgcgcctgccgatggcgaccatcgtcggctccgatattgcacacgccgtgccgctgacgctggtcgccggcatcggacattgggcgctcggcgacgtcgactgggcgctgatgggcgtgctgcttttgggctcgctgcccggcatcgttatcggcagctacagcgcaacgcgcgtgcctgaaaccttgctgcgactgacacttgcctgcgtgctgttcgcggtcacaggcaagatcgtgtttgcggaactgaatttgtcgacggtcttcgtgacggcgctggcctggacgcattagaccaaagaccccacactctcacggccatcgcccggcttgaccgggcgatccggtaccccggcaagctgtgatcgcatcgataagccgcggcgtaccggatgccccgtcaagccggggcatggcagcgagccagctgaaccggcgcgacctacgccgccgtccagccgccgtcgatggagagattggagccggtgatctgcgcagcatcgtcgctgcagaggaacagcgccagcgcggcgacctgctcggaggtgacgaactccttcgtcggctgcgcatcgagcagcacgtcgttgatgacctgctcgcgtgtcaggttgcgcgccttcatggtgtcgggaatctgcttctcgaccagcggcgtccagacgtagccggggctgatgcagttgcaggtgatcttgtgcgtggcaacttccagcgccacggtcttggtgagtccggcgatgccgtgcttggccgagacgtaggccgacttgaagggcgaagcgaccagcgaatgcgcggaggccgtgttgatgatgcggccccagcccctcttcttcatgccggggacggcggcacggatgccgtgaaaggccgaggacaggttgatcgcgatgatctggtcccacttttccagagggaactcctcgatcggcgagacgaactggatgccggcattgttgacgaggatatcgaccgagccgaacgtcttctcgccgagcgcgatcatgccggcgatctcggcgggcttggtcatgtcggcgggcgagtagatcgccttcacgccgaattcggactcgatcttggcgcgctccttctcgatatcttccggcgcgccgaagccgttgatgacgacgttggcaccggcgccggcgaacgcacgcgcataggcgagcccgatgccgctggtcgatccggtcacgacggcgttcttgcctgacagactacccattctattcgctcctttttgccgggggcgcggtgacgtcccccgtgagatcgtaggtcaccatggtctcgccggactgcggccgctcgagccagtccttgtggcgcatcgacagatgcacgtcgcgcacgccggcttcccaatgctcgaccatggcgacatgcgagaagtcgtaatccttggacgaggattcgtagttcttgctgcggtagatcaggtgcaccaccgtgacggtgctttcgcgcgacactttcgccaggaattcgaccgaaggatcgttcttcaggtcatccggcaatttgctgatgaggtcgcgcacggccctgcgggcgttatgcaactgcttgttcttgtcggtgttcatccgcgtgcggctcgaatagcggatgtccttctcgcgctcggcggcctccagcagcgaggtcggcagatcgccgcgggcggaaaacaaatcgacctggaagatcagcatgtcgcgctcgagctcggtatcgagcacgtagtcgagcggggtgttggaggcgatgccgccatcccaataatgctcaccgtcgatgatcaccgaaggaaagcccggcggcagcgctcccgaggccatgatgtgctcgggaccgatgatcttgccgagcttcttgaactcgaaattgtcgaaatatctgaaattgcccgaggtgacgccgaccgctcccaccgatagtcgcgtcttcagatcgttgatgcggtcgaaatcgaccagaccttccagcgtcttcttgagcggcgaggtgtcgtaatagctttgtgcttcggggtgccccggcggccacagcggcgccggcggaatgcgcggcgtgaagaacccgggcacgccgaaggtcgcgatcagcgctgcactggtcgaattgaaaagctcgcggctttgatcgctcttgccgagaggcttccacggcaccggcgccgacaccatctcccagaattccttgagccgcttgacgcgcgtctggccctcattgccggcgatgatggcggcgttgaccgcaccgatggagatgcccgcgacccattcgggctcgaagccgtagccgcacagcgcctgaagggcgccggcctggtaggagccgagcgcaccgccgccctggaggaccaggacgcgttgcgcattcgtggggattgttgcgatttccggactatgatcggtcatgctggaacaatagcagaggcccggtcaacgtggcgacactccgccgtggcgtcaatgcaccccaaatcaagtctggcttatcgcggctccgtcgaggccaggatcatggtccagaacaccttgtatttggtgccgggagcatagctcgccgcgatgcccaattttgtgacaccgttcttgagcatgttggcgcggtgcggaggcgaatcgcgccagccggaaaacgcctccgccagcgtatgatagcctgcggagatgttctcgacggccacggtcgcgggatagccgccggcggccaggcgcctggccagcggcgcgcggacatcgtggtccatcttgttggccgccgccatcgcattggactgcgattcggcgagccgcgtcagatcggggtcgatcacgaccgtgccgagcccgttgttctggcggtattgcgagatcatcaccgctgccgcttgcacatcgagcttggagcccgggaccgccatgtcggtgtacatggacggctgctggaccggtgtctcattgccggcacaaccggcgagcagcaaagtgatgagaattgcggccgcagcgcgcatgaatcgagacccccaaatgaggggccgttgttgcataccaaccgtggctgaaaggtgaattttgaggaaaaattgagccgttattccccacgcgcgcctcagcgcgagcccggaatctcgcgcgacgatctcgcgattccgggttcgatgctccgcatcgccccggaatgaccgggcgcctcagcccgcaaatatccggtagcggcggggctccaagccgatcatgtcgccgacgcgcagctccttgtcgcggggggcgtcgatctcgatggtctcgccgcccgacagcgcgacctcggcgcgctgtacggggccgaaattgcggacatgccgaacagcgccctcgaacgcgccgctgccgggcgggccgatcagcatgtcgtgtcgccggacgaacagcttcgacgcgccaggcgcaagcccttcggctgcgagccgaagcggccggccaccgagcctgacagcaccgccctcgacctggaccggcagctcgatggactcgccgatgaagccgtggacgaaggcggtcgccggatattcatagacatcgccgggcgagccgatctgctcgatcctgcccttgtccatcacgacgacacggttggcgacttcgagcgcctcctcctgatcatgggtgacgaagatcgaggtcacgtggatttcgtgatgcagggagcgcagccattcgcggagctctttccgcaccttggcatcgagcgcgccgaacggctcgtcgagcagcaggatgcgcggctcgatcgcgagcgcgcgggcgagcgcgatgcgctggcgctggccaccggaaagctggctcggatagcggtcggcgagccagtcgagctgcacgagatcgagcagctccttgacccgggtccggatcgcggcctcgtccttgcggaccgcgcgcggctgcacgcgcagaccgaaggcgacgttctcgaacaccgtcatgtggcggaacagcgcgtagtgctggaacacgaagccgacgtgccgctcgcgcgcgccctgggccagtgcgtcctcgccattgatgaagacctcgcctgaatcgggccagtcgaggccggcgacgatccgcagcaacgtggtctttccggagccggacggaccaagcagcgccaccagctcgccgctgtcgaccttgagatcgatgccgtcaagcgctttgaagctgccgaaagtcttgacgagatttctgacttcaatggtcacttgcgtcctgtccttcgtccagatggcgttcgagaacggccttcgcgatcagcgtgatcggcgccagcatcgccagcagcgaggcgatcgcaaaggcggcggcgaactgatactcgttgtagaggatctcgaccagcagcggcatcctattggtctcgccacgaacatggcgggagacgccttcgacgacgcccgatcagtcttgtagatctgatcaaagtcgccgccatgggcgaaatgctccttctgcgccttggtccaaccgccgaagacgtcccgaacagctcgatcttcgcgaagatgctctcgtgctttcctcgcaatcttggcgtcgctggaacgatagaaagtgcgcgccgcgaccgctcgcgccccttagtataccaataccgcaagcaagggtcagccgcgttcaggctgcttttctgtcgacaacctcgtcgacgatggtgacgggggctcggcgaggatcgatcgacgcagtgccacggatagggcgacgaattctgcgcaggcgcttctgccaatcggtcgtggtgagacccttgcgcgcgatggcgtcgatcccacaggccagcgtaagcgtcagcacatcggcctgccatccatcgatcaccgcgcgcgcctgcgaacgctatcgccatgcgacggcctgatcccgacgctcttgcctgtctccttccgatgggcggtcgaagcctcgtgacggtgctacgaagccttcatcgtgtgaatgccgcattctgtcttggctcggccgcgccagcgaccagcgcgcgcatcctcaccctcggtcgttctgctggtgcaaggcatgcacccaaccgacaggaatcctgaagcaaccagaggatgcctcggcagcctggcgcggacgaagatcgcctcgatctcctggcgcgaaacattggcgaagggattgaacttcaagcgcacgccatcgtcctcgacgaccggaatctcggcgcgcgcattgccctggaaacgcttgcggccgttgatccaggccgagaacggctgcagcgcgcgcgccagcggctcgaccttgcgaatgcggcaacaggcgtcgggatcggagaaccagagatcgcggtcgggatcgtcgagcgacagcacctcctcggccggcttgaccgagcggacatccttgaggcccagcgtggcgatcagcgtatcgcgataagccagcgtctcctcaaacaaccagccggtgtcgagaaagatcaccggaatcgcagcatcgacgtctgccatgaccttgaggagcgtcgccgattccgtgccgaaggacgacaccagcgcgagcttgtcgcgcccgaccgtcttcagcgccgccgcaacgatctccgctggcgaggcatcgcgcaaggcgcgatcgagctcgtccgccgagggcaacgaagagactgctgaaacctgaggcgcgaccgcattcacgtgccgacaccttcagaatgacgcagctgcatgcgccggtgcagcgccgtgatgcggccgtcgccggtcggctggtagaacaccgaatagcgcttggccgtctgcatgaaggcctcggcatcagcctgcttcttcacctcgaaggcatcgaacccggcgcgcagcatgaacacgaactggtcgcgcagcacctggccggtggcgcgcaactcgccgcggtaattgtagcgctcgcggagcagcctcgcctggctgtaggcgcgcccgtcccggaacgtcggaaacaccagcgcgacggcggcgaccttgccgagatacggcaccagctcagcgatgtcacgattgttcggccagatcacgccaaccttgcccgaacgctcgagcagcgcgtcggcctcagcgagaaaccgctcggccggcaccaggatgtcgccgccctcgggcagcggggtgtcgacggcgagcttgacgaagccgtcgcccgtgatctttccgccgctaacgagtggcatagacacgctccttgaagggttcgacgccgaggcgcttgaccgtatccatgaacagctcctccggccgctcacgcagcgccagataggcttccacgacgtcttcgacgacatcggcgacttcgtcgaacttgacgccggggccgatcagggtcccgagcgtggcgttctcgtcggcgcggccgccgatcgtgatctggtagacttcctcgccgttcttctcgacgccgagaatgccgatgtggccgacatggtgatggccgcaggcattgatgcagccggagatgttgatgtggagccggccgatgaggttggcgagctcgtgattggcgaagcgccgcgtcagctcctgcgcgatcgggatcgagcgggcattcgccagcgagcaataatcgagccccgggcaggcgatgatgtcggtgatcagattgacgttcggcgtcgcgagcccgagcttgtcgagcgccttccacagcgccggcagatcgcgcttggccacatgcggcagcgccaggttctgctcgtggccgacgcgaatctcgccgaaggaatattggtcggcgagatcggcgagcgcgtccatctgcttggcggtggcatcgcccggagggccgccggtcggcttcagcgagatcgtgacgatggaatagccctgcaccttgtgcggtgcgaccgagttcttgcgccacgcctcgaaatccggatcggccgcggcctggcgcagctcgtcgggcatgtgcggcagcttctcgtaggcgggataggtgaagcgcgagcggatgtcctcgatcacctcgtcgtcgatctggagcgaggagttgcggatctgctgccactcctcctcgacctcgcgcgagaacttctcgatgccgagctcgtgcacaaggatcttgatgcgcgccttgtagatgttgtcgcggcggccgtactgattgtagacgcgcaagatcgcctcgatgtagctgaggatgtcgcgtccgtgcacgaagtgcttgatggtcttggcgatgaagggcgtgcggccgagaccgccgccgaccagtacctcgaagccggtctcccccttctcgttcctgatcaggcgcaggccgatgtcgtggatcttgatcgcggcgcggtcgtgatccgaggcggtgatcgcaatcttgaacttgcgcggcaggaacgagaattccggatgcagcgtggtgtgctggcggatcagctccgaccagatgcggggatcctcgatctcgccgggcgcgacgccggcccactggtccgaggtgacgttgcgcatgttgttgccggaggtctgcatcgcatggatgccgaccttggcaaggtcttcgagcgcgtccggcagctcggcgagcttgatccagttgaactggatgttttgccgcgtggtgaaatggccgtagccgcggtcgtatttgcgcgcgacgtgggcgagcgcccgcagctggttggtcgccagcgtgccgtaggggatcgcgacgcggaacatgtaggcgtgcagctgcagatacacgccgttctgaagccgcaggatcttgaactcgtcctcggtgagttcgccggagaggcgccgcttcacctggtcgcggaactccgagacgcgctcgttgacgagcgtgcggtcgatttcgtcgtaagcatacatgagtgcgtgccttaaacctgggccggctgtccgatggtgacgccggtgcggcgaatctgttcgcgcagattgccgggaacgatcctgccgtcggcaccgatctgaaccggcgcgatatagggaccgatggcaccgacgtcatcggccacggcctccgcaagcaacgccttggcctcctcggagttgcgcacgatcgcggcttccgagagctccgcggaccaggccctagcggcggtgcggtacacgacgatgccgtcccaggtgcggttggcggtcacgacggaggggccggcgatgcggatcttcttttgttcgagcggagaggtcattcggctgcatccaggaggtcggagatgatttgtcttggagattggcggcgaagcgagccggcgtgccggaccacgtcgccgatgatgaggatggcgggaccgccctgggtccgccgcaccagttcgggcagatcccgcagcgtgccgatcgcgccttgcgcatcgggccgcgtgacgcgggcgaacacgccgaccggcgtctccggcgagcggccggccgcgaacaggcccgcgcgcacggccggcgccgcggtcatgcccatgtagaccacgacggtcatcttggtgtcggtcaacgtcgaccagtcgacggcttccgcatcgcgcgccttgtgtgcggtgaggaaagtgatgcgcgtcgcttcatggcggtacgtcagcggcacctcgaaatcggcggcgccgccgaggcccgccgtgatgccggggatgatcgaataagcgacgccggcggcacgcagcgcttcaacctcttcgccgccgcggccgaacacgaagggatcgccgcccttcagccgcaccacgcgctgaccggattgcgccgcctcgatcatgcgcttgttgatagcgtcctggccgatgccgggcttgccgacgcggcggccgaccgcgacgcgcgtggtgtcgcggcggatgcgatcgagaatctcgggcgagaccagttcgtcatggaaaacgacgtccgcatcctgcaacgcgcgcagcgccttgatggtgagcagatcgggatcgcctggccccgcaccgaccagcgcgaccgagccttccggcttgtcggcacgcgcgaattcggaagggtcggcaatcgccttgagcgatgcgtccgcttcgctcctgcgaccggcgagcacggcggcgccgatcggaccgtcgatcacgcgctcccagaagcggcgacgcagcggaaattcggcgatacgttcgttgatggacttgcggaagccgccgatgaactccgcaagctcgccgatgcgggccggcagcagcgcctcgatcttctcccgcacgcgacgcgccaccaccggcgaggttccgccggtgccgaccgcgaccacgacatccccgcgatcgacgatcgccgggaaaatgaagctggaatgttcgagatcgtccatgacgttgacgggcaggccggcagccttggcgcggaccgacatcgccaccccgacatcacccgcaccagcgcaaacgatggcgatgacacctgagagatcggccgtgagcggatcgcccgccgcgatctcgacgcgcgccgcatcttccgggttgaggccaaggtcatggttaccgtcgatcgcgtgcacgcggatgcgtgcgccggcagcagcgagcacgcgcagcttggcgcgcaaaagctcgcccgcaccgatgaggaccaccggaccggccttgagatcgagaaataccggcaagaaccgcatgcgctactcgcttccccacaaccggggttgactggaattattttctatatatgtctcgtttctagcgcgcaaagagaaaattttttcttctcttccgcactgcaactatagaattttcgcctccaaacgcaaagtcgcagagatgcatcttctcaaggacgattccgccgctgatcgagtgagcaagccggcgccggccgaccccgcgcgcgcgcaagaattctccgccgatgtcgctccgagcatggaccatctcgaccagctcgaggcgcagagcatctacatcttccgcgaggcttttgcccggctgaagaagatcgccttgttgtggtcgctcgggaaagattccaacgtgatgatctggctggcgcggaaagccttcttcggcaagatgccgttcccggctcttcacgtcgataccggcaagaagtttccggagatgtatcgcttccgcgatcattacggcaaagaatgggatctcgatttgcgcgtcgagccctgcccgccgatcgatgccgtcgacccgacgctgccgccggccgcgcgttccgccgcgcgcaagaccgagggcctcaagatggcgctcgccaaatacggcttcgacggcctgatcgccggcatccgccgcgacgaggaggcgacgcgcgccaaggagcgcgtgttctcgccgcgcggcctcgaaggcaattgggatgtgcgcgaccagccgccggagttctgggatcatttcaacgcctcgccgccgcagggcgcgcatctgcgcatccatccgatcctgcattggaccgaggccgacatctgggcctacaccaagcgcgagaacatcccgatcattccgttgtacctcgccaggaacggcaagcgctatcgctcgctgggtgaccaggacattaccaatccggtcgcctcaaacgcttcgaacatcgacgagatcctgatcgagctcgaacagaccaaggtaccggagcgctcggggcgcgcgctcgatcacgagaccgaggacgctttcgagcgcctgcgcgtcgccggctatctctgacctcaaggacgcgagcgttccatgaacatgatcgtcaccacggctccgccgagcactccgaacggcaccacccgtccccaggtgcgcatcgtcatcgtcggccatgtcgatcacggcaagtcgacgctggtcggccggctcctgcacgagaccggcagcctgcccgagggcaagctggacatgttgaaagccgtcagcgcgcggcgcggcatgccgttcgaatggtcgttcctgctcgatgcgctgcagaccgagcgcgaccagggcatcaccatcgacaccacgcagatccgtttccgcaccaattcgcgcgacatcgtgctgatcgacgcgcccggccatgccgagttcctgcgcaacatgatcaccggcgcctcccaggccgacggcgcggtgctgatcatcgatgcgctcgagggtgtgcgcgaccagaccaggcggcatggctatctcctgcatctgctcggcgtgaagcaggttgcggtcgtcgtcaacaaaatggatcgcgtcgatttctccgtcaaccgcttcaacgcgatcagcgacgagatctccgcgcatctcaatggcctcggcgtgacaccgacggcggtgatcccgatttcggcgcgcgacggcgacggcgtcgcggagcgcaccgatcggatcggctggtacaagggaccaagcgtggtcgaagcgcttgaccggctcgagcccgcacgggcgctggaggcactgccgctacggctgccggtgcaggcaatttacaaattcgacgaccgccgcatcgtcgcgggccgcatcgagtccggcaacctgatcgccggcgacgagatcgtgatcatgcccgccggcaagatcgccaggatcaagtcggtcgagagctggccggtaacgtcggtcgccagccgtcagggcgcgggccgctcggtcggcatcacgctcgatcgcgaattgttcatcgagcgcggcgacatcgtcgcgcatgcaggcagcgcaccgcgcgaaacgcggcggctgcgcgcgcggatcttctggctgcacgacaagccgctcgccaggggcgaccagctgctggtgcgctgcgggccgaaggaaagccgcgccaccgtggttgccatcgagaaggcgatcgatcccggcgagctctcgagctccgagaacagggtgatcggccgcaaccatgtcggcgagatcgacatctccctgtccagtccgatcgcgaccgacccctacaccgagaacccgcgcaccggccgcctcgtgatcgaggtgtccggacgcatcgccggcggcggcctggtgctgtcggtcgatgccggccaacgcgccgtgcctgttgacatcgtgccggtggaatcggcgctgcggcccgacgagcgctcggcgcgctatcgccacaacggcgccgtggtctggctcaccggcctgcccgcctccggcaagtcgacgctggcaaaagcgctggagcggcggctgttcagccatggcggctcgccgatcctgctggacggcgacacgctgcgcgcgggcctcaacagcgatctcggcttctccgccgctgatcgcagcgagaacatccgccgcctcgccgaggtcgcgacgcaccttgcccgcaacggccatatcgccatcgtcgccgcggtctcgccggcccgcgaggatcgcgcagcggcacgccggatcgccgacaccgcgttccgcgagatccacgtcgcgacgccggccgaggtgtgcgaggagcgcgaccccaagggccactacaagaaggcccgtgcaggtgcattggcttcgttcaccgggatcggcaacgactacgagaagcctgacgcggccgaactcgtgatcgacacgtcgaagaggacggtcgccgaggcgaccgacgaggtcgagcacatgctgaagacgaccggcgtgctgttcgacgaggtcgtggacctcgctgcgaatatttgattctgtcccagccccccgcggtcctcgcccgattggccgggcgccccaatacgccggagacagcgatgggatacggagaagccgcggcgcactggcttgcccgctttcgcgggaaatgacagcggcgcgagcggctgcccctattccttgacatttttacaaccgcgcgggggtcttctcaccgccccttttttggggctaataggcccccgaaagccgctccctggagcgcattttgctgctgtcgggtcaaaagcagccaaaagcagccatttccaacaagaaagcccatcatgaaacgcgtcgacgcccacggattgaagatcgctcccgtcctgtttgatttcatcgccaaggaagcggccccgaaaacggggatcgcgccggatgcgttctgggccgggctcgccggcatcatcaaggaactggggccgaagaaccgcgaactgctcgcattccgcgaaacacttcaggccaagatcgacgactggcaccgggccaacaagggcaaggcgttcgacctcgacgcctataccgccttcctgaaggagatcggctatctggtcccggagccggcgacccagaacgtcgagactgccaatgtcgacgaggagatcggcaagatctgcggcccgcagctggtcgtgccactgacgaatgcgcgctacgcgctgaacgcggcgaatgcgcgctggggctcgctctatgacgccttctacggcaccgatgccatcccgcatgatgcttccgagagcggcaagggctacaacaaggcgcgcggcgacaaggtgatcgccaaggccaaggcgttcctcgataacgccgtgccgctcgcaaccggcagccacaccgacgtcaccgcctacagcgtcgtcgcgggccagcttgcggtaaagctgaagagcggcaacgccaccgcgctgaagaacgccgcgcagttcgccggcttccagggcgatgccgccgcgccgagtgcagtgctgctcgtcaacaacggcctgcatatcgaggtcaagatcgaccgcagcagcgcgatcggcaaggacgatccggccggcgtcgccgacgtgatcatggaggctgcagtctcgaccatcctcgacatggaagattcggtcgctgccgtcgacgccgaggacaaggtgctggtctaccgcaacacgctcggcctgatgaacggcacgttgtcggccgatttcgagaagggcggcaagacgctgacgcgctcgctcaatgccgaccgcagctacaagacgcctgacggcaagggcgagctcaagctgcacggccgcagcctgctcctgatgcgcaattgcggtcaccacatgttcaccgacgcggtgctggacgagaagggcgaggaggtccccgagggcctgctcgatgccgccgtgtcgggcctgcttgccattcacgacctcaagggtctctccaaggtcaagaacagccgcacgggctcggcgtatatcgtgaagccgaagatgcacgggccggacgaggtatcgctcacctgcgagatcttcgaccgcgtcgagaagatgctgggcttgcccgagaacacgctcaaggtcggcatcatggacgaggagcggcgtaccacagtcaacctcaaggcctgcatccagcgcgcctccaagcggatcatgttcatcaataccggcttcctcgatcgtaccggcgacgagatccacacctcgatggaagcgggccccatgatccgcaagaacgagatgaaggcgcaggcctggatcaaggcctatgaggactggaacgtcgacatgggcctggcctgtggcctgcccggccacgcccagatcggcaagggcatgtgggccgcgcccgacaagatggcggatatgctggcgcaaaagctcgcccatccgcaggccggcgccaccacggcctgggtgccctcgccgaccgccgcgacgctgcacgcgctgcactaccaccaggtcaacgtcatcgcgcgccagcaggaactcgccaagggcgggacgcgcgcaaagctctcggacatcctcaccattccggtgtcgaagtcgaactgggcgccagatgacgtgaagcaggagattgacaacaattgccagggcatcctcggatacgtcgtccgctggatcgaccagggcgtcggctgctccaaggtgcccgacatccacgacgtcggcctgatggaagaccgcgcgacgttgcgcatctccagccagcatctcgccaactggctgcaccagggcgtgatcaccgaggcgcaggtgatggaatcgctcaagcgcatggccatcgtcgtcgacaagcagaatgcgggcgacccgatctacaagccgatggcgccaagcttcgacggcgtcgccttcaaggccgcctgcgacctcatcttcaagggccgcgagcagccgaacggttacaccgaatacatcctgaccgcgcgccgccgcgaggccaagtcgctgggctgagcgaactcagtgaaacgtcaaaagccccggcgcatgccggggctttttcgttggacgaaacgccgcaaggtgccgcggaaccggctgcgaaggggtcgcgttgtcgggccatcaaccaacaggagatggtcatggactggaatcgcatcgaaggaaactggaagcagttcaagggctcggccaaggagaagtggggcaagctcaccgacgacgaccttcaactgatcgagggtcgccgcgagcagctcgagggccggctgcaggaacgttatggcaaggccaaggaccaggttcggcaggacgtcgacgactggctcaaagggctgcactgagaatttacgcgaacgaagccccggctcacgccggggcttttgtttgaaccgtaacctggatgaagcgcaatccttgttgcagcagcccggatatcgcggcgcatcccggctacgaacctacgcgctagaacaccgcgagatatttcagcagcgacacgatgccgatgatgatgacgatcacgcgcgcgatctgcttggcgcggccatccatcggcagcatgttgatgagataaagcacgagaatgacgacgagaaaggtgacgagtacgccgaccagcatcgcgagacccccttcaggcaattgctacgctggtctaacgcgcggcacccgggccggttccatatgggaaacctgcggcaaccgctcacgaagtccctgtctccccagccggccagccagcatttggcggtccgacaaggtccgcgccgccgtcggatgcggcgctcgctattccttcgccaccaccgggacctggcggaatctggcgcgcacagaatccggcagcggcgagaagttcatcgcgacgccccgccggtcgttggcattgcggctggcgactacgagaccattggcccccgcgacgatgtcgcctttacgcaaggtcggatcgtcctcgaccttgaccgatgcgagcccgaccggatccttgccgttgcaggtgcagcctgcgacgatctcgttgcgatagcgataggcgttgggcaaatcggaataggattttcccttttcggtcgtggcgtcgtcgatattgccgccgtagaccagcgaggtttcggaggccgggcagaagctcttgcaggattgcgccttgctttcggcatcgcttccttgcgccgggaaataccggccgtcacagccgcgcacacaataggccatgccgccgccgtaagaggcgcgctggcgcggcgcctcatagcgcggcacatcgtcatgcgggaacggcatccggatctccggtggcggccgcatccggaagccgccgaacaatcccgagaaaaaatcctgcgcctgcgctgaaggcgccgacgcaagaccggccgaaatagcgaccaggatcgccgcaccgccagccgttttgccaaccaggcgtctgctcatatgacctcgctcactctcagttcacggccgacgtcgtgatgttcaacgcctgccgacccgagggcagcgcgctcacggccgggcgctttcgcgcaggatctgcgcctctggccatcagcggcgcgctcttcggcaacaccacgaccttggcaccaacgttgacccggctgaacaggtcgatgacgtcctcgtttgtcatgcggatgcagccggacgagacgaacttgccgatcgtggagggatcgttggtgccgtggatgcggtactggctcgagccgagatacatcgcgcgcgcgcccagcggattgccggggccgcctgcgacgaagcgcggcagatagggctggcgcgcgatcattgcggcaggcggatgccagtccggccactcggccttgcggctgacgctctgcacgcccgaccaggtgaagccttcgcggcccacgccgacgccgtagcggatcgcgcggccgttgccgagcacgtagtagagataggtgttgttggtatcgatgacgatggtgccggccggctcgctccggtcgaagctgacgatctgcttgcgcagccggtcgggcaactgggcgtcctcgtcggcggcccgcggcgcctcgttggcaactccctcggtgtaaccctcatcctgcagctgcatccgctcatggagctgcatcggcgcatagccgaacgtttgcgcgcttgcgccgtccaagggcactgcgagcagagcggacgcgaaacagaatgcggcgacggcgcgcggcgagaagctgctgcggactgctaacaacgttgtcatgtgctgccccgttggtgtgtgcatcagggtgatgcgctgccgaacaaactccaccggccggtttgaagttccggcgtgggatgcagcagcgacgtcacagtcaagcgagcagcaattcacgaaagcgcgatggaaccggcatgccatccgcgcgttgggatgtcgtcaacgggcgcggatctcggtttccgggtgggagaaatattgtgcgcgtccttcccagtgaacgtctgatttccggcagcagcgaaagcgatccgcttccccacagccctgccgagctgccgcccgtgatccgccgcacggagttcgtcgccttcgcactcgcaggccttttgctgattgccatcgtcaccgtgctctacgtcgggcgggccttcttcctgcccgtggtgatggccttcgtcatcggcacgatgctatcgccggcggcgggctttctcgagcggtacagggtcccccgcagcgtcggcgcggtcctgatcgtcatcgccgtaaccgcggtggtcgccttcatggtggcgctgatcgcctcgccgatgatggagtggagcacgcgcctgccggagctcggtgcccagctgaaggacaagctgcacgtgttcgaccggccgctcgcgctgtggcgggagatgcaggccatgctcggcggctcggaaggattgccgagcttccacatacccaagatcgactgggtgcagccgacgatcgaattcctgtcaccgacctttaccgagttcctgctgttcttcgtcaccctgatccttttcatcgcaagctggcgcgacctgcggcgggccatgatcatgactttcagcgatcatgacgcacggcttcgtacgctccggattctgaacgagatcgaggtccatctgggaaattatttgctgaccgtcaccctgatcaatgtcggagtcggcgtcggcacaggcatcatctgcgcactcgcaggaatgcccaacccggccgggctcggcgcgctggccgcaacgctcaacttcatcccgatcatcgggccggttgcgatgttcgcgctgctggtcgtggtggggctgatcgcctttcccaccatcagtggcggcttgatcgcggcactcgccttcggcggtctcaccttcctggagggacacttcgtcacgccgatgatcattgggcggcggctggcgctgaatgcgctcgccgtgctgctcgcgctggcgttctggacgtggttgtggggccccatgggcgcattcctgtcgtcgccgctcctgatcgttgccctcatcctgaaggagcatctgttgccgacggatgcgccgcaactgccacagggctaaccggtttccgccagcggaacttaccgggcaacgaaacgttctccgcccatctcagccgtcaacagttcggagctcctgatgccgacgacagatgccgaagcccggatgagagactggaccgacaaagccaccagagaacgcctcgagaaggatgtagcagccgtgaaaagcgatatcgccgccctcaccgaccagatcaccgatgtgctcaactcctttgccaattccacgagcaagcaggctcgccgcggctatcgccaggcgcgcgagaacgtggattccgcgatggacgacatgtccgagcgcggcagcgcgatgatggaggccgcgcacgacgcctacggctccatcgaggagacgctggaagaggcgatcacgcagcgcccgcttgcgactgtcggactggcgctgggtatcgggttcctgatcggcgccgcctggcgccggtaacggtcgccgccacatatcgaaaccgcggcggtgccccgccgcggccgcacccgtgacgattcggctgttggggattgaggagtaaggccatgcttcagcgcattatcgaggggatcagtgcatcgactggcacgactgttcggctgacctcccttgccgcagccgcagccttcgcgctcctggtgaccacgagcttcctttgcgctgccgcattcatctcggtcctgcagacatacggtccagtgcaggcctgtcttgctggcgcgggcatcttcttcctgctgaccctggcggcggcgggctcgtattggggctacaagcgcgagctgcagaagcgcgctgagatcgctgccgagcgcgccgcgaagtcggccgcgcagagcatgctcgcagatccgatgctcctcgccaccgggcttcagatcgttcgcgccatcgggatgaagcggctattgccgatcctggcaatcggcggcgtcgccctcggtatcctcgcgagccgtgccggcgtgtccgacgaggtatccgccgaaccggctgaatagcgacgccgagaaccgttcgaatatttgcactctgaatcgtgagcgcatctgtccgcatctgacagaggcgacgccgcgcagttttgcgccgtccggcacgaacgcctccgtcgctcacgcaaacgctactcggatgggcgggcggttgccgctaaaagcgtcaccctgattcccaaagctaatttgctcaatgaaaccgtccgtcaaggcgaacctcgccgcattccagcacgactcacgactgtacctgacgctcggcatcgccaattggtcggtgttcgtcgaccacattccgaacaacgtcgtcaacctgctgacgctgcgcaacttcggcttcagcggtgcggccgatctgttcgtgttcgtggtgggctatggggtcgccatcatccatggcagaatggcgctggagcgcggctatctggtcgcggcgacgcggatctttcgacgcgtctggcggctctatgccgcctatgttgtgctgttcgtgatctatatcgacaccatcgcctacgtcgcctcgcaatccatggcgccggagatcatccaccattacaacatctcgggaatcctcgagcacccgctacgcatcctgatccgcggtctcgtgctccaggaagaaccgttgaacctcgacctgctgcagctgatgatcccgctgatggccttctttccgcttgcgctctggggcctgttgcgacggccgaacctgacgcttgcggcatcggttgcgctgtatcttgccgcgcgctggttcgactggaattttcgggtctctccggaccaggaatggaccttcaatccgctctgctggcagatgctgatggtgctgggcggctggtttgccgtcaccggcgcgcccgggcggacgctgcgcgatcttccctggcttcggatgctcgccggcagctatctcgtcttcgccatggcggtcgccctgttgcgccattcgccggaatcgtccgcctatctgccggaccttctgctcgataccatcgcaccgaccgacaaggagaacctcgcgccttaccgcgtgcttcacttcctcgcgctcgccttcgtcgcgacccgtctcgttccggccgatcaccccggcctgcgattgaagccgcttcaggcagtcattcgatgcggcgaggaatggctcgcggtgttctgcgtcggcgtgttcctgtcctttgccggtcatctcatcctgatcaccggcccaaatctcgtgctgatgcagatcgcggtgagcatcatcggtttcgccgccatgaccgccgtcgcctactacgtggcctggtcgaagcggcaggacctgcctgccgccctgcggcagcaggcctagtctagccgcaacgccgtgcgattccgctgggccgccggctgctgctgcgctatgccggaaatctgcatgaggagaccggcgcggcgatggcacagggcggaggggacgaggctgacagcgcgccccggcgcggccggccaaggtcaatggagaccagcaacgccattctcgagagcgcctatgcgttgatggcttccaccggccttgccgccaccaccatcgacgcggtcgcccgccattccagtgtctccaagatgacgatctacaagtggtggccgtcccgcgaggcgctcttgatcgacgcctttcttcaccacgccgcccagatgctgccgctgccgccggcgagctccggcagccccgcggcccgtgcgcgccgccatgccgcggcctacgccgaagcgcttcagggcgagttcggcaaggtccagctcgccgtcgtctccgaatgcatctccaagaccggctcggcggggctgttctacgcgcgttatctgcagttccgtcgcgacgcgctcgtcgagatgatcgccgagggccagaaggatggcagcattctggcgggggggcttcctgaggatctctacgacgcgatctacggcggcctgttctatcgctatatcttcggcattgcgccggttaccgcggcttacgcgcgcaacctcgtcgatctcgtgttgcggcctaaggattagctgcgcgcgggccggaccggcgccgagatcttgtccgtacggtcgcgctcggtcatgtcgacgaccgtctccatcggcgcggtcaattcgtagacgtaggagacgtcggtgaagaagcgcttggcggtgccccccagcgcctcgggcgcgacgcggtcgagcaggatcaggccgaaatcggaatccggccggcgcgtcgcctcgctggtgttgaactcctcccagcggaaatggaagacctccttgccctcctctccggtcaccgtccagttggcggtgatgtgcggatgcttcccgaccagcgacaggccctcgtcggaatgcgaggcaagctcgaagaacagcagcgagaggctctgcgccgcgcgtgcgctgaccgcgatatcgggaccgttgacggcaatccggtcggcatgcgggatggcgcgtgcctcgaacaggcccttcagcttgacgccctgccactggctctcgctgagcaaagagaccacgttggacatggcgtggatgcgcccgatcagcagctcgcgcgcgatgtcgatgtccgagccgtgacgcaaagtgcgcgtcacgatcgactggatcaccgccaggatgttcttgacgcggtggttgagctcgtcgatgaccgcggtcagccggcgctcgaagccgattctgacctggatctcccggctgagtcgcagattgttgtatgccacatagccaaagaggccgcacaccattgccgtgatggcaaagccgatggccgccacgatgatcgcggtctgctcggcgcggcgcaccgaattcacgttcgcataataggagagctgccagtcacggccgccgaagctgacggtgcgcgtcgccgacggcgcgcgcccgtccgctgccgccatgcgtgtggagaccacgccctgatcattggcgacgagctcgccaccttccttgcgcggatccctgagcgcgaccgagaacaacgacatgtcgtcattggtcagcatcagcgtggcaagctcgtaggagaacgtgacgaatcctgccggctcggttgctccctcgggaacgacaggcgccgccacgatgattccgatcggcccgttgccacgaagcagcggaatggggtctgaggcgatcgaccgcttctcgacccgggcacgcgtcagcatggcgcctcgaaccggatcctgatcgtagctgcggcccggcagcgccttggtctcgtcgctgcgcggctcgagatccaacaacacgtcgatcggccgggtgacgtcggcaggattgatcggcttgtcgtcatatccgcgaatctcgggattcgggaaaccggcgccggcaatggcggcttgcgccgccgtcaattcgtccggcttcagccgggcgatccaccccgccaccacgaaatcagtcttgaaggcgtagatggccgagcgcagcggctccagcatgttcgacttgatcacggatggcgcgcggaacaggcctgaggcgacacgcgcgagcagctcccgctcggtcagccggtcctggacgaggctcgcgtgaacgtcgatcgcacgcgcgagcgcgatccgatccagcgccagctcctggtcgtggacgcgataggccgcaagcccggagagcaagaccccgagcagagcgatgaagccgatgatgaaacccagcctgaccacgcgactactcaggcgaaagcaggaggtcggcagtaaacacggagcatatgaacgccgctcgaacggccatgtgccgaaacggggtaaacccaagcggcggagataatggaggaggaggcatcagtacgcaacttgggtcgcctgaaaagcttaatccgcccggccgatgggtctcgccgggatgaacttgcccaggagccggaggtagttaattgccatgtccgaactttgttccgcgggtggcggcgcggcccaggcgtcgacggcgagaaacgcctgcgccaagtggtcgcgtccggtcagcccggccgctgcaggccgcctttggcctcgatgaaggcgacgatgcggtcgagccccacgctcttcttcaggttggtcatgacgaagggacgctcgccgcgcatgcgcctggcgtccgtctccatcttctccagagaggcgccaacatggggcgcgaggtcggtcttattgatgaccagcaggtcggaccgggtgatgccggggccgcccttggacgggatcttgtcgccggcggcgacgtcgatgacgtaaatggtgatatcggccagttcgggggaaaaagtagcagcgagattgtcgccgccggattcgatcagcacgagatcaagtccgggaaacttggcgcgcatgtcggcaaccgcggcgaggttcatcgaggcatcctcgcggatcgcggtgtgtggacagccgccggtctcgacgccggcgatgcgatccggcgtcagagagcccgaacgcaccaggaactccgcgtcccatttggtgtagatgtcattggtgatcgccgcaatgtcgtagcgctcgcgcatggtcttgcagagcaggtccatcagcgcggtcttgcccgatccgaccgggccaccgacgccgacacgcagcgggccgtgagatttcgacatgtcgctcgttctctctcgattggttagggctgcatcgatcacgaccgaaacagccgcgtatattgcgtctcgtgccgcaggctggcgagatcggcgcggaaagtcgcgctgccgatatcgtccaatgccgcgttcagcgcacgattggccgtcgcggcgacggcggcttccagcttgaccagcacgcgctggctgtcggtctggccgagcggaatgagccggctggccgcagaaatccaattcgagaccagcgcatggaggaaagcgtgcagcgtcgaccccagcggcacgccgtgcattgcggcgaccacaccgaccgcgacggggtagaccagtggcgtgctgcatgctgcaatcatggcgtccagtccgtcggcatcccatgcggcgcgggcgatgtcgatgaaggcacggccctgcgaggtcgtctccagctgccgctcgcgcgacggcacgaaggcggcggcgagctcggcgatctcgttcaaagcggtcgtgttgcctgcttccgcggcccgataagcccggaccagaaacgtcgcgtcgcagaagcccgagccgtcgccaagcatcacgtctagccaatccgccagtgccgctgtgtcggtgatatcgcccgcctcgaccgcccattcgaggccgctggaataggagaaaccaccgaccggaaacgccggcgatagccatgtcatcagccggtagagcgccgccgcctcctcctcagcgaggccgccggcgccaaccggctcatttgtggtcatgagcatgcgtgtggccgtggtgatggtcgggatggtcgcaatgctcatcgtggtgatggtggtgctcgtggccatggccatgcgcggcatgatcatggtgacggtggccatggccgtgatgatcgtgaccatggtcatgatggtcgtgaccgtgatgcgcatggtcgtcgtgcccgtgcgcgtggccagcatccgcatacgccccgccttctggatcgaacggcgcctcgatctcgatcacgcgcgcgccgagccccttcaccatctcctcgatcacgtgatcgcggcggatgcgcagggccttcgccatgatctgggtcggcagatggcggttgccgagatgccagccgacgcgaatgaggtggtgcggatcgcggccgcggatctcgagcagcggctcgggcgccgcgaccacctcgaccaggcggccgtcctccagcaccagcgcatccccgccgcgtagcgcgacggcatgctccagatcgagcaggaattcgagccctcgcgtgcccgtcatcgccatgcggcggcgatgccggtcgtcgaaatcgagcaccaccgtatccacgggagcttccgtgaagcggtgctgccccttgacctgcgtggcccggatcatgcgggttacctctttaccttgtctcgaccttctcgggcgtgatcacctcgattttcggcggcgccgtgaagcatttcaccgcgacgcggccgaacgtcttcatgtgctccatggcccgatgcggcaccagcgcttcggcgttctcccactgctccacgaagaccatcttgctggggtctgtgacgctctcatgcatgtcataggcgatattgccgggctccttccgggtctccttgatgcaggcagtggcggctgcgatgaattcggcgcgcgtctcgggcttgatggtcaaggtggcaacgacgtagatcacgagaaatcctcccggcttttcttctagggttacgataccggttcggacattagaccaggcgggaccgaacgcaaaaccgcaaaagccgtccccgggtacatcccgcggacatgcgttgaggcgctatttcagtacatgaaatatcgctgcgacatcggcagcacctcggcgggggcgcaggtgagcagttcgccatcggcgcggacctcataggtctcgggatcgacctcgatattgggcgtggcatcgttgtggatcatgctctttttcgagatcctgccgcggacattctggacggcgtagagcttcttctcgatgccgagcttgcgcgcaaggccgccggtgaccgcagccttggaagtgaacaccacggacgacgccgtacgcgccctgccgaaggccccgaacatcggctgatagtgcaccggctgcggcgtcgggatcgaggcgttgggatcgcccatgggcgctgcaacgatgctgccgcccttgacgatgcagtccggcttgacgccgaagaaggccggcgaccatagcacgaggtcggcgagcttgcccttctccaccgacccgatcagcttcgacacgccgtgcgcgatcgcggggttgatcgtgtatttggcgatgtagcgcttgacgcggaaattgtcgttgtccttgcccttgtcctgcggcaaggatccccgctgcttcttcatcttgtccgcggtctgccacgtccggataatgacctcgccgaggcggcccatggcctgcgagtccgaggacatcatcgagagcgcgccgagatcgtgcagaatgtcctcggccgcgatggtctccttacggatacggctttcggcaaatgccaggtcttccgcgatcgagggatcgagatggtggcacaccatcagcatgtccagatgctcgtcgatggtgttgcgggtaaacgggcgcgtgggattggtcgaggacggcagcacgttcttcaggcccgcgaccttgatgatgtcaggggcatggccgccgccggcaccttccgtgtggaaggcatgaatggtgcggcccttgaaggccttgatcgtatcctcgacgaagccggactcgttcagcgtgtcggtgtggatcatcacctggatgtcgtgatcgtccgcgaccgagaggcaattgtcgatggccgccggcgtcgtgccccagtcctcgtgcagcttcagcgcgcaggcaccggccttgatcatctcgaccagcgcggcgggccgcgaggcgttgcccttgccggaaatgccgaggttgaccggaaaggcgtcgaacgactggatcatccgcgcgatgtgccacgggcccggcgtgcaggtggtggcgaaggtgccgtgcgaggggccggtgccgccgcccagcatcgaagtgacgcctgacatcagcgcgtgctcgatctgctgcgggcagatgaaatggatgtggctgtcgaagccaccggcggtgaggatttttccctcgccggcgatcacgtcggtgccgggaccgatgatgatggtgacgccgggctggatgtccggattgccagccttgccgatcgcagagatcatgccgtccttgatggcgacatcggccttcacgatgccccagtgatcgacgatcagcgcattggtgatgacggtgtcggccgcaccctgcctgttggtgacctgcgactgccccatgccgtcacggatcaccttgccgccgccgaacttcacctcctcaccgtaagtcgtgaaatccttctcgacctcgatgatgagatcggtgtcggccaaccgcaccttgtcccctgtggtggggccgaacatgtcggcatagacggaacgttttattctgacggacatcacaagccccgtttgcgattgaatgtttgaacgctcaaagcacggccttcgctgctttcacggcatcatcgaatttctcgtcgagccatgcattggagccgcggcagcctgcaacgacctgcgtcgcccagtcgatgtaatcggcgagatcgtcgcgctcctcggaagtcgggtcggtttgaatgcgcgcccctgtattgctgatcttgtcggcgatcttgatcagcttggcgcccggcgatttgtggggcgcgtcctcaatctgcttctgccttcgcatcgccttcggcagactcatgtcatcggtgcattcggcgacgagtgaggcgacacgctcggaaaatcttcgcgcaagctcttcgcgcgtggtgtcggtgtcctcgatggtgtcatgcagccagccggcagcgaccagctcggcgtcggcgccatcggtcgcggtcgcgagcaggttcgcgacctcggcgagatgattgatgtagggctcattaccgcgccccttgcgcgccatgccgttatggcggcgcgcagcgagttcagcggcttcggagatgaggcggattggcgagagcatggaaaacacctccgtttccgcctcaaccgtgccgcgccgcgctcgttcctgtggagctcacagcttccccatcacatcgccgcggaagccgtagatcgtcttcttccccgccaccgcgacgagctgcacgtcgcgggtctggccgggctcgaagcggacggcggtgccggcggcgatgtcgaggcgcatgccgcgggccttcttgcgatcgaacttcagcgccgggttggtctcgaagaaatggtagtgcgagccgacctgaatggggcggtcacctgtgttggcgaccgtcagcgtcacggtcttgcggccggcattgagctcgatctcgccgtcctggatgaagagttcgccgggaatcattctatcctcctcgtcattccggggctcgcgaagcgagaacccggaatctcgaaaacaaaacctctggattccgggttcgccctgcgggcgccccggaatgacgaattcgatactacctgatcggctcgtgcacggtgacgagcttggtgccatcaggaaaggtcgcctcgacctggatgtcgtggatcatctcgggaatgcccggcatgacctgatcgcgggtcaaaacctgcgcgccggactgcatcagctcagcgacggtgcggccgtcgcgcgcgccttccaggatgaagtcggagatgatggcaatcgcctcgggatggttgagcttgacgccgcgatccagccggcggcgcgccacgatcgcgaccatcgagatcagaagcttgtccttttcgcggggagacaggttcatgcgaaatctcttccgttcaacacatcagttcaaccggtcagttcaaccacagccgcggcaggaccgcgccggttcgcgccagcaccgccatcatgtcggcgcgtaagcgcgccgcatcttgggcacagaaccgcgccattgcaaagccattccaggccgagatcccgacttccccgccgaacgattccgaggcctcgcgaatgcgctcgaccagggtctcgtcaccgggcacgatcagagcggtgccgatcgccgtgccgctattggcgaccgcggaccgcgcgagcttggcgccgatgtcgccgtcaagcctgaccgtctcggcgaacaccagcctgccgccgcggcgcagccgccagcggtcgacgaactcgccctgctgcatccgctcgcccatggcggtgcggccgaacacgacgatctcgcagagcaggagcgaggccgcctcgtcgagcgcaatgtcgaagcggcgatgcacccgcgcgcggtcgaacaggatcgtctcctgcggcaaccaggccagatgcgcgcccgcggcggctcgcaaggcgatattgagctgcgccgcctccccgggggctcgatagatcttttcggcagctgcggtcgtcagagtgagccgcgtacctccgcccgccgcgatgtcgatatcgaaacagtccccaccggcaaccccgccggccgtgttgacgaacacgcccgacagcccctcgtcttccggcgagggaaagcgcacgcgtaaagagccggattcgtgcaaggtgccgcgccgggtcacgcggtcacgtgcgtgcacgtcgagccgaaccgcgccacgggcgcggttcgcctcgaaaagtcctggcataaccgaaacgtcgctccgcattcgcctccccagccgatcgcggcagaatgagcctacagcgccatctggcggctgatctcgctcgcgtcgaggttggcgcggtcgcaggtgaacttcacagcgccgcgatccatcaccgcaaagctgtcgccgagctcgcaggcaaagtcgagatattgttcgaccagcacgatggcgatgttgccgagattgcgcaagtaggagatggcgcggccgatgtccttgatgatcgagggctgaatgccctcggtcggttcgtcgagcaacagcagcttcggccgcatcaccagcgcgcggccgatcgcgagctgctgctgctggccgccggagagatcgccgccgcgccggccgagcatggattgcagcaccggaaacagcgagaacacgtcgtccgggatgtgcttgtcctcgcgcttgagcggaccgaagccggtcttgaggttctcctcgaccgtcagcagcggaaatatctcgcggccctgcggcacgaatccgatgcccctgcgcgcacgttcatagggcttcaggccggtgatgtcgctgccatcgagcacgatcgcgcccgaggagatcggatattgcccgaccatggcgcgcagaagcgaggtcttgccgacgccgttgcggccgaggacgcaggtcaccttgccgggctccgccgagatcgacacgccgcgcagcgcctgggcagcaccgtagaacagattgatgtctttcacttcaagcatcggaaacacctttgcgggcgaatagcgaatgggagaagcggccgatccattcgctaccttcccagatagacttcgatgacccgctcgttggacgatacctggtcgatggtgccttccgccagcacggtgccttcgtgcaggcaggtgaccttgacgccgagctcgcgcacgaaggtcatgtcgtgctcgaccaccatcacggtgtgggtcttgttgatctccttcagcagctcggcggtgagatgcgtctcgatgtcggtcatccctgcaacgggctcgtcgaccagcagcagcttcggttcctttgccagcagcatgccgatctcgagccattgcttctggccatggctgaggctgccagcgaggcggttgcgcgcttcggtgagacggatcgtctccagcaccttgtcgatgcgctcggtctcggccttgctgccgcgccagaacagcgtgccgcggacggagtgatcgacattgagcgcgagcaggaggttgtcgtgcacggtctggctctcgaacaccgtcggcttctggaatttgcggccgatgccgagctcggcgatgcgcgtctcgtcgagccgcgtgagatccgtgacgccgtcgaacagcacggtgccttcgtcgggcttggtcttgccggtgatgatgtccatcatcgtggtcttgccggcgccgttcggcccgatgatggcccgcatctcgcccggctcgagcgtcagcgacaggttgttgatggcgtggaagccgtcgaacgagacgtgcacgccatccagatagagcattgcggacgtcgtgcgggtatccatgacgttcatgaccgcttactccgccatcttcggttggaccatgccgtcttcagccgcggcgctcgcggcagctgctgcggtgcgcttttcccgcgccgagtcccgccacgcattgaaggtgccgacgatgcccctgggcagcagcagcgtcaccaggatgaacagcgcgcccagcatgaacagccagtacggcgccagtacgccagaggtgaagaacgtcttggcatagttgacgaccacggcaccgagcgccgcaccgaccagcgtgccgcgaccgccgacggccacccagatcaccgcctcgatcgaattgcccggcgcgaactcggatggattgatgatgccgacctgcggcacgtagagcgcgccggcaacgcccgccatgcaggccgacaccgtgaacacgaacagcttgtaggattcgacgcggtagccaaggaagcgcgtgcgcgattccgcatcacgcaccgcgatcagcaccttgcccagcttggatgagacgatggcgcggcagatcaggaagcctatgatcagcgccaggcagctcagcgcgaacagcgcggcacgggtgccctccgcctgcacgttgaagccgaggatatccttgaagtcggtcaggccgttgttgccgccgaagccgaagtcgttgcggaagaaagcgagcagcagcgcataggtcatcgcctgcgtgatgatcgacagatacacgccggtaacccgggaacggaacgcgagccagccgaagcagaaggcaagcaggcccggcacgaccagcaccatcagcgcggcgaaccagaacatgtcgaagccgtaccagtaccagggcagctcctgccaattcaggaacaccatgaagtcgggcaggatcggattgccatagaccccgcgggtgccgatctgccgcatcaggtacatgcccatggcgtaaccgcccagcgcgaagaaagcgccgtggccgagcgagaggattccgcaatagccccagatcaggtcgatcgagagcgccaggatcgcgtagcagacatacttgccccagagcgcgacgagataggtcggcacctgcaggaacgagcccgcgggcagcagcaggttggagagcgggatgaggatgccgcaggctgcgacgatcgcaaggaagatcgtcgcgccgcggtccagcgatcgcgtcagcatgtgaggggtcatgcttccaccgcacggcccttgagcgcgaagagtccgcgcgggcgcttttgaatgaacaggatgatgagaaccaggatcgcgatcttgccgagcaccgcaccggcgaccggctccaggaacttgttggcgatgccgagcgtgaaggcgccgaccagagtcccccagagattgccgaccccgccgaacaccacgaccatgaagctgtcgatgatgtagctctggccgagattggggctgacattgtcgatctgcgacagcgccaccccggcgataccggcaatgcccgagccgagcccgaaggtcaaggcgtcgacgcgcgatgtggcgatgcccatcgaggcggccatgcgccggttctgcgtcaccgcgcgcatttcgaggccgagagccgtgtagcgcagcatcgcgagcaggatcgcgaacaccgcgagcgtgaagagaaggatccagagccggttataggtgatggtaatctgtccgagctcgaaagcgccgctcatccaggagggattccccacctcgcggttggtcgggccgaacatcgtgcgcacggcctgctgcagcaccagcgacaggccccaggtcgcgagcagtgtctccagcggacggccatagaggaagcggatgatgctgcgctcgatcaggacgccgatggcgccggcgacgaggaacgcgagcggcacggcgatcagaagcgaatagtcgaacaggccgggatagctactgcggatcacctcctgcactacgaaggtggtataggccccgatcatcaccatttcgccatgcgccatgttgatgacgcccatcacgccgaaggtgatggcgaggccgatcgcggcgagcagcagcaccgaaccgagcgaaaggccgtaccaggcgttctgcaccatggaccagactgcgagcgagttctggatcgaggcgatcgcgcttgcggcggccttggtcaccaaggctggctggtcgcccatgccggtgagaagcgccagcgcgtcctggtcgccgcgcgccttaagggtcgcgaccgcctcgagcttctcgacctcggacgcgtcgggcttgaacagcaggatcgcggcgcgcgcctcgccgagggcggccttgacggatctgttggtttccttggcaagcgcggcatcgaccgcctcgagcgcggtctcttcatgcgacttgaagacggactgcgcggcctgcaggcgcgtccccaggtccggtgactgaagcgtcaggctgccgatcgcggcgtcgacgctgcggcgcagccggttgttgaggcgaaccgcgctcgcactgtcgggaacgctggcaacggcctcgccgctcgcggcgtcgatcgacttgccgtcggcgccggtgacgtagaccttcttgctgtcgggatcggccatgaggcggccgtcctggagcgcgctgatgatggggaacgcgagcttgttgccactgcccgcgatcacaccgatcgcctcttccgtgtcggaaaaatcgtcattggcgaacttggcgaccgcatcctcgaacgggccggcgagggccggcagcgcgaacgcgatcaggaatagcgtgagcgcgagcgaatagagacgcgcggacaaatgggctggcactgtgaatgaccccggcagaaatgagtggagaaggcggcgggatcgccgccctctccggtcgcgcaatggagcgtcagatcgggatcaggaacccgaaccgaggcacttgttggtcttggtgttgaagttgccgcacttcttgccgacccagtcgccgatcagatccttggagccgtcgagctccttcgaccaggcatcgcccggaacgaggcccggggtcttccagaccacgtcgaactggccgttgcctttgatctcgccgatgaacacgggcttggtaatgtggtggttcggcagcatcttcgacacgccgccggtgaggttcggcgcctcggtgccgggaagcgcgtcgatcaccttgtccggatcggtcgacttcaccttctcgaccgccttcacccacatgttgaagccgatcacgtgggcttccatgggatcgttggtcacgcgcttcgggttcttggtgtaggcctgccagtccttgatgaacttctcgttcgatccgtccttggtcttgatcgactggaagtagttccaggcagcgaggtggccgaccaggggcttggtgtcgatgccggcgagttcttcctcacccaccgagaacgcgacgaccgggatgtcctttgccttgatgccctggttgccgagctccttgtagaagggaacgttggcgtcgccgttgatggtcgagaccaccgcggtcttcttgccggccgacccgaacttcttgatgtcggccacgatcgtctgccagtcggagtgaccgaacggcgtgtagttgatcatgatgtcttcctgggcgacacccttggacttcagataggcttccaggatcttgttggtggtgcgcggatagacgtagtcggtgcccgcgagcacccagcgcttcaccttctcttccttcatcagatagtcgacggcggggatcgcctgctggttgggggccgcccccgtgtagaatacgttgcgctcgctctcctcgccctcgtactgcacgggatagaacaggatgctgttcagctccttgaagaccgggagcaccgacttgcgtgacaccgaggtccagcagccgaacacgaccgaaaccttgtccttggtgatcagctcgcgcgccttctcggcgaacagcggccagttcgaagcggggtcgacgacgacggcttccagcttcttgccgagcacgccgcccttcttgttctgctcgtcgatcaggaagaggatggtgtccttcagcgtggtttcgctgattgccattgtgccggacagggagtggagcacgcccaccttgatggtgtcgtccgcggctttcgcgccagtcaatgaagccagaccaagcaccagtccggcggtcgcggcgagcacgccgcggcggctaaatgaggccgctatatcgtgagtggatttgttaaacatgagtgtctcatctccctgacgcagacgtgaaaaacgctgcgaaacggccccacggccgcctgcgattaacggaatcgcaagaaccgtgccatggactcggcaccctttaagcaattgatttcacatcaataatcgccagaaatcgcactttggccgcgcttaggtcgcccaaaggttaggcaatcaaaatgtatgcgaaaggggcattcggtctattttgtaagcagacatgcagtgctggctaaatttccggcagcacaaattttgcgccgcaatggtcatttccggccaacttgccttgaaagcgccctctcgatgttccatatgagcggacgagacctcttgcgaatcaaggggtcgtagcgagccgcgtgttcttaagccctctacgggcctctggcttgccccatcctcccgagccatccgacaccccaaacacgcaggtgtcttctcgacacccctttgcgcgcgccgcgccgaatgcgccgggcgcccgcttttgacatggaaagaacccctcttttgacttcgtttcaggacttcggcctcgccgaacccatcgcgcgcgctcttcgtgaagagaattacgtcacccccaccccgattcaggcccagaccatcccgctggcgctgaccggccgcgacgtcgttggcatcgcccagaccggcaccggcaagaccnnnnnnnnnntctttcgcactgccgattctgcatcgcctgctcgagaaccgcatcaagccgcagcccaagaccgcccgcgtactggtgctgtcgccgactcgcgagctgtccggccagatcctcgacagcttcaacgcctatggccgccacatccggctgtcctcgacgcttgccatcggcggcgtaccgatgggccgccaagtccgcgcgctgatgcagggcgtcgacgtcctggttgccacgccggggcgcctgctcgacctcgtgcagagcaatgggctaaagcttggaagcgtcgagttcctcgtgctcgacgaagccgaccgcatgctcgacatgggcttcatcaacgacatccgcaaaatcgtcgctaagctgccgatcaagcgccagacgctgttcttctcggccaccatgccgaaagacatcgccgagctcgccgatgccatgcttcgtgatcccgcccgtgtcgcagtgaccccggtgtcctcgaccgccgagcggatcaaccagcgcatcctccaggtcgatttcacggccaagccgtccttcctcgccaagctgctgaaggacgagcccgtcaaccgggcgctggtcttcacccgcaccaagcacggcgccgacaaggtcgtaaagacgctcgagaaagcggggatccccgccaacgccattcacggaaacaagtcgcagaaccatcgcgagcgcacgctcgcccagttccgcacgggcgagatccgcaccctggtcgccaccgacattgccgcccgcggcatcgacgtcgacggcatcagccatgtcatcaatttcgacctgcccaacgtgccggaaacctacgtccaccgcatcgggcgcaccgcgcgcgccggggccgaaggcaccgcgatctcgctggtcgcaggcggcgaggagctcagctatctccgcgacatcgagcggctgatccgcgtggcgctgccgcgggaggaccaccgcaccgacgccggccgccgcgatgccggccccgccccgtcacagcaacggcaaggacggccgggcggccgcccgggccagcgtccgcagggcgcacgccacggtgacgggcggcgttccgacgaaaggcatgccgatggccgccaccatggtgccggcaagcagggcgacggaaggcccggcgagggacggcacggcgaggcaaggcacgttgacggacggcccggcaccggcccgaatgcttcgaaggggtctcgccgccgccgctccggtggtaagatgcattcatcgcctgtcgaccgtccggaacaacgttccgcgcatagcgccgggacgcctgatgggatacaaggcgttgcctttttgcgccgcgagagtcggccaagcagccaaccgaaccgcaaaccctattcgcactagccgtccacgacctggagaaattcatggctaaggaagagctgatccagttcgaaggactggtcaccgaaatcctccccgatgcccgctaccgcgtgcagctcgacgccggacacgagatcgttgcctataccgccggcaagatgaagaagaaccgcatcaagacgctggcaggagaccgcgtgacggtggagatgtcgccctatgacctcgagaagggtcggctgattttccgtcacaaggacgagcgtcccagcacggcgggcgggccaccccgtcccgggcagcgcggcggccagttccgccgtcgctaatccgctgcggcgcagaagggcgacagaattccggactgcaacttgatccgccgtcgacatggcggcggtcaaaaaatcgtgcacgtccggattgtttcggcccctcgtttccgataaaatgaattaatcgattttcggccggacgacattggcatccaccggtacagccggttcagacacgctgacgacccttccagaaattcgatctaacctgcccgcgcgagcgggctccgacattgtactatctgagaagggactacccccatgagcatgggaaccgtgaagtggtttaacgcaaccaagggcttcggattcatccagcccgacgacggcggccaggacgtgttcgttcacatcagcgccgtggagcgcgccggccttggctcgctgcgcgaaggccagaagatctcctatgagatcgtggctgaccgccgctccggcaaatcggcggcggacaacctgcgcgccgccggctgagccctgcgggccccgtgggcccgatcgctcgaacgagcgaggctaagcaaccaaacagaaaggccgtgcggaacgcacggccttttccatttcgggggaactcgcaaatctcaacacgtcgacggtatgtcgttgtagggcacgcagctgacctggcgcggccgcgtgtaggaaagatcgctgagggtgatactcgacttcaacacgtatccgacggtcggggtgtaggtgtagctcgcctcgctgaggatgagatagctcgacggaatcaatagcgtcggggggatcatcgaggtgaccttgtcgccggcattccgagccgaggtcgccagcgtagcttgcgtcgcgccgctcgcgatggtgccggccctgctccactggaccgtcgcgatactattggcatcgatgtagatctgcgagatcgtgcccttcacgagcgaagcgtcgtaaggcatgacgaccgagatgctcgcggtgaaagtgttctgcatgtcggcgtcgtagagcttcgtcgactgagacgtcaggtccgacagagtccgtgcaatcaacgtgaccttgcggtcgatcgctacggcggacgaaaattcgacggtgccgaagaacatgaccagcatcagcggtacgatgactgcgaattcggtcgccgcgagtgcgcgcttgtcggcaacgaactcgcccatggagcaacgtgcattcctccagatattcgcaatcgtctgcatcggtccgctcagatccatctgcctcagaagggttcgttcttgaacgcagcggtcgccaccagcagccgcttgttgctgcacccgatgttgtagccgaggccggtgacgacgagcggccactgatagaacaggcgcaccacgaccacctggccggagcctccggcattgtactgcatgccggtcgggttgaaattgcaggaattgccgtagctggtcaggttgagcgtcccgaaggaacttgtgctcaccacgtcgacgtagagcttgctgcaatcgaacaacgccgggatcttgctgcagacaaaggccttgaacgtggtctgatcgcatgccgtaaccgcgttgggcgcggtctgacacgccgccaccgagccgccctgtgcctgcgcctggccggtcagaatcgcccgcgcggagtcctgcgcgatcgtctcgagcacctggcccgagaagaacacgagcgccgtctcgataatggcgaacaacagcccgaagaacatcggcgccaccaacgcaaactctacggccgcggagccgcggcggttgccgcgaaaccgggccagcgctttccggagcgtgaacctggtaggtgcatgcgatggcatcgggtcaaattccccagcaacggtcgatcatctgccctgttcaatagcggaaactgattgtctaagtgtttcggacagcccgcgtgcggcggaccgcaacgttaaggctgcgttaaccaagtgcgacccgaagcacaccaagcgcggcgcggagagacgcctcggatcgcgcggcggacgccaccgcgtccccgagcctgacgggatcccccgggcgggcccccgccgttcggctagttgggtttggcggccgcgccggcaccgccagcgctggcactgctgctcagcgaaccggcctggctcatggtgttgttgaagtaggtgtcgctgtcgccgagggtcacgcgacgctggcaaagcggtgcgcagctgtaggattcgcgctcgaccccgcgatagacggtgacgagccggtcgctcggaccttcgacctggatctggcggtcgaccagaatctcaccgccccgatcaagtgcgatgaaattggtggccccataaccctttccggtcacgacgatcatgccgcccggctggagcgtgacgtcggcgatcaggggattgccgaccacgatggtcgccaccttgccgggcagccgtaccagcttggcctgatcgacattgacggcgatggtgtcgacggtgggctcggcaaggccggcggccggccaagccagcgccgcagcggcaaccagaagacagacgcgcgcatgacggcgcagcatttccttacgcatactcttacccccgggacgcacaaaccggcagaaacgactcgacgcagcggagccggtgcccgacccgctcaacctgcccttaattcatgaacgttccgcaaactcgccgcctattgtttgaacggaccggcatttaccggcctcgctgtccccctaatggcggaacggataggcgagctggccgccgatctccttcggcatggtcgcttcgtccttgccgtaatcctgcggcagcttcccctccggcatgcggaacgtgccgaacagcacgtcccagatcgggaaagtcccggcgaagttggtgtcgccgccctcttcaagcgaagtatggtgccagcggtggaacaccggcgtcgccagcacatacttgagcggtccgaaggtccagttcaggttggcgtgcacgaaagccgaatggaacgtggtgaacgggccgacccagatcatgacgttcggggagataccggccatcagcagcacgacgtcgacactgatcgtcccgagcaagagattgaccggatggaagcgggccgcggagatccacccgatttcctccgaggaatgatgaatggcgtgatacttccaaaagccgccgtcgtgaaagacccgatgcagccagtacagcatgaagtcggacaggaccaggaacagcaggccctgcacccatagaggcaactgtgccagcgggccatggccattgtcgtagaaggcgatgagttcgtcggggtcatggatgttgaagatgacgccggcgccgacgatcagaagcccgatccgcatggtgcgggcgaacaccggaacgaagaaccagtagcagatgtcggtgatgatctcccgtttgcgccaccatggcgcgccgggattgcacgcccagaaatgctccagcacggtgaagaccgccgcgagcaccatggtgacggggattaccttcacgatggtctcgccgagcatcagggcgacttgcatgggcaggctcgacatcgtcgcctctcttgggaattccagtcctgctacgcctactccccgaaatttaagggacggtgaagcgaatatcgcgctgccggtgcattcggaagccgaacgtcttgcagctgccgccttaaggcgaaatttactctgggcaaaagcatcgcgccggaccggggtttacccgatcgaattaactgtaccgaaagagctcggctttcatggtcgtcgcgtcaaagacagcgccgaacgaggcgatctcacccagacggagttttgttcatgaagaacttgattgcgcgtttcgcgaaggatgaatccggcgccaccgccatcgaatacggcctgatcgccgccggcatcgcgctggccatcatcaccgtcgtcaacagtctcggcaccacgctgaacagcaagttcacctcgatcagcacgtcgctgaagtaagcaaccggcaagcgacggcaaatgccccggacctccggggcctttgtttttctgtgacggcgagttccagtggcgttgcacaagttcagaaccgatgccgcggtcgcggcgaacgagccgagggcggcgcaggccggctcgccggcttattggatctgcctcgcgctgctgcttgcgacggtcgcgctcgccgcgcgcattgccatcttctggtagaggcgtgtagtcgccctgcgcgccacagcctccgttgtcggtttgtttagcactgcgtgctaacatccggcgacgccagctccgacggcaaacccaggcctcaagacgcagcccatgatcctcgaccttgcgcgccttctgctcttcccggcccttatggcgttcgccgccgcgagcgatctcttcacgatgacgatctcgaaccgggtgtcgctattgctggtggcaggcttcttcgtgctcgccttcgccggtggcatggcaccttacgaaatgctcagtcatgtcggcgcgggcgcggttctcctggtcgtagccttcacctgcttcgcgatgggctgggtcggcggcggcgatgccaaggtcgcggcctccgtcgcgctctggttcggctttgcacatctgacgaacttcctgctctacgcgtcgctgttcggcggagcgctgacgctgctcctgctccagttcaggcaatggccgctgccctacgggctggcgggtcaggcctggctcgcgcggctgcacgccaaggaaagcggcattccctacggcatcgcgctcgcgctgagcgcgttgatggtctatcccgagaccgaatgggtgaaggcgatcgacctcgctcacctcgcactgcgctgaacgcagcgggtaaacccggcgttaaggcgatttagatacgcctcattaaccatgctttgacgaatagctggtcaactgccggttacggcggcggctacgccgcagcgtattgttggaaagtcgaagcgtatgaatagggcacgcatagtcgtcctgaccgtcgccatcagcgccggcggtgtcgccgcgtacctggcgagcggcaccgacaattctgcgccgcctccgcttccggccgcacagctgccgacagtggacgtcctcgtggccaagaacgacatcggcctcggtcagaccgtgaagccggaagacgtgcaatggcagacctggcccgccgcgactgccagcgccacgttcatccgccgcaacgagcgtcccgagggggtcacccaagtggccggctcgatcgcgcgcgcgccgttcatccagggtgaaccgatccgcgaccagaagctggtcaaggccgagaactccggcttcatggccgccatcctgccctccggcatgcgggcgatctcgaccgagatctcgccggagacgggcgcaggcggcttcatcctgcccaacgatcgcgtcgacgtcattctcacgcgacggttgaagaacccggaccagagcagcggcgcgcccgacgtcgtgacctccgagatcatcctggccaacatccgcgtcctggcaatcgaccaggcgcccaaggaaaaggatggccagaacgcggtgatcggcaagaccgtcaccctcgagctcactccgtcgcagaccgcaacgctctccgcggcgcggcagagcggcacgctgtcgctggcgctgcgcagcatcgtcgacgtcaagatgagcgagatcacgctcgatgactccgcgcagaagcaagagggcgtctcgatcattcgctacggcattccaagtcaggcggctaaggcacgatgaagacagtcgatatgaaatgcagggcagattcggcgacgatgcgaacctcactggtccgcgccctgtcgttttcagccgccctcgcgctggcgctcaacccgatgatgaccccggcggccgctgccgattaccgccccgtagtgcaggccgcggcggacggccagatcaacgcgcgcttcctctcgctcggcgtcggcaagtcgatcgtgatcgacctgccgcnnnnnnnnnncgacatcaaggacgtactggtcgccgatcccaagatcgccaatgcggtggtgcgttcggcgcaacgcgcctatatcatcggcgccgcggtcggccagaccaacatcgtattcttcgattccgccggtcagcagattgcggcctatgacatcgcggtcaagcgcgatctcaacggcgcacgggccgcgctgaagcagatcctgcccaattcagacattcagatcgatggtctcggcgacggcatcatcctgagcggcacggctgccaacccgatggaagcgcagcaggcgaacgagctcgccgcccgcctggccggcggcgtcgacaaggtggtgaactccatcgtggtgcgcggccgcgaccagatcatgctcaaggtgacggtcgccgaggtccagcgcaacatcgtcaagcagctcggcatcgacctctccgccaacctcaactacggcacctccgtggtgagcttcaccaattcgaacccgttcacggcctatggccgcaacctggtggacggcaacaatctgacgacgaagttcggcgcgacgccgtcggtgcaggccaccctgcgagccatggagaccgcgggcgtgatccgcacgctggccgaaccgaacctgaccgcgatatcaggcgaatcggcgaccttcattgccggcggtgaatttccggtccccgcaggctattcgtgcgatcccgtcacccacgtctgtacgacccagatcagcttcaagaagttcggcatctcgctgaacttcacgcccgtggtgctgagcgagggcaaaatcagcatgcgggtgatgaccgaggtctcggaactgtcgaacgaaaatgcaatcacgctgtcccaggccgtgacctcgacgtcggtgaactcgctgacggtgccctcgatcaggacgcgccgcgcggagacctcgctggaaattccctccgggggcgccatggcgatggccggcctgatccagcagcagaccaagcaggccgtcagcggattgcccgggctgatgcagctcccgatcctcggcacgctgtttcgcagccgcgacttcgtcaacaacgcgaccgagctggtcgtgatcgtgacgccttacgtcgtgcgcgcggtggcgccgaaggacctgtcgcggcccgatgacggcttcgccccgcctgcggatccgcaggcccagctgatcggcaacatcaaccggctctatggcgtgcccggacggaccgagccggccaagaactaccgcggcacctacggcttcatcaccgactgaggcggaacggggacttcacgatgaacacaagacgaccccagcttcgcaagcgcgccatccgcctcagtggcgcgctcgtcggcatggctctcgtgctcggcggctgccggcacgacgaggtcgttacggcctccattcctgacgattacaagcaacgtcatccgatcgcgatcgaggagcagaaccgctcgatcgtggtcttcgtgggccatgcccgcggcggtttgaccgccgcccagcgcgccgacgtgatgggcgtggcctcgacgtggttgcgcgagggcaccggcgccattcatatcgacgtgccgtcccatacgcccaatgcgcgtccggtcgcggacacgatgcgcgagatccaggcgatcctggcggcggcgggcgttccaccgcgcggcgtcagcgttcgcccctatcagccggaagacaagcgcttcctgccgccgatccggctcacctattccaagatcgccgcggtcgccggcccttgcggcctgtggccggaggacatcggcccctcgatgaagaacaagcgctggttcgagaacaaggactactacaattacggctgcgcctatcagcgcaacctcgcggccatggtcgacaatccgtcggacctcgagcagccgcggcccgaaactccatcgtacacgccgcggcgcatcaccggtttcgagaagtatcgcaggggaacgacgacggcgaccacctatcctgaggccgacagggccaaactcagcgacaccggcagatgatcagctacgcgcgtcagacacacgaagagcagcctgcagcagctccgccgccggtcgaggagcatatcgcgcctgcgccgcgcgtatcggtccaggccttctgcgagaccgtggagactgcggccgcggtacagtcggccggcgaggatcgccgcctcggcaaggctcacctgaagatccagataggcggcatggcggccgcgatcgaagcttatcgctcggcccccacgccgaacgtgatcgttctcgagagcgacggccgcagcgatctcctgagcgggctcgaccagctcgccaccgtgtgcgacgccggcacccgggtggtcgtgattggccgcatcaacgacgtcatgctgtaccgcgagctggttcgccgtggtgtcagcgactacgtgctcgcgccggtcggcgcgatcgacgtcgtgcgctcgatctgcaacctgttctccgcgcctgaggccaaggcggtcggtcgcatcatcgcggtggtcggcgccaagggcggcgtcggggcttccaccatctctcacaacgtggcctgggcgatcgcgcgcgacctcgccatggatgccgtcgtcgccgatctcgacctcgccttcggcaccgccgggctggactacaaccaggatccgccgcagggcattgccgacgcggtgttctctcccgaccgcgtcgataccgctttcatcgaccgcctgctgtcgaaatgcaccgatcacctcagcctgctggcggcccctgcgacgctcgaccgggtctacgatttcggcaccgatgctttcgacgccgtgttcgacacactgcgctccaccatgccctgcatcgtgctcgacgttcctcatcaatggtcgggctggaccaagcgcgccctgatcggagcggacgacattctgatcgtggccgcacctgacctcgccaatctgcgcaacaccaagaacctgttcgacttgttgaaggccgcacgtcccaacgaccgcccgccgctgtactgcctgaaccaggtcggcgtgccgaagcggccggaaatcgcggctgcggagttcgccaaggcgatcgaaagtcagccgatcgtctcgatcccgttcgagccgcagatcttcggctcggcggccaacaacggccagatgatcgcggagatctccgccaatcataagtcgatcgagatgttcctgcagatcgcccagcgcctcaccggccgcagcgagaccaagaagcagaagtcgtccctgctttcacctctgattgacaagttgcggggaaaataagccgccgcatggagttgttaagtgttcggtaagcgtagcggaacagacatcgattttcgggcgcccaagcccggcgccgtgtcgcccgagccctcccaggctccggcgccgacggtgccgcgcgccccgccgccgccggccgtcgcctcgccaccgcttgctcctgccaaggccccgccgcctccggccatggagagccggcgttcggacaattactacgaggtcaaggcgaccatcttcggcgcactgatcgaagccatcgatctcgcccagctcgcgaagctcgattcggaatccgcgcgcgaggaaatccgcgacatcgtcaatgagatcatcgcgatcaagaacatcgtgatgtcgatcgctgagcaggaggagctgctcgacgacatctgcaatgacgtcctcggctacggcccgctcgaaccgctgttgtcacgcgatgatatcgccgacatcatggtcaacggcgccaacaccgtctacatcgaggtcggcggcaagatccagcgcaccggcatccgcttccgcgacaaccagcagcttctcaacatctgccagcggatcgtcagccaggtcggccggcgcgtcgacgaatcctcgccgatctgcgacgcacgtctcgccgacggctcccgcgtcaatgccatcgtgccgccgctgtcgatcgacggccccacactcaccatccgcaagttcaagaaggacaagctgacgctggatcagctcgtcaagttcggcgcgatcacgcccgagggcgccgagatcctccagatcatcggccgcgtccggtgcaacgtgctgatctccggcggtaccggctccggcaagaccacgctgctcaactgcctcacgaattacatcgagcacgacgagcgcgtcatcacctgcgaggacgctgccgagctccagctgcagcagccccacgtcgtgcggctggaaacccgcccacccaatatcgagggcgagggccaggtcaccatgcgcgaattggtgcgcaactgcctgcgtatgcgccctgaacggatcatcgtcggcgaggtccgcggccccgaggccttcgacctgctccaggccatgaacaccggccatgacggctcgatgggcacgctgcacgccaacaacccgcgcgaagcgctgtcccgctgcgaatccatgatcacgatgggcggcttctctctgccctcgcgaacgattcgcgagatgatctgcgcctcgatcgacgtcatcatccaggccgcacgcctgcgcgacggttcccgccgcatcacccacatcaccgaggtgatgggcatggaaggcgacaccatcatcacccaggacatcttcctctacgacatggtcggcgaggacgccaacggcaagatcatcggccggcaccgctcgaccggcatcggccgccccaagttctgggaacgcgcccggtactacggcgaagagaagcgccttgccgccgcgctcgatgcggcggaagtcgctccgaagacttaaagcaggtcagcgccgccatgaacatgcaggtactcgctctcgccttccttgccaccgcggcggtcggcggcatcgcctgggtcttcctctatccgctgctgtcgggagaacggaaggcggagagccggcgcgcctcggtcgcgcgcgccgaggcgcccgcggcccgtcaggccgagaagacccagcgttcgcgccgcgagcaggtcgagacgacgctcaaggacctggaggcgagacgcgcgcaagagaagagcgtgccgctcagcgtgcgcctgtcgcaggccggactcgactggacgccgcagaagttctggatcgtgtccgccgtcgtggccggggtgttctttgcaggcgctctgttcgccggcggcggcctgatcggcgccgccggcctcgcttttgccggcggtttcggcctgccgcgctgggcactcggcttcctgaaaaaccgtcgcgaagccaagttcctggctgcgctgccggacgcggtcgacgtgatcgtccgcggcatcaaggcgggcctgcccctgttcgaatcgatcaaggtcgtggccgccgacgcgcccgagccgctgcgcagcgagttcctgacgatcatcgagacgcaggcgatcggcatgccgctgggcgaggcctgcgcacggctctacgaacgcatgccgctgccggaggccaatttcttcggcatcgtggtgtcgatccagcagaagtcgggcggcaacctctccgaagcgctcggcaacctctccaaggtgctgcgcgaccgcaagaagatgaaggagaagatccaggcgatgtcgatggaggccaaggcttccgccggcatcatcggctcgctgcctccgatcgtgatgttcctcgtctacctcacgacaccgcaatacatctcgcttctttggacccatcccaccggacagctgatgctggtcggctgcgtcatctggatgtcgatcggcatcatggtgatgaagaagatgatcaacttcgatttctgacggtgccgtatggtcgaattcctcgtctcaaaactgcacgacgtccgcttcatgacgatgctgctcgcggccatcgccgccagcgccaccgtgtacacgctggtgatgccgttgttcgccggcgagggcctctccaagcgcatgaaagcggtcgcgagcgagcgtgagcgcatccggcagcgcgagcgtgagcgtctccacaagagcgaaaaggtctcgctgcggcagacgccgaagcaactcgtctccaaggtggtggaagacttcaacctgaccaagtggctggcgcaggaagctgctcgggacaagctcatcatggccggctaccgcggccaggcaccctatatcaccttcctgttcgcccgcatggtcgccccgatcgtgctcctgatcggctcggtcctctacgtcttcttgatcgcgcgcttggaacagccgatgccgatcaagatcggcatctgcgtcggcgcggcctatctcggcctccaggccccgatgctgttcctcaagaatgcgatttccaaacgccagctctcgatcaagcgggcttttcccgacgcgctcgacctgctcctgatctgcatcgaatccggcatgtccgtcgagatggcgttccggaaggttgcgaccgagatcgtgggccagtcgatcgcactgtcggaggagttcactctgaccacggccgagctctcctatttgcaggatcgcaaggtcgcctatgagaacctggcacggcgcaccgggctcgaaggcgtcaaatcggtgtgtctcgcgcttcagcaggcggaacgttacggcaccccgctcggtcaatccttgcgcgtcatggcacaggagaaccgcgacatgcgcatgaacgaggcggagaaaaaggccgccgccttgccgccaaagctgacagtgccgatgatcctgttcttcctgccggtgctattcgtggtcattctcggaccgaccggcatcaagatctcggagatgcaatgagaatcggcggcgagcctcgcgttcgccgctcaggccagagcgagacgatcggacctgatcaatcgggttggctcagcgaagcgatcggcgtccgcttcggtgcaccgcgcggggagtcgccgcgcctgagcatgtccttgagataggcgacattggccgccgcctcgtccggtggcaggtccgccttcacgatgctctccgcttccgcgaagcggccctggaggccgatcaccaaggcgaggttctgccgcacccgggcactcgcacgcggcgaggcgtaggcctgccggagcgactcttcggccttcggcagctctctcgataacatgtaggacaggccgagattggagagcacgccgggatcacccggtgcgatcttcagcgcgctcgcgtaataggatcgcgcctcctcatgacggcccatctgatccagcgcggtgccctgtaccgaaagcaggcgccagtccggattgtcaggcgaatgcgctttcgacaggacgtcgaaggcctgcttgaaattgccgttgtcggcgagcgcgcgcccgtactgggccagcagcgccttgttgccgggattggcgatggtcgcctgctcgagcacagcggcggcctgtgcacgctgaccgttggcgcgcagggcctgtccataggcgagcgcggcgtcggcatccttgggattggcccggtagcgctcgccataggcttcgacggcgcgcgctggatcggccggcgcacgatcggcggaagccgcctcggcccgggggccgacggagcctgtcgcttcggagagcttcgacatggccgtgcagccgccgagtcccacggccactgccgcgacgagcgacgtggaagcaagaagccgggctagtctgatccgtggacgcatgacgctttgactctcgagcagcttgatcgagccgaacgcgccagcaatagactgttaaccctaacggccggttaacgcgcccgccccctcgtcttacggtggcgaacttggcggcacctcaccgccgaggtccagatcgaggccgagcgccctcacctgttggtcgagatcccgaagcaatcgctgcctctgccgcgcccgccgccgaacgtcggtgccctcacaagacagcctcggcagctcgcggagaaagtcatcgcggttgatcaagcccctcccatggagttcatcgagctgagcgcgatcgataccgagcacgtcggcggactgctcgatcaatcggctgagaagcgttctcaccgcggcgagcgtgtcaatgacggatttcgacctggatctcgcgaccttgccttcgaggcccgcccaggcttgagacgagacgacataggtatagagcgcagccggccagtccggctcggcttcatcatagaagcttcgacgcatgaacaaccggcgggtgatcgccgcgatctgatcccgcttcaacgaaacggatgaggcaacgtcgatcgtcgactggacggcgggatcacgggtaaagtcccgcccagccggcaacccgatgacgccgtccggcaggttcgagtcgagtggcctgaaggcggcatcgttgcgtaaccttgaatagcgggtgatcgagaagcggtgctccgtgcccccggcacggaccgcggggccgaaatggatgaggttgaagccggcatcgtcgccggcttgaccggtcgaggatggacagcaaagcacgtagatcgtgcgccagaacgcctcatcgctctcgctccccgtcgcgcgcggatcgggtatggaatagcgggtcaatccctcgacatggcgatgaccgtgcaggaccagatccacattgagcgatgtggcggcctcgaggaacgtggcgggtgcggcgaggtacatcagcggctcgtcaggcgcgccgagaaagcgctttccttcgccggtcgcctgcggcaggggatgatggtgcagggccagcacacgcacaaggttttccgccggctcggcataatcggcatgccctgcagaaccgacgctgcccgcaagctcggcgctcagccgggcggagtctgcgaccgttgtcctgtatgtgccttcgtcgaccttgccgctcgcgagcgtcatcagactcgcgcgattggaatcgagcaacaccaggtcgaggccggcctgccggtagtagacgttcttcgcgacccgcggcaaatgcaggtaatcgtaggcgtcgtgacggcctgcgcgttggctcgggcgcttgacatcgtgatcgccggcaacggcctggatgtcggtgaacagcccggtctgcctgaaggacgcaatgacggccagcgcctcgtcgagcgcacgcggcgtcggctcgtccaccagatcccccgtgatcagcaggatacggtcggggacatcggcgacacccgccatcttctcgcgaatcgcggccgtgagtgtctcgatgctcgcaagctgccggcccgacccgtccagatgcaggtcggagatatgcgcaataacgaacgatctatccattttgcgccgctcatttgcaaatgctgcgccgccctaaagggcgagagaaatgcttcgacaaacaggttcgggccggagggccaaagaatgggcccgggcaggtagccaccacgtgccgccgtgcatctgcgttcggtgcatacagcaaggacacaatctaaaatgttcgcggataatgccacaaccgatacgctagtaaaggcctgaggccgtgctcttccagcgccagctcgcgcgagattcgtgcgatctgcagcggttgtgcctcgcgcgaccgacttttccggggcaggccggttgtggatttcgtcaaggcgcttgtctggcgtatcagaccgcgcatgaacggagcggtcatggaagtggaggaccagcggccggcaaggagcgcaaggattcgatagtggtgcggccgcgccccggaacctggcagcttgacggcaaagctgattgcagcggcagcgaaactctgcgaagtctcgtccgtttgcataacccgctcgatctgacgactccggacccgccaatgccttctgtcttcgagacatcgtccaccgccaccccgatcaccttcgtcaccagatcgagctgggatcgcgtcgccgaaacgctgccgccggtgcaacggcagttcgcgaccgtcagcagctttgccggaaagccaggcagttctctggcgctgcctgcgcccgacgggacgattgcgcaggtgctgttcggcctcgaggatgagggtgcaagatcgcgcgacctgttccggcccggcgcgctgcccggccttctgccgccgggcacctatcgcttcgccaatgcgccgcatgacacgcggctggcggcgctcgctttcacattgggatgctatcgcttcgcccgctaccgcaaggctgatcgccccgaggtccggctggtgccgcccgacgacgtcgacccggccgagatcgagcgcattgctgatgccacaatgctcgcgcgcgacctgatcaacacgccctccaacgacatgggcccggaggagcttgccgccgccgcgcaggcgctcgctaccgagttcggcgcaagcttcacctgcaccatgggcgaggaattgaggaccggcttcccgctgatccatgctgtcggcatggcctccagccgcgcgccgcggctgatcgacatcggctggggcgatcctgaacatcccaaggtgacgctggtcggcaagggcgtctgcttcgacaccggcgggctcgacctgaagccgtcgagcggcatgctgatcatgaagaaggacatgggcggggccgccaacgtgctcgcgctcgcgcgcatggtgatggatgcgaagctgaaggtgcggctgcgcgtgctgattccggcggtggagaacgcggtcggcggcaatgccttccgccccctcgacatcttcacctcgcgcaagggcattaccgtcgagatcggcaataccgacgccgaaggccggctcgtgcttgccgacgcgctggcgctcgccgacgaggagaaacccgacctgctgatcgacctgggcaccctgaccggcgcggcgcgcgtcgcgctggggccggatttaccaccctattacaccaatgatgagacgctggccgccgacgtcgcgcgctgcgcggtgaaggagaacgacccgctctggcgcatgccgctgtggccggcttacgattcctggctggactccaagacggcgaccatcaccaacgccccgtcgggcggcttcgccggctcgatcacctgcgcgctgttcctgcagcgcttcgtcgagcacgccaaaagttggctgcatgtcgacatctacggctggacgccatcggcgaagccggcgcggcccgagggcggcgagtgccaggccgcgcgggccatctacgcactcttgagcgagcgctatgcgtgatccaggacgcgatccaaggctgacgccggcgcggggcgacatcgccgcgaaataccttgaaggcaaggtgcaggctgatcgcttcgtcaccggcgaggaattcgaggtggtcgacgcgatcgcatcgctgcgcgagcagccgtcctcaagcgcgatgctgatgacggaggctctgcgcggtgagcgcgtcacggtctacgaccgcaacggcgagggctgggcctggggtcagctcggtggcgatggctatgtcggctggctgccggatgcagcattgatgaagccggcggctgcaccgactcacaaggtaagtgcacttcgcacgtttgccttccccggcccctcgatcaagctgccgcctgcggacacgctcgtgctcggctcaaggctcacgatcgtgcgcgaggaaggggtcttctcggtgacgcgcgaaggaacgttcctgccgaggacgcatctcgcgccgctcgaccggcgcgagtctgatttcgtcgccgtcgccgagcgcttcgtcggcacgccgtacttgtggggcggcaagagcagcctcgggatcgactgctcgggcctcgtgcaggtgtcgctgtcatcggcaggcatcgggtgcccgcgcgacagcgacatgcagctggccggcctcgggcgcgggctggagccggatgagcgcggcagcctggtgcgcggcgacctgatcttctggaagggccatgtcgccatcgtccgcgacggcagcaccatggttcatgccaatgcctatcatatggcgacggtcatcgagccgatcgagcccgcgatcgcgcggatcaggcaggccggcagcgaggtcgtcgcgatcaaacggctctgacggggcgctacgtcgccgccgcccagttcccggccgtctccagccggaacgcggcggcgaacagcgcacgcgtataatccgtcttcggattcttgaacagctcggcagcctggccttcctcgaccaccttgccgccgcgcatcacgatgagatggctggcgagcgaggcgacgacgcgcaaatcgtgcgagatgaacatgtaggtgagctcgcgcttgcgctggagctcgcgcaacaggtcgaccatttgcgcctggaacagcatgtcgagcgcgctggtcggctcgtccagcacgacgaaatcaggctcgagcacgatcgcgcgcgcgatgctgatgcgctgacgctggccgccggagaattcgtgcggatagcgatagcgggtgtccggctgcagcccgacgtcctcgagcgctttgaccacgcgcacctcgcgctcctcgcgcgacagctgcggctgatgcacggagagaccttcggcgatgatgtcggcgaccgacatgcgcgggctgagcgagccgaacggatcctggaacacgatctgcatgtcgcgtcggaacggccgcatttccttgaagcgcaggccctggatgtccttgcccagaaagacgatgcggccgtccgaggagatcagccgcaagagcgcgaggcccagcgtcgtcttgcccgagccggattcgccgaccacgccgagcgtctcacccttgcgcacggcgacgctgacgccgtcgaccgccttgatgtggccgacggtctttcgcatcaggccgcgcttgatcggaaaccagactttcagatcattggccgacatcaccaccggcgcgttcggttgcggcggcgccggatcgggtttcggctccgccgcgagcaggtcgcgggtgtagggatgtttgggagccttgaagacctgctcgagcggtccctgctcgacgatcacgccccccttcatgacgcagacggtatcggcgatgcggcgcacgatgccgagatcatgggtaatgaagagcaggctcatgccgagacgcgagcggatctcggcgagcagcgccaggatctgcgcttgcacggtgacgtccagcgccgtggtcggttcgtccgcaatcagcagatccggctcgttggcgagcgccatcgcgatcatgacgcgctggcgctggccgccggagagctggtgcggatagctcttcagccgcgtctcgggctcggggataccgacctgcgttagcaannnnnnnnnnnnnnnnnnnnnnnnnnnnnnnntggagatgtcgctgcctctgatctcacgcatctgctgctcggagcggtcgatcagctcctgccccttgaagcggatgctgcctgagggatgcgaggcattcggataaggcaagagcttcaggatcgaaagcgcgctgaccgatttgccggaaccggattcacccaccagcgcgacgcattcgccgcgcttgatctggaacgagaccttgtcgaccgcgagcgtggtggcgccgccctggtggaaggccacggaaaggtcgcgcacgctgagcaggggctggttgatcgcgtccatcggactacctgaacgtcttgcgcggatcaaaggcgtcgcgcacggcctcgccgatgaagatcaacagcgacagcatgatcgcaaccgagaagaagccggagaagccaagccagggtgcctgcacattggacttggcctgcgacagcaattcgccgagcgaaggcgatcccggcggcaggccgaagcccaggaaatcgagcgccgtcagcgtcatcaccgagctggacacgatgaagggcaggaacgtcatggtcgcgaccatcgcgttcggcagcaggtggcggaacatgatgaccgggttcgagacgccgagcgcccgcgcggcctgaatatactcgaaattgcgcccgcgcaggaactcggcccgcaccagaccgaccagcgagacccaggagaacagcaggaggatgccgagcagcacgaagaagccgggcacgagcaccgaggacaggatcaagagaagatagagcgaagggatcgcggtccagatctcgatgaagcgctggaagatcaggtcaacccggccgccgaaatacccctgcaccgcccccgccgcgatgccgatgacggacgagacgatggtgagacaaagtccgaacagcaccgagatgcggaagccatagatcaatcgcgcgaccacgtcgcggccctgatcgtcggtgccgagccagttgtattcgaggtcgcggcagctcttcagccccttcttctccaccaccggccgacactgcttctccgtcaacatccaggtcggcggcgacggtgccggcgtcggcaagtcgagattgtgagtatcgtaggaatagcggatcaggggccagacgattgtgccgttcttgtccttgatgagcttctgcaaatagggatcgcgatagtcggccgcggtttcgaagtcaccgccgaaggccgtctccgaataggtcacgaaggcgggccaatagagccggccatcgaacttgatcaggaagggccgatcattggcgatcagctcggcgaacagcgagatcacgaacaggctgatgaaaatccagaacgaccagtagccgcgccggttggccttgaagttctgccaccgtcgcctgttgagcggcgaaggcgcgaacggcttgcgcgtgatcggcaccgaaccgcccagaggcgatttcgccgtggtttcgatcggcgtccttggggcggccagcgtcatcagacctcccgcgcctcgaaatcgatccgggggtcgatccacatataggtcaggtcggagatcaggttgatcacgagaccgaccagcgaaaagatgtaaagcgtaccgaacaccacgggatagtcgcggttgagcacgctctcgaagctgagcagccccagcccgtccagcgagaagatggtctcgatcaggagcgagccggaaaagaaggcgtggatgaaggtcccggggaagccggcgatcacgatcaacatcgcattgcggaagacatggccgtacagcacccggttctcgctgcaccccttggcgcgcgcggtcatgacgtattgcttgcggatctcgtccaggaacgagttcttggtcaggaacgtcatggtggtgaaggcgccgagacccatggcgatcagcggcagcgtcagatgccagaagtaatcgacgatcttccagtaccagggaaagtccgaccacccgtctgacgtcagcccgcgcagcggaaaccagttgaagaacgagccgccggcgaacaggatgatgagaaggatcgcaaacagaaagcccggaatggcatagcccagcacgagaacggtcgaggtccaggtgtcaaggcgggtgccgtccttcatcgccttgcggatgccgagcgggatcgagatcagataagggatcagcgtcagccagatcccgagcgagatcgagaccggcagcttctccttgatgagctggatcacgctgacatcgcgaaaatagctcttgccgaaatcgaaacgggcgaaattccagaccatcagcgcgaagcgttccggtgccggcttgtcgaagccgaactgcgcttccagcttcttgatgaaatcaggatcaaggccctgcgcaccgcgatatttcgagttgatggcatcgcctccggcgccgacctgccccggcgcgcgctgcgcgaaatcgctgccgccggaaatgcgcgaggtgcccccggtgtcggcccccgagagctgggcgatgacgcgctcgaccgggcctccgggcgcgaactgcacaacgacgaaagacacaaagaggattcccagcagcgtcgggatcatcaggaggatgcggcgggcgatataggcgctcatggctatttcgcctgctcgagcttggccgccttggcaggctcatgccaccagatatcgggcgcaccgacgccgttggcatagcgcggcagcttcggcggatgaccaaactgatcccaataagccagccggtgcgtcttgttataccattgcggcacccaatagcggccggcgcggaacaggcgatcgaaagcgcggcaggcgacggtcagttcctcgcggctgtcagccgccatgatcttctcgatcatggcgtcgatcgccggattggcgatgcccgccaaattgtaagagcccttggtattcgcaacctgagacgagaagaacgagcgcatggcgtctcccggcgtcgccgacatgctgaagcgctggatcgtcatgtcgaaatcgaaatcatcctgacgcgcccggtattgtaccgcgtcgacgaggcgcacattggcttcgatgccgagcgtcgcgagattcttgatgtagggtgcatggtgcggctggaaggagggctcgtccaacaggaactcgatcctgaacacctcgccgttcggcagtatccgtttgccgtccttgatcgccacaccggcctcggtcagcaattgctgcgccttgcgcagcaggctccggtcctgcccggatccgtccgtgaccggcggcgtgaacggtgccgtgaagacgtcgtccggaaccttgccgcgaaacggctcgagcagcttcagctcttccggcgaaggcggcgcatcgcccgccatgaggtccgagttctggaaaggcgacaccgtgcgggcataggcgccgtacatgatcgtcttgttggtccactcgaaatcgaaagcgttgatcaaggcctcgcgcacgcgcgggtccttgaatttctcgcgccttgtattgatgaaccaaccttgcgcaccggacggcgtatcgtcgggcacgacctccatcttgacgcggccatccttcacggccgggaaatcatagcgtgtcgcccagaggcgcgaggtgaactcctcgcgatagagatagctcttgccggtgaagccttcaaaggcgacatcgcggtcgcgatagaactcgtagcgcacgacgtcgaaattgtagcttccgcggcaaggcggcagatcggcggcccaccagtccttcacgcgctcgaactcgatgtagcgattgacctcgaacctgccgaccttgtacggaccggagccgagcggaatatccagcgtcgattcatcgaacggccgggacgcatagtacgctttcgaaaagatcggcagcccggcaacatagagtggaacgtcgcgggcgcgtcccttggcaaaggtgacgacgagcgtcgcatcatcgatggcttccgcgctcacgaagtcacgcatctgcacgatgatcagagggtggcccttggccttcaaagtcgtcagcgaaaacgccgcatcatgcgcagtgagcttcgtgccatcgtggaatttcgcctccggccgcatcgtatagcgatagaccagcttatccggcgatatctgcacggacttggcggcaagaccgtacatcgcgtccggctcgtcgcttgcgcgcagcatcagcggcgaaaacgtcatgtccatgccttgcgcgccgtcgcccttcagaatgaaggcgttcagcgaattgaaagtctggtaggactggttgtaggcgcgcacggaggggatcagcgagaacgtcccgcctttaggcgccgccggattgacgtagtcgaaatggcggaaatcggcgggatatttgagatccccgaacgccgagatgccgtgcgtctcggtcgcggtttccgatgcacgcgcgctgcgcaacggcgcaccaatggacgccccgagggtgccgccaacgcccagggccagcacatggcggcgtgacatctgcgtcatgcgggaaacatccttcacgacttctttacgatccgtgccgccttgtctgcgtcgtaccaccagatgaacgggaagccggactgaccgtatcgtggcaattccgccggacggccgaagcgatcccagcgcgcggtgcgcaccttgttataggtccattgcggtacgacgtagtgattccacagcagcacgcgatcgagcgccttggtcgcggcgacgagatcatcgcgatcggtggcatagatcacccgctcgatcagcttgtcgatcgccggattcttgataccggcaatgttgcgcgagccggggatgtcggccgtcttggacgaccagaactcgcgctgctcattgcccggcgactgcgactcgccccatgaattggtgacgatgtcgaaatcccactcgcgcgtcctgttctcgtattgggtcggatcgatcgtccgcacgctcacggcaatgccgagtcgctccagcgaaggcttgtagaacagcgtgatccgctcgaagctcggatccgaattcagcagttccagcgaaaactgggtgccggtcttgacgtcgaccagcttgcgctcccgcacctcgtagccagcctctttgaacaggcgcagcgcctcgcgaagattctcgcgcaccgcttccggactgccgccgacgggattggtatacgccgtggtgaagacttcgggcgggacctgagcgcggaccgtctcgaggatctcgagctccttcccttgcggcagcccggttgccatcaggtcttcgatgccatcgaaatagctgctgatgcgcttgtactggccgtagaagatctgcttgttcatctcctcgaagtcgaacgcgtagttgagcgcacggcgcacgcgcgggtcgctgaacttggcgcggcgcaggttcggcacgaaggcctgcatcacgcccgagctgcgattgacgaattcctcgaggatcacccgcttatccgtcacggccgggaagtcgtaggcggttgcccagttcttcgcgctgttctcggtgcgccaatcgacctggtcggccttgaacgcctcgatcgcgacggtggcgtctcggaaatattcgtagcgcagctcgtcgaaattgttgcggccaacattcgcaggaaggtcgcggccccaataatccttgacgcgctccagtgcgatcgatcgtcccgcgacgaactccttgaccctgtagggacctgaaccgagcggcacttccagcgtggtggcggagacgtcgcgtttgcgtccctgtgcgtccgtcccttcccaccaatgcttcggcaagacggtgagctgcccgacgatctgcggcagttcgcggttgccaggggcatcgaagatgaacttgacgtcccgttcaccgaccttctcggccttcaccacatggctgtaataggccgagtacatcggatgatgcttcttgaaggattcgagcgagaagatcacgtcctctgcagtaactggtttgccgtcgtgccacttggcctgcggccgcaagcgatagatgacgaaggagaagtcgtccggatggctgacggcttcggccaatgcgccgtattcggtcgagacctcgtcaagcgagggtgtcatgagggattcatagatgaaggcaacggcaccggcgacctgccccttcacacccgagaccacgatgttgaaattatcgaacgtgccaaccgcgatctggcgcgcgatgccgcccttgggggcgtccggattgacgtagtcgaagcgcttgaagtcggcggggtacttgaccttgccaaatagcgacagcgcgtggcgccagggaagctcactgggagattgggcgtgcgctgggccgatggcgggaacgcccgcgacggaaccaaggacgggaagcgctgcggcagcagtgccggtgagcaggagatcgcgtcgggtaatggccaaatcaacatccctgtcttgaaggaggctactcctttaagtgccgaatataggcgaggtttcgaccgaatacgcgttgctttttcctcatcttggagggccggatggccgatccgatgcggccaaacgccccgatcacgtcccgcgaggtgtggataaggaaacggccaagcttttcagcctggccgccatccagatgggtttttcgcgccctacttcgacgccgtaggcaacggctgaggatgctccgacatcgagttcagataggcaatgatatcggcgcgctcggaatccttggcaatgccggcaaagcccatcgcggtaccgggaatgaagcccttgggattggcgaggaacttgttgaggtcgtcgaaggtccagttgccgcccttggccttcatggcagccgagaagttgaagccaccatggccctggcccttgggctcgccgacaacgccgaagaggttcggaccaacccgattcgggccgcccttctcgaaggtgtggcaggcgccgcacttcttggcggcggccgcgcccttctcgacggaggcggtctggagcagcttctcgatcggctcggacggcgcggccgctgcgccgccttccttgccgggaccggcctcctgcttcactgcgatctcgaaacccggtttttccggcatcttcggcgagaacagcgcctgggcggtgaagctcgtcaccagcagaacgaggcaggtgccgaacacggcaccgagaatcttgttgagttcgaaagagtccatttccggccaggccccaccgcaagaaggaaatagcggctcaagcggccgccaggacgagcctcgggagaatcaagcgttcctgattgtttccccgagttttgccattgagatatcggtttgcccggggtctggcaacccgtataagcgacccggctttcagaccgttcccgcgccatttccctgcgtggaaaacgccccgtttccaggctcttaacccgatgatcgatccccgcatcctggtgttgatcccggcccgcatggccgctacccgcctgcccggcaagccgctcgccgatatcgcgggattaccgatgatcgtgcatgtgctgcgccgcgcagaggccgctgcaatcggccgggtcgcggtcgcaacggacaccgcggagatcgcctccgtggtcaccgcgcatggcggcgaggcggtgatgacccgcaccgaccacccctcaggctccgatcgcatccacgaggcgatgcagaagctcgatcccgaaggcaaagcggagatcgtggtcaatctccagggggatttcccaaccatcacggtcgacaatatccgcgaggtgttgccccccctgcaagactcggccgtggacatcgcgaccctggcctcgcagatccacaccgaggaggaggaccttgctccgagtgtggtgaaggccatcggaacctcggtcggcggcaggcggatgcgcgcactctattttacccgcgcgaccgcaccgacgggggacggaccgcgttaccaccatatcggcctctatgcctatcgccgtgctgcgcttgagcgctacgtctcacttccgccgtctcccctggagttgcaggagaagctcgagcagctccgcgcgctggaggccggaatgcgcatcgatttcaccatcgtcgataccgtcccccgcggggtcgatacgccggcggacctggaaaccgcccgcagcatcctttccaattcctgagccgctgttacaaggccgatcatgagcaagatgaagatcgcattccagggcgaatccggagccaattcccacatcgccatcgtggaggcctatcccgaggccgagccgatgccctgcgccaccttcgaggacgcgctgtcggcgatctcgtcgggcgaggccgatctcggcatgatcccgatcgagaattcggtcgcaggccgcgttgcggacatccaccacctcctgccggcctccggcctctacatcatcggcgaatggtttttgccggtccggcatcagctgatggcggtaaagggcaccaagctcgaagacatcaggagcgtcgagagccatgtgcatgcgctcggccagtgccggcgcatcatccgcaagctcggtatcaagccgatcgtgcacgccgacaccgccggcagcgctcgtgacatctccgagcgcaaggacaagacggtggccgccatcgcctcgcgcctcgccgccaagatctacggtctcgacatcctcgccgaggacatcgaggacgaagcccacaacaccacgcgcttcgtggtgctggcgcgcgagccgaaatgggccacccaaggctccagcccgctggtcacgacgttcgtcttccgggtgcgcaatctgccggccgcgctctacaaggcgctcggcggtttcgccaccaacggcgtcaacatgaccaagctcgaaagctacatggtcgacggcaatttcttcgccacgcagttctacgccgacgtcgagggtcatcccgaggacaagggcctcgcttttgcgatcgaggagctgaaattcttctcgcgcgaattccgcatcgtcggcgtgtatccgggccatccgttccgcgcgacgttcagcgagacgcaggactgattgcgtgtcccggacgcgcgaagcgcgagccgggatcgagaagccgcaagccccggagagcgatggacctcgactcggcagcgcgccggcgaaggggagctgcgtcgcgtccggagcgggaggagcccctctaagccgcgctcttggcggccccaaaggcctccgcgagcagcgagtaggacttcttccgcgcctcatggtcatacacggccgtgatcaccatgagctcgtccggcttgcttgcgaaaatcagcggctgtagcttcttctgcaccgtcgcagggctgccgacgaagaggcgcgagcggttgcgcaggatcgaggcgcgctcggaatccgtatatggataggccatcgcctcctccacgctgggcaggggaagatactgcccgcggtcacgacgaaggcggttgaggtcgaaggaagaggcgagtctttctgcctcctcgtcggtatccgccgcaatgacggcgaccgcaagaatggcatgcggagtcgcacgccaggctgagggctgaaaacgattgcggtaatgcaccatcgcatcgatcgcgtcgtgggacgcgaaatgatgggcgaaggcgaagcccatgccgacctgggcggccagctcggaggaatagtcgctggagccgagcagccagatcggcggcagttttgtatcgtcgggcatcgcgacgacggtgttgtagggatggcccgccgggaattcgcgggtctcccacaagatcaactcgtgcagccgctccaggaaatcgtcaccctcgcggcgatcaagccggctgcgcagcgcgtaagccgtggcgccatcggtgcccggggcgcgaccgagaccgagatcgatccggccgggaaacagcgcctccagcatcttgaagcgctcggcaaccacaagcggggcgtggttgggcagcatgaccccgccggagccgacgcgcaggtgcttcgtcaccgccgcgatctgcccgatcatgacatcgggcgcggggctcgcgaccgaggcgaggttgtgatgctcggccagccagtagcggacatagccgagcccatcgacatggcgcgccagatcgatgctgttgcgcagcgccgcagcgggcttggtgccggtggtgacgaccgagaggtcgaggactgagagcggaatcatggcgcgttaacgtaatgaaggcccgcgcggcggcaatgggcagcctgcgcaggcctgacgtgtatgaacctgcgagcaatgctgaagacctcagttgggacaatcgattcagaaaagcaatctgattattctgcccacttcgaaaccagaagccaaggatctcgaaatctcgggcatttaagttactctgctatcgaacacccttcccactcccgcttcatcaaccaactcagaccgtttaaataacgccatagtgggcaatttcccatcttcgatgggctgtcggcgattcttcctttgccgtatcttaggctctccaaggtagaccccggccgccgcctgaatggagtgagtggtgccatgactgacgtgacgacgcctgtgacagccaacgggcacctgaagcggcctgcgatctccttcgaattctttccgcccaagaccgaggagatggagcgcaatctctgggagaccatcaaccggctggctccgctcgagccgaaattcgtctccgtgacctacggcgccggcggctccacccgcgagcgcacccattccaccatcgcccgcatcctcaaggagaccgcgctgctgccggccgcgcatctgacctgcgtcggcgccgcacgcggagagatcgacgagatcgtcgaccgctatcacgaggtcggcgtccgccacatcgtggccttgcgcggtgatcccgtcggcggcattggcacgccctattcaagccatcccgacggctaccagagctcggccgagctcgtcgccggaatcaagaagcggcatggcgacatcgaaatctccgtttccgcatatcccgagaagcatcccgaggcgcgcgacttcgacgccgacatcgacacgctgaaggccaaggtcgatgccggcgcgacccgtgccatcacgcaggtgttcttcgataacgacctctacttccgctatctcgaccgcgtccgcgcccgcggcatcgacatccccatcgtgccgggcatcatgcccatgcacaacttcaagcaggcacgcaatttcgtcacccgcgccggcaccaccgtgccggactggttcgccgcgaagttcgagggcctcgacgacgacgccgagacgcgcaagctggtggccgcgaccgtggcggccggccaggtgcagaagctcgccaagcacggcgtcgacaccttccatttctacaccatgaaccgcgccgatctcgtgttcgcgatcagccatttgctcggcattcgcgccaagagcgcccagaaggctgcgtaacagaaaaatgaccgtaaccacttcgcccaagcgaaccgccctcctcgctgccgcccgcgagcgcattctcgtgctcgacggcgccatgggcacgatgatccagaacctccagcttgacgaagctgccttccgcggcgagcgcttcaagaacttccaccgcgatctccgcggcaacaacgacctgttgatcctgacccagccgcaggcgatcgaggacatccacgccgcctatctgcgtgccggcgccgacatcgtcgcgaccaacaccttctccacgacctcgatcgcgcaggccgattacgatctcaccgacatcgtctacgagatggcgcgcgaaggcgcccgcctcgccggcaatgccgcgcggcgcgtcgaggcggaagacggcaagccgcgcttcgtcgccggtgccatcgggcccaccaaccgcaccgcatcgatctcgcccgacgtttccaatcccggctatcgcgccgtcaccttcgacgacctacgcaaatcctatggcgagcagatccgcggcctgatcgacggcggcgtcgatctgctgctggtcgagaccatcttcgatacgctcaacgccaaggcggcgctctatgcgatcgccgagatcaccgaggagctcggcatcgacatgcctgtgatggtctccggcaccatcaccgacaagtccggccgcctgctctcgggccagatgccggaggcgttctggaattcggtgcggcacgccaagcccatcaccatcggcttcaactgcgcgctcggcgccgaggacctgcgtgcccatattgccgacatcggccgtgtcgccgacacgctggtgtgcgcctatccgaacgccggcctgcccaacgagttcggccagtatgacgagacgcccgaatatatggcgcgcctgatcgccgagttcgcctgcgacggcctcgtcaatatcgtcggcggctgctgcggcaccaccccggaccatatcgcggcgatcgcggctgcggtcgccccgcacaagccgcgcatggtgccggaaatcgagccacgcctgcggctctccggcctcgagcccttcgtgctgacggatgcgatccctttcgtcaatgtcggcgagcgcaccaacgtcaccggctcggcccgcttccgcaagctgatcacatcaggcgattacaccgccgcgctgcaggtcgcgcgcgaacaagtcgagaacggcgcgcagatcatcgacgtcaacatggacgaggggctgctcgactcggaagcggcgatggtgaccttcctcaacctcgtggccgccgagcccgacatcgcccgcgtccccgtcatggtcgattcctccaaattctccgtgatcgaggccggcctgaaatgcgtgcagggcaaaccggtcgtcaactcgatctcgatgaaggaaggcgaggagaagttcatccttgaggccaagatcgcccggcgccacggcgccgcggtcgtggtgatggcgttcgacgaggtcggccaggccgacacgttcgcgcgcaagaccgagatctgcaagcgcgcctacgacatcctggtgaacaaggtcggcttcccgcccgaggacatcatcttcgatcccaacatcttcgcgatcgcgaccggcatcgaggagcacaacaattacggcgtcgacttcatcgaggccacacgctggatccggcagaacctgccgggcgcgcatgtctccggcggcgtctcgaacctgtcgttctcgttccgcggcaacgagccggtgcgcgaggccatgcactcggtgttcctgtatcacgccatcaaggccggcatggacatgggcatcgtcaatgccgggcagatgatcgtctatgacgacatcgaccccgagctgcggcagacctgcgaggacgtcgtcctcaaccgcgatcccggcgcatccgagcgcctgctcgcgctcgcggagaaattccgcggcaagaagacggaaagcaaggaagcagatctcgcctggcgcgaatggccggtggagaagcggctgtcgcattcgctggtgcacggcatcaccgagttcatcgagcaggacaccgaggaagcccgcaagaagtcctcgcgcccgctcgacgtgatcgagggaccgctgatggccggcatgaacgtcgtcggcgatctcttcggcgacggcaagatgttcctgccgcaggtggtgaagtccgcccgtgtcatgaagcaggcggtcgcttacctcatgccgttcatggaggaggagaaggcgcgcaacctcgcgaacggcatcggcacggagggctcctcgtccgcgggcaagatcgtgctcgcgacggtcaagggcgacgtccacgacatcggcaagaacatcgtcggcatcgtgctccagtgcaacaatttcgaggtcatcgacctcggcgtgatggtgcccgcggcaaagatcgtcgagaccgtgaaggcagagaaggccgacatcgtcgggctgtcgggcctgatcacgccctcgctggacgagatggcgttcttcgccggcgagctgcagcgcgagggcctgaagctgccgctcctgatcggcggcgccaccaccagccgcgtgcataccgccgtcaagatcgacccgagctatcgcgccggaccggtcgtgcacgtcaacgacgccagccgcgccgtcggcgttgcctccgcgctgctctcgccggagaagcgcgaggcctatgccgccgaggtgcgcgccgaatacgccaagatctcggaagcgcatctgcgcgcgcaggccgacaagaagcgtctgaagctggccgacgcccgcgccaaccgggtgccggtcgacttcgccaagagcaagccggtgaagccgaccttcctcggcatcaggagcttcgacgagtacgatctcgccgagctcgtgccgtatatcgactggacgccgttcttccagacctgggagctcgcgggacgcttccccgccatcctcgatgacgccaaggtcggcgaggtcgcgcgctcgctctatgacgatgcgcgcaagatgctcgacaccatcgtcagggagaaatggttccgggcgcgtgcgacgatcggcttctggccggccaatgcgcaaggcgacgacatcgtgctctatgccgacgagagccggaccaggccgattgcgacgctgcacacgctgcgccagcagttggagaagcgcgagggccgcttcaacgccgcgctctccgacttcatcgcgcccgccggcattcccgactatatcggcggcttcgtcgtcacggccgggatcggcgaggatgccgtggccgaccgcttcagaagcgccaatgacgactattcctcgatcctgtgcaaggcgctcgccgaccgcctcgccgaggcgttcgccgaacgcatgcatgcccgcgtgcgccgcgagttctgggcctacgcgccggacgaggcgctctcgagcgaagagctgatcctggagaagtaccaaggcatccgccccgcgcccggctatcccgcgcagcctgatcacaccgagaaggcaacgctgttcgagctgctcgatgccgagaccacggccggcgtgaagctgaccgagagctttgcgatgtggccgggctcgtccgtctccgggctctatttcgccagccccgagagctattatttcggcgtcggcaagatcgagcgcgaccaggtcgaggactacgccgcgcgcaagggcatgagcattgcggaagccgagcgctggctggccccggtgctgaactacatcccctcgcaacaggacaaggccttcgcggcaacgcctgcgaatgacgagccgtcaaacgacctcgcctcgcatccgccgggctgcacctgcgcggtgcacctcgtctggcagaagaagcgcgccggggtgggataggcgcgccgaaactcaaagctcgaaaacaaccccatgcacagtagcgatggggttgaaaaggccggacaatttcggccttgccgaaaaacgcgttgcggcgtcgggcaaaacaggggtagtattgcatcatcgggctgccacacgcggtgacacaaaggcggcggatgtaccctcccacatgcacgatgcccatcctcccctggagggggaggaacggttcgtgtgcagcgaagcggaatgcggaccgaggtggggtgacggtctctccgcggagcgctgcccgtgtggagagatcaccccacccgctcgcgcttcgcgcgatcgacccaggggagggtaagagccctcatcccttcggcggcgccagcggctgcacgatctcctggaacggggccaatgcctcgcaacgttcggcatgtgccgcaagcgcgggataacgtgccgcgtcgaacagctgcggatgcgcctcgcgggtgaagcggacgacgcaggcgaccgcgacgtcggcatggccgatgcggccgcccagccaatacggcgtcgtcacccccgcgcgctcggcttccagcaccgcgagcacatccgcgatctgcgcctgacaccgctcgacccacagcgcgagctgctccttccgcagcacgcgctcgtagagcaggctcaccgccttgtcgccgaggccggaggcgagcgcgcagatgcgcaagtgtctgcgtcgatcggcgccgccgcgcggcagcatcgcctggtcgggaccaacgagctcgtcgagataatcgaggatgatcgtgctctcgatcagcgcctcgccgtcgtcgagcaccagcgtcggcacgcggcgcagcgggttatagggcgcgatcttgtcggcatcgccgaaggtcgaccacggcctgtgctcgaaggagatgccgtaaagcttcagcgcgatcgcgacgcggcggacgaagggggaatcatattggccgatcaggaacatggttctcgctcttctcagtcgttggacgaggcaggccgatcagtctccacgaccagctcgtcgcggcgcaacaagaatctcggaaatggagcattgcaccggctgcaacgacgcgcgacggcctgacgcgcgacacgctcaaaggccgtcctggatcgagcgcttgatggctgcgatggcggtctcgttgcgcttgtacatcgtccactgcttgatccgcttggcgcgcaccagcttggctgatgtcagcacccgcatatgctcgctcaccgtcggggcgctgacgcccagcttttcggcaatcagcaagccgcaaacgccgtcctcgaccaggtcgccatcggcctgctcgcgaaaatgcttccgcggatcccgcagccattccaggatctgcaggcggcgttcgttggcgagcgcgcgcaaggcaacggcaaatttcatttagccattttgctaattacctaattgatgtcaacgtttccttgcggtatcctggacggcatcatgacagcgacaatggacatcacgcgggagcggattgcggcgaccgaagccctcatccgtccgcatatcaggcgcacgccgctgcttcgggccgatctctccgatttcggcctgccggccgcacccgtcactttcaagctcgagatgctgcagcattccggatcgttcaaggcgcgcggcgccttcgccaacctgctgctgcggcaggtgccgcaggccggtgtcgtcgccgcatccggcggcaatcacggcgcggctgtcgcctatgcggcgcagcgactcggcattcccgccacgatcttcgtgcccgacatcacctcgccggccaaggccgagcggatcaggacctacggcgcaaagctcgtgatcgcgggcagccgctacgccgatgcgctcgccgcgagcgaggcgcacgtcgcgcagaccggtgcgctggccgtccatgcctacgatcaggccgaaaccctgctcggccagggcagcgtcgggttggagctggagcaggacgcgccccgcatcgacacgctgctggtggcggtcggcggcggcgggctgatcggcggcattgcggcgtggtacgccggcaggacacgcatcgtcgcggtcgagccggagcaatcgccaaccctgcacgccgcgttcgaggccggcgcgccggtcgatgcgccggccggcggtctcgccgccgacagccttgcgccgcggcgcgtcggaggactgatgtttccgctcgcgcgcgcccatgtcgagcgcgtcgttctggtcagcgacgatgcgatccggcaggcccaggccgcgctgtggtcgcacttgcgcctcgtggccgaacccggcggcgcagccgccttcgccgcggtgctctccggccgctatcgtccctcacccaccgagcgcgtcgcggttctggtctgcggcgccaacaccaatgcggtgcatttcgatagttgattgggaatggcttaaaggcaccacgcggactgatcctgaagtttggccgcaccgcgcatcggatcggcggaaggaggacggcacctcacgtgtcattgcgagccagcgggtccgcgcaggtgcgggaccgatgacaggctccgcgaagcgatccagaatctttccgcagagacagcctggattgcttcgtcgcaagagctcctcgcaatgacggcggaaagagagacgcacatcactcgatgatcggcacatgccgcgccgcgtcccgcggcacggtgccgtcgaggcgcgggtcgtcggcgatctcgatctggcggcggaacgcgcggaagccggagcgctgatagaacgcgacggcggaaggatggtcgagcgtgcaggtgtggacccagacgcggcggacgtcgcgtgaccacgcaatctccagcgcgcggttcatcaggaagcgggcggcgccggtgccgatcaagggggcggtgacgccgaaataggtcagctcgcactggccgggctggcggaagtccagctccagcaggccttcgtcgcgaccgtcgaggacgagggcgtagacctcgattccaggcgcgtggatgatcgcagcgagctcggcgtcagtcatgcgggcgcgcgagaaccacagccagtcctcgccgacgcggcggaagatgtcgcggtaccagggaagcgcgggcctatcgaccttgcgcagggtccaggtgccggggggatcgtcgcggcgcggagggggcgcggtcatctccagatgagtgacgattgcggcgatcttgccggcggggacgtcggaatagccgtcggggaggatcatggtccgttgcttcctttcgcaatgagaaagtgggcgacgccgtaagaaacgacagcggcgccacactccgtcattgcgagcgaagcgaagcactccagggtctttccgcggaggtagtctggattgcttcgtcgcaagagctcctcgcaatgacgacggaggcagttgcgcgcgcatcgcgacagcggtcccggattgcgctgcgctccatcctggctacgacatttgcccctacccctccccctcgtcgctcgccagcacgcctttcaccgccctcgcccagcccgcgagcttccgctccctcgtcgccttgctcatgttcggcttgaagcggtgctcgaggcgccagttgtcggcgaacctggtcggctcgggatagacgccggcattgaggccggcgagataggcggcgcccaacgccgtggtttcctggatgacggggcgatcgaccggcgcatcgagcagatcggcgaggcgctgcatggtccagtcggaggcggtcatgccgccgtcgacgcggagcacgacgctggcggtttccgagctcggccagtccgcgcgcatcgcggcccagaggtcgtaggtctggtagcagacgctttccagcgcggcatgggcgagctcggcggggccggtgttgcgggtgaggccgaacagcgcgccgcgcacgcgcggattccaatagggcgcgcccatgccgacgaaggccgggacgagatagacgctctgcatggaatcggactggtcggcgagaggtccggtctcggcggcgtgcttgatgatgccgaggccgtcgcgcagccattgcaccgccgatcctgccacgaagatcgagccttccagcgcgtaggtgcgcttgccgtcgagctgataggcgacggtggtgagcagcttgttcttcgacacgaccggcgtggtgccggtgttgagcaacgcgaagcagccggtgccgtaggtggacttcatcatgcccgggcggaagcaggcctggccgatggtggcggcctgctggtcgccggcgatgccggagatggcgatcgggccgccgaacaggtcgggcgtgctctcgccgaagcgcgcggaggaatccttcacctcgggcagcatcgagcgcggcacgccgatgatctccagcagctcgtcgtcccactggccggtgtggatgttgaacagcagcgtgcgcgaggcattggtggcgtcggtggcgtgcaccttgccgccggtgaggcgccagagcaggtagcaatcgacggtgccgaacatcaattcgccgcgcgcggcgcgcgcgcgggcgccgggcacgtggtcgaggatccatgcgactttcgttccggagaaatagggatcgatgatcaggccggtcttctgcgagatcacgggctcgcggccgtcggctttcagcctggcgcagatgtcggcggtgcggcggtcctgccagacgatggcgcggtgcacggcctggccggtggcgcggtcccacaccacggtggtctcgcgctgattggtgatgccgatcgcggcgatgtcctttgcgccgatgccggcctgcgcgatggcctcccggcagaccatcacggtcgaggtccagatgtcctcgggctcgtgctcgacccagcccgaagcggggaaatgctgcgggaactcggcttgcgccttcgccgcgatggaaatgtcgccgcgaaacacgatggcgcgcgaggaggtggtgccctggtcgatggcgaggacgaaagacatggcagggtcccttggcgtgtttccggaaaggtcgttatgtcgggcagagaaaacgggattgcgttcgacaggtcaaggcggactgcctcttaaccctccccggagggggagggtcggctcgcatggagcgcagcggaatgtgagacggggtggggtgacagaccctccccgagtgatccccctgtcgtgtgcgcgcagcgcttcgtcgatccggtgagactaccgttgtggcctcaccccgccccgcgctccgcgcggacgcccctccccctcaagcggagagtcaggaacaccagactaggaccaacgccgccgaaatgctacatgcctcgccgggcaagacggggcggcatgacgtttacttcgtatcagttcggcgtcttcgtcgccgtcgtgttcggcgcctattacctgccgcctttgcgccgtttccaggtgcagctgctcgtggccgccagcgtgttcttctacggcttcggccaacccgaactcctgccgctgctgctcgtcgcggtgctcggaacgcatatctgcctggtgctcgcgttcgagaaccgaaccgtctggatgccggccggcatcgtcttcaatctcggcctgctggcgttcttcaagtacaagctcctgttcgtcgatgccggtgccgccgctctgaccggcgtcgcgccgctcgatttcctgctgcggctgccgctgccgatcggcatctcgttcttcgtgttccacaacatcagcctgctggtcgatctgacgcgcgagaagcgcaccgtgcccctgcgcgacgtcttcctctacatcatcttcttcccgcagctggtgtccggaccgatcacgcgcgcggcccagttcatgccgcagatcgtgcccaagcggatcaacgacgtcgccttcgtcgaggccgcgaaatggattctcgtcggctacttcttcaagctgtatgtggcgaacaatctcaacgagatgacgtcctacatggacttccctctctacgagacgctgcgcacgcaggaccgctggctgctcgtattcctctacagctaccagatttacgccgacttcttcggctactccgcgatcgcgctcggcctcggtctcttgttcggctaccgcctgcccgtgaacttcaacctgccctacatctcgacatcgttctcggagttctggacgcgctggcatatctccctgtcgacctggctcaggacctatctgtacattcccctcggcggcaaccggcatggcgtggggcgcacctatctcaacctgatgatcgtgatgacgctgggcgggctctggcatggcgcgagcctgagctacgcgctgtggggcatggcgcacgggctgctgctcgtgatcgagcggccgttcctgaagcttatcggcaaccaaagccctgcggtgcgcgtgatccggatgggaatcgtcttcttctgcgtcacgatgctctggatcttcttcaagctgccgaatttcgatcacgcgctcggctacctccaggggatgttcatcgcgaccgacgcccccaatccgccaaaactgttcaccaaccttgccctgctctacgccttgccggtgatcatccagcatatcggcatcggcgcgctcgtcgacggccggttgcggcgatgggagccatatctctatggtgcgctcgcggcgctcgcttacctcgaggcggggcccgacagcgcgttcatctacttccagttctgacatgcggcaggaaccgacgctttcgtggatggtcaagtgtgcttgcgtcgcggcggcgctgctgctcgcctgcggcctcgccaccgcgcgcttcggctcggcgctgcaacagccggccgtcatcacccgcgacggcagcctcgtcaccctcaaccgctacgtgcgggagcccacgcctgacatcgtgctggtcggcagctcggtgacgtggcgtctcaaggaggagtatttctcgctgccccgcgtccgcaatctggcgctggccggaggctcgccggtgaccgggctcgagatcgtcgccgggcaggcaagcctgcccagggtcgtcctgatcgagacgaacatcctttcgcgcgaggccgaccgcgcgctgaccgaggcattctcaggcggcgcgcgcgcggacgcgctgctgctacgtccggtgcgaacggcggtcgcggcctatgaaacctggaatcacgccgcccgcgatgccgtccaggcccgcgccgggcacgatcgcctgctcagccagccacctgatacattcgacagcaagatctatctcgaccgcgcgcgggagcagatgaacgacggtgatccgaccgcgccggcacgcgcgaatgcggtccgcatccgacgagtcatcgacgatctgcaacggcgcggcagccaggtcttcctcatgcacgtccccttcgcaccggagatcgaggacacgcgcctggttcgaacgacacgggagatcgccagcgaagccttcccggatcgcgcgctttggctgcgggtcgagccgccgatgggcgaactgcgctgggccgacggcgtgcatctcgatgaacgatcggccttgatcgtcgtccgcgtcatggaaagtatactggccgcgcgagacggcacgcgccgttgatagaggccccctgcggctggagccctgcccgttccgctacaatcggaacgaggctctggattcttgctttgtcgcgttctctcgacgcgagcctgtatccgcttcgctcgaaagcgctccaaggctgaatggctccagctcgtatcgattgccgcgggtcgttcacctctgccgcttgcgggagagggagtgcacctccgccgctgcatcgatcaaccctcatcccgtcatgttttagaccgccgccgtcgtcacgccgccgtcgatgacgatggtctggccggtcatgaagctcgaggcgtcggaagcgagataggcgacggccccggcgatctcgtcgggttcgccgatgcggcggagcggggtggtggcggtgcggcgcttcaaattggcttcgtcctcccacagcgcgcgggcgaaatcagtcttgacgaggccgggggcgatgcagttgacgcggacacccttcggtccccattcgccggcgagcgagcggcacagcgcgaaatcggcagccttggagatgccgtaggcgccgatcacggtggagccgcgcaagccgccgatcgaggagatgatgatcaccgagccgttgccgcgctcggccatttgcgggatcgccagcgcggagagccagatgttgctcttgacgttcgagcccatgatcttgtcgaaggcttcgtctgtgatgtcgagcagcgggccgtaatacgggttcaccgcggcgttgcagacgaggatgtcgatcttgccgtaatgcttggtcgcgcccgcgatcaacgcctcgacctcgttcttgcgcgcgatgttgcaggggatgacgatggcgtcgccgccggccgcattgatgccgtcggcgacctccttgcaggcatccgccttgcgcgaggagaccacgaccttggcgccgagcctggcgagcagttcggccgacgagcggccgatgccgcggctggagccggtgacgacggcgaccttgccggtgagatcgaacggggtgtttttcatttgttattgcctcgctgcgccaacggcgccgtcattgcgaggagcgaagcgacgaannnnnnnnnnggagctatcagatcaacccgcccgcgtccgcgacgcggcgctggtggtagtcggtgtcgccgaagctgttctcgatcatggtgaggcgcttgaagtagtggccgattctggcctccatggtcatgccgatgccgccgtggagctggatcgattgctggccgacgaacttggccgacttgccgatctgcaccttggccgcggcgatggcgttcgtgcgctccttggcgtcctcgaaatcgcccgccatggtcgcgaacatcgacatcgagcgggcctgctcggcggcgacgaacatgtcggacgcgcgatgctggaggctctggaacgagccgatcgcaacgccgaactgcttgcgggtcttgatgtactcgaccgtggtcttcagcgactcgtccatcaggccgaccgcttcggcgcacagcgcgatgcgggcctcatccaccacgcgctcgatcagcgcgagcgagtcctcgggattgccgagaacggcgtccgcaccgacctcgacgccggtgaaggtgatgtcggcagcgtgcagaccgtcctgggtgggatagccctttctgccgacgcccttggcattgccgggcacaaggaacacgccgatgccgcttctgtcgcggcggtcacccttggtgcgcgcggtgacgacgagcgtgtcggcgctctcgccgttgagcacgacgaacttctcgccgtcgatcacccagccgtcgcccttcttcttcgccgtcgtcgagacgtcgaacaggtcgtagcgcgagttcttctcgagctgggcgaaggcgagcgtcttgctgccgtcgatgatcccgggcacgtgcgccgccttctgcgcgtcgctgccggcatggcgcaggaagccgccgccgatcacgaccgtggcgagatagggctccagcaccagggccttgccgagcgcctccatcacgatcatggtctcgacaccgccgccgccgaagccgccatcggcctccgcgaagggcaggccgagcaggccctgctcggcgagcttgagccagacggccttgctccagccgcccttctccttcatgtacttcttgcgctgctcgaaatcgtaggaatcggtcagcaggccgtcgatgctttccttgagaagccgctgctcctcgttcagatcaaaatccatgtttctctactctcccggtatctgatttcgtcatgcccggccttgagccgggcatccacgtttcgtgccgctgggcgtggaggccgggtcaagcccggccatgacggcgcgtgcgtggcggtgatatgcaatcacagccccagcaccgccttggcgatgatgttgcgctggatctcgttggagccgccgtagatcgagaccttgcggttgttgaagtagctcggcgcgatctgggcggtccagtccatggcttcgttcgagccgtcgtcgccgtgcacgtcgtatggcgcggcgaacgggccgatcacttccatcagcagctcggtggtggtctgctggatctccgagcccttgatcttcagcaccgaggaggccggattgggcttgcccttgccgtgcttgccttcgtcggcgacgacgcggagctgggtcagctcgagcgccttcagctcgatctcgcaggccgcgagcttctcgcggaaggcaggatcctggatgatcggcttgccgccggcctcgaccttcgacgccagatccttgatgcggcggatgcgctccttggagacgccgacgcgggcgatgccggtgcgctcgttgcccagcaggaacttggcgtagtcccagcccttgttctcttcgccgatcaggttctcgatgggcacctcgacgtcgtcgaagaagacctcgttgacctcatggccgccgtcgatggtctggatcgggcgcacggtgacgcccttggacttcatcgagaacacgatgaaggagatgcccatctgcttcttggcgttgttgtcggtgcggcagaggcagaagatcatgtcggcgtgctgggccagcgtggtccaggtcttctggccgttgatgatccacttgtcgccgcggcgctcggccttggtcttgagcgaagcgaggtcggagccggagccgggctcggagaagccctggcaccaccaatcgtcgacattggcgatgcgcggcagatacttcttcttctgctcctcgttgccgaaggtgtagatgaccggcccgaccatgctgacgccgaaagcgagcggctgcggcgcgggatgggcctggagctcctcgttgaagatgtagtgctgcacggccgtccacccggtgccgccatattccttcggccaatggctgacgccccagcccttcttgttgaggatgcgccaccacgtcaccatctcgtccttcgacagatgacggccctcgaccatcttgcgccgcgtctccggcggcacgttgtcgcggaagaactgccgcacttcctcgcgaaacgcctgctcttctttcgtgaatgcgagatccatcggatcctcctgtgaaacgttattccctattcgtcattccggggcgcgcgcagcgcgaacccggaatccggagatcgtggctcgaggttccgggttcattcgctgacgcgaatgcccggagcgacggagcccactactgcagcacctcgaacagccccgccgcgcccatgccgccgccgacgcacatggtgacgaccgcgtacttggccttgcggcggcggccttcgatcagggcatggccggtgaggcgcgcgcccgacatgccgtaggggtggccgaccgagatcgcgccgccgtcgacgttgatcttgtccgggtcgatgccgagcttgtcgcggcaatacagcacctgcaccgcgaaggcttcgttcaattcccagagaccgatgtcgtccacggtgagaccgtggcgcttgagcaggcgcggcacggcgaagaccgggccgatgcccatctcgtccggctcgcagcccgcggagacgaagccgcggaagatgccgagcggcttgaggccgcgcttcgaggcttccttgtcgctcatgatcacgctggcgctggcgccgtcggagagctggctggcattgccggcggtgatggtgaagccttcgccgcgcacgggcttgaggccggcgaggccttcgatggtggtctcggggcgcggaccttcgtcctgcgacagcgtgatctccttcatcgacacggcgccgctggccttgtcggtgaccgccatctgcgtggtgatcggcgcgatctcgtccttgaacctgccgccctgctgcgcagcggccgtgcggcgctggctctccagcgaatattcgtcctggcgttcgcgcgagatgccgtagcgcttggcgacgacctcggcggtgtcgatcatgggcatgtagacctcgcccttgatcttgagcagcgccggatcctgggcgtggaagccgttcatcttgtcgttctgcacgaggctgatcgactcgccgccgccgccgaccgcgatctcgacgccgtcgaagatcaccgagcgcgcggcgagcgcgatcgcctgcaggcccgaggcgcattgccggtcgatcgtggtgcccgcgacggtgacgggcaggccggcgcggagcagcgccttgcgggcgatgttgccgccggtcgcgccctgctggagcgctgcgcccatcacgacgtcctcgacctccttcggatcgatcttggcacgtgcgacggcttcgccgatggcgtggccgagcagggtcgcgccctcggtggcattgagcgcgccgcgataggccttgccgatcggggtgcgggcggtggaaacgatgacggcgtctgtcaagaacgaactcctgatgcggttttgctggattgtgatggtttctgctgctggcgcaattcgtgccgcgacaattttccgaccggcgtgcgcggcagatcgtcgacgaactcgaccgccgccggcagttcgtgcttgccgagcttgccattgagctgcgcgcgcagctcgtcgagcgagaacggccttgcgtcgggcctcagcttgatgaaggcctttgcggcctcgccccgatactggtcggggatgccgagcacgatgacctcgtgcacgccgggaatggtgtagatcgcctgctcgatcatctgcggataaacgttgaagccgccggagatgatcatgtccttcttgcggtcgacgaggaagaaatagccgtcttcatccatgtagccgatgtcgccggtgaggaagcggccgtcgatgaacgcgtccgccgatccttccggcttgttccagtagcccctggtgacgttcggccccttgatgcggatctcgccgacttcgcctggcggcagcacctttgtcggattgtcgagtgcgacgacgtcgagctcgatgcctggcagcatcaggccgatcgagccgggcttgtccggccccgtgggcggatggccggtgccgggcgagcaggtctcggtcatgccccagccgctcttgagcttcttgccgaccttgcgttcgaagaagctcgcgatctccaccggcagcggcgcgccgccggagccgatcgtggcgagggaagagaagtcgcgcttgtcgaggtccggcagcgcggcgatcgcgatccacatggtcggcacgccgggaaaatacgtggcgcgcttgatttcaatgtcgcgcatgacagcttcgacgtcgaagcgctggtgcagcgagatcagatggccgcggctgagcgaggacaggagcacgacggtcagcgcgtagatgtggaacagcggcagcacgcagatcacgcgttcaatgacctcaccgcgcgcggcgcgcgatggcttgccccagacgtcgtagatcgagacggcggaggtgagattgccgtgggtcagcatcgcgcccttgggcaggccggtggtgccgccggtatattgcagcagcgcgacgtcgtgggccgtgacttgcggccattccgccggcgcggcggcgccctcgacgaaggccttgaaggtcacgatgcggggatcatcggggatcgccgcctgcggcgtgccgatcctgccccaatgatcgtcctcgcagacgacgagacgatcgatcagccccttctccaggaatttcagcgcggtcggcagcagcgcctggaggttcgaggtgacgagcaggcgcgagcctgaatcggagaccttgtgggtcagcgcgatctcgccgtcgagcggcgacagatgcgcgacgcgggcgccggccttgagcgcgccgaagaaattgacgggatggtccggcgtgttgccgaggaacagcgcgacggaagagttcttgccgcaaccggcgcgcaggaacgccgcagccgcgcgctcggccatcgcggcaagctcggcataggtgatcggacgatcgcggaattccagcgcggtgcgcgggccgtactcggcggcagctttcgacaagaggtcagggagcgtgccctggacgattgcgtcgtcccaacgcacgccctcggggtaaaactgttcgccgggatgggtcattctctgcatcacaatcggtcgtcattccggggcgatgcgaagcatcaaacccggaatccatcaggcagcgcacgcaaaggcgaaatggattccaggcccggccctgcgggccacctccgttgcgcaatggcgcaacggagaatgacgccgagagtgcaagcccccatcacgccgccttcgatgtcgccgccagcgaggcgaaggtcttgccctccgccgcgagcttcttcagcagcggcgcaggctcgaggctggggtcgttggtctccttggcgtagaacgacaggcgatcggcgatgtgcttgaggccgacgctgtctgcccagaacatcgggccaccgcggtagatcggccagccatagccgtagagccagaccacgtcgatgtcggacgggcgcgcggcgatgccctcttcgaggatcttcgcgccctcgttgatcatcggatacatcatgcgctcgaggatctcctcgtcgctgacgacgcgcttcttgcgcccgaggcgcagcagcgtctcgtcgatcagcttctcgacctcggggtcgggcagcggcgcgcgagagccggcttcgtacttgtagtagcccttgccggtcttctggccgaaacggccggcttcgcacagcgcgtccgcgatctccgacttgatcccgcggtccttgcgcgagcgccagccgatgtcgagtccggcgagatcgcccatcgcgaacgggcccatcggcatgccgaacttggtgacgacggcgtcgacctgctgcggcagcgcgccttcaaacagcagcttctcggcctgcttgccgcgctgggcgagcatgcggttgccgacgaagccgtcgcagacaccgacaacggccggcaccttggcgatcttgcgtgcgatcgtcaccgccgtgacgagcgcatccggcgcggtcttgtccgcgcgcacgatctcgcacagcttcatgacgttggccggcgagaagaagtgcatgccgagcacgtcctgcggacgcttggtcgacttcgcgatctcgtcgatgttgagatacgaggtgttggaagcgagcaccgcgccttgcttggcgtactggtcgagcttggcgaacacttccttcttcaccgccatggtctcgaacaccgcctcgatcacgaggtcggcatcgccgacattctcaatgccgaccttgccgtcgatcagcgccatgcgcttggcgggtgcatcggccggaatgccgccgcgcgcggcggtcgcctcccagttcttctgcatcacgcccatgccgcgcttgagctgctcctcgcccgtctcgatcagggtgacgggaatgccggcattggcaaaggacatcgcaatgccgccgcccatggtgccggcgccaaggatcgcgacgcgattgacggggcgcggcttggtgccttcaggcacccccgcgatcttgttggcctcgcgctcggcgaagaaggcgtagcgctgcgccttggactggtcgctggtgacgagcttgaggaagccctcgcgctccttcttcaggccttcgtcaaaaggtaggtcaatggcgtagccgacggcatcggctgcggcgaacggcgcctccaggccacgcgacttcttggtcatggcggcgacggcattggtgaagatcgagcggtcggccttggcggccgcgagcttggaatcgtcgtcgcgcaggcgccgcagcggacgcttctccgcgagaatcttgcgcacgaaggcttcgccgccggaggccggaccttccacgatctcctcgatcaagccgttcttcagcgcttccgccgcaccgatggggtcgccgccgacgatcatcttgaccgcgagttcgggaccgaccgcacggggcaggcgctgcgtgcccccggcgcccggcagcaggccgagcttcacctcgggcagaccgagcttggcctccttcaccgcgacgcggaaatgacaggcgagcgcgacctccagaccgccgccgagggcagtgccgtggatcgcggcaacgaccggcttcggcgaattctcgatctcggacagcacgtcgttgagggcgggcggcttcggcggcttgccgaattcagtgatgtcggcgccggcaatgaaggtgcggccgccgcaggtcaggacgatgcccttgatggcgggatcggcgacggcagccttgatgcactcgaggatgccgccgcgcactgcggcactcagcgcgttgaccggagggctgtcgaccgtgacgatcccgacttcgtcatgacgctcaagcttaaccacttcgctcacggtgtccctccttggtagggttatatacttttgtcgatttcgcgctgcggaatttaattccgcatcttgacggcagggttattttgaagcacggacgttgtcaacgactccgcgcaagaagcagatcagggatgaagcgtacaggaaagaagactgcgaccgatcggaatttcgtcgtcgcgctttcccgcggactggatgtattgcgcgcgttccaccccaatgacggccttctcggtaatcaggagattgcggcccgcaccaatctgcccaagccaaccgtgtcgcggctgacctacacattgaccaagctcggttatctgacgccggttccccgcttcgagaagtaccagctcgcaccggccgcgatgtcgctgggttacgcggcgctggccaacctcggcgttcggcatttgtccgagccgtttcgcgaggaagttatgcgcgcgaccggcggcgccgtcgccgttggcggccgcgaccgtcacagcatgatctatttcgggcagagccgcggcagtgagacggtcggcgttcaacttgacgtcggctcgcgcgtgcccattgcaaccagcgcgatgggccgcgcctatttctgggcgctcgacgacgcggatcgcgccgaagtgtcgcgcatcctgcgcgaacattacggcagccgctggccgaagatgcgcgacggattggaacgttccggcgagactgtcgcgaagtacggtttcgcgatttcggtcggcgactggcacgacgacatcggcgccgccggggtcgcactcaggcttaatgacggaaccggcccttacgcattcaattgcggcgcgccggcattccgcttcacggaagagcgtttgatcaacgacattggaccgcgtctcgtagcgatggtaaggaacatcgaagcggcgctcgggggtttgatgccgcattcaaaaaaagacatcagcaaaaagctgaaatcaggagggaaagttgcgcgtgtggctgaggggatcagatagcgtttgtcatcatcgggagcggttcgcatcgccccatcgctcactgaacgacttgagcgagacgagatgacgcaggctcaactcgcgcagggggcatcgcccctgctcgccgttcgcgacgtcagcgtcgtgtttggcggcatcgtcgcgctcaacggcgtgtccttcgacatgcacaagggccagatcctcggcttgatcggccccaacggtgccggcaagacgacgctcttcaattgtctctcgcgactgtatcagccgtcgtccggcgacatcctgatggacggcgtgagcatcctgtcgcggccgccgcaccggatcgccgagatcggcatcggccgcacgttccagaacgtggcgctgtttccgaacctgtcggtgatggacaacgtccgcgtcggcgcgcatgcgaagacctccagtgacatcatcagcgactccttgaggcttgcctgggtccggcgcagcgagaccagcatcaacaggaaggtgcaggagatcctcgcctacctcggcctcgaggatgtcgcccacaccgtcgtgtccggcctgccgttcggcacgcagaagcgcgtcgagctggcgcgcgcgctggcagcggatccgaagatcctgctgctcgacgagccggccggcggcctcaaccacgaggaagtctacgtgctcggcgacctcatccgcaaaatccgcagcgagcgccatatgaccgtgctgctggtcgagcatcacatgggcctcgtgatgtcgatcgccgaccacgtcgtcgcgctgaatttcggcaagaagctcgcggaaggcactcccgcccaggtgcaggcggaccccgacgtcatcaaggcctatctcgggagcaaagatcaatgacgccactgctcaacgtcaaggacctgcgcgcctattacggccaggtccaggcgctccacggcctgtcgttctcgctcaacgagggctcgctgacgacgctgctgggtgccaacggcgccggcaagaccaccacgctgcgcgcgatctgcaacatggtgcgttccacgggcggagtcgagttcgaaggcaagccgctgaacaaccgctccaccgagagcatcgtgcggttcggcatcgcccacgtgccgcagggccgtggcaccttcaccaacatgaccgtcgaggagaaccttcagctgggggcgatcacccgcaaggacagcgcaggcatcgtctccgacatcgagcgcatgtatgcgcatttcccggtcctgaagcagcgccacacccagcaggccggcacgctctccggcggcgagcagcagatgctcgcggtcgcccgcgccctgatgctgcggccgcggctgatgctgctcgacgagccgtccttcggcctcgcgccgctcgtcgtgcgcgacctgttcggcatcctcgggaagatcaaccgcgaggacaaggtgtcgatcctcgtggtcgagcagaacgcccagctcgcgctcgagctcgccgaccaggcctatgtgatcgagaccggacgcatcgtgatgtcgggcaacgccaaggacatcgcgaacaacgaagaaatccgcaaatcctatctgggttactgagggagccggggcaatggagcttttcaccaaccaggtcctggccggcatcgccacgggcgcgatctatgcctgcatggccttggccgtcgtcatgatctatcaggccatcgaccatctcaacttcgcgcaaggagagatggcgatgttctcgaccttcatctcctggcagctgatgcagtggggcgtatcctattgggccgccttcctgatgacgctggcgttctccttcgtcgccggcatcgcgatcgagcgcatcctgttcaagccgctcgcgaaggcaccggtgctgaccaacgtcgcgggcttcatcgcgctgtttgcaatcatcaactcctcggccggcctgatctgggacttcacgatcaagcagtatccgaccccgttcggatccgcaccgtttctcggcagccagctgatctcgacgcaccaggccggcatgatcggcgtcaccgtggcgctgctgctcgcgctctatttcttcttccagtacacgcggatcggccttgcgatgcgcgctgccgcgtcggtgcctgaatcggcccgcctcgtcggcatcaacacgagctggatgatcgcgctcggctggggcatggcgactgcgatcggctcgatcgccggcatgctgatcgctcctgtggtgttcctcgagcccaacatgatgggcggcgtgctgatctacggcttcgccgccgcggtgctcggcggactgagcagcccgttcggcgccgtggtcggcggcttccttgtcggtgttttcgagaacctcgccggcacctacattcccggcgtcggcaacgagttgaaactcccgatcgcgctcgcgctgatcgtttccgtcctggtcgtcaaacccgctggcctgttcggccggcaaatcgtcaagcgagtttgatcatgagcgcagcagaagaagccattgccgagggccacgaggcggtcgaggcggttccgaagcgggccatgacgctgggcaccggcacctcgctcgtggtgcttgcggcgctgctggtcgtgccgatgttcgtcaagaacttcatcatcttccagatgacgatgctcctgatctacgggctcgccgtgctggcgttgaacatcctgaccggcggctccggccagttctcgctcgggcagagtgcgttctacgccgtcggcgcctacacctcggcggtgctgatggagcacgccaacatcaactacgccctgaccattccggtgtccgccgtgatctgcttcggattcggttacctgttcggcaagccggcgctgcggctgtcgggcatctatctcgcgctcgcgaccttcgcgctcgcgaccgcgatgccgcagttgctcaagctgaacttcctcgagcactggaccggcggcgtgcagggcctcgtcgtcaccaagccggacgcgccgttcggcctgccgatgtcgcaggacatgtggctgtactatttcaccctcgcggtgacggtcgcgatctacatcttctcggtgaacctgctgcgctcccgctccggccgcgccttcatggcgatccgcgacaacgagatcgcggcctcctcgatgggcgtcaacgtcgcgctctacaagacactggcgttcggcgtatccgccggcatcaccggcgtcgccggctcgctcggcgccatcgccgtgcaattcgtcgcgcccgacagctacaccatcacgctggcgatctcgctgttcctcggcatggtcgtcggcggggtcggctggctgcccggctcgttcgtcggcgcggccttcatcatcttcgtgcccaacatggcggagagcatctccaagggcctctccggcgcggtgttcggcgtgctgctgttcctcgtcatctatctcgtgccgcatggcgcaaggcaggttgcgatcttcggccagcagctcgttggcaaactcagaaagaactgaagactgtcacccaggcgttcattcaagaaggagacccaattgcttttcgaaaaaacactgcgagccgccgcgcttgtaacggcaacggcggccgtcactctcacctccggcgctgcactcgcccaaaaaaaatacgacaccggcgcaagtgataccgagatcaagatcggcaacatcatgccgtacagcggtccggcgtcggcctatggcatcatcggcaagaccgaagaagcctatttcaggatgatcaacgacaagggcggcatcaacggccgcaagatcaatt

SEQ ID NO: 209 - DNA, 2142 bp, Bradyrhizobium colbertium
attggtgacgacgcagatcggcccgcgtatggtcgaaatgccattgcgcatcggtccagatcgatcgtgacgaaacgcgttgcgcggcatcgaaacgatggagccgctctgattgtgccggcatagtcattccaactccgggagcagcggcatgccggtagcgagcttgcgggcgggctcgtgcatgttcgcggggaaatccgggaggatgtcctgggtgagaatgcgccacgacggggcatagagaaggctccagcgcttcggatcgagccgtttacgagcctcttcgagccgatcgacagcggcgaggatgcgcgccagatgcccgacatcgatcgggacgacgaggcccggacaagcgaggcagccgccgaactgcgggcagaggcgatcgacgccgtctcggccgggagcgacaggagccaggcagtcgtgcccgaaaggggcggtggcgcgcagcttcccgaaggccggcggaggcgtgtcgcgctcggggccgagcacccagttgatcatctgctcttgcaggtgcgcgatcgtctggcgctggaggcgggtcgtctcctcgctcttgagataggtctctgttgttgcgacgctggcatggttcaggatcgattgagcgacgagaacgtctccgcccgacgcgcggtagtgctcagtcgccacgcttccacgaaataacgccggcgcaaagtctgcgatcggctcccgcagttggtccggatggtccgtgttccacgcgtcgatgcgttggttggcgcgctcgatgaatctgaggatggcacgcctcagaacggtgtgttcgatgaccccggtgcggctgcgaagcgatcggcgcgaatgctccttatggatgctgcgcgtcaggaagagtcgatcttgctcgcttggcggtgctgtggcgatgatcggttctgtcagcgccagcatcatctcgatcaggttgggtgcggcataccgccgacggcgatcgaaggaccgccgctgcgctttctgaagccgcgcgcccgttttgggcttgttccagtcgacgatgacgcggtgttcgtcgagcggatgcggcacaaggcaatcccgacggatgtggcgcagcggttcgggattggccgcggtctggatggcgatggccaagaagaaaggaaccagcgtgtcggtggtgatatggaaatactgcgccatggtccgagcgccgccccagtactggaccagcgtgctggacttgatcccgtgcgcctcgaggacagtcgtgtcgggcatgaggccgtcgtcgatccggccgatgcgccatatccatcggtcgagcccctggccgcgcaaggtcttgggcggtagctcggggcgtcggataacctcctgcccgtactgaaaccgggcccaggcctcgtcgatctcctcgtagcaggcccgcaggatcgccttgacctgattcgagggaagtcgtcgccgaggctgttggctcgccctccgccccggaaacgcattccaggggatctccaggtcgtgcgctatgcgcccgcgtcgattacgcctacaccagaagagcaagggacgcagaaggtcgaaggcgatagcgtgggccccgcgtggcgctcgcgatgccccttgcttcttcagccagagtacatagcggccaagtgccgcggtatcgagatcactcgcggtctcgatcatgccgtcgtcaacgacgaaacaggtgaaacgtcggagcgccctccgtgtcgtctggcgtgttgctgattgctgagcgacgcaatgcgcgcggaatgcctcgaccaggaggtcacgcagatcgacaggcaggccggcgagctgtccggaatcgaaccgctgatcggggttgccccaggcatcgacgaaaatgatcgtgtcagccggcgctatcgagtccaccgccgccgtctgcgtcgcctcagttgcaaaccggcggtcgatcggggtccgcttacgaacggccatgaggcaccagttcgccatacagataggcgaggctctcagcgagtgtgtccgcgtgaagctcaacacagcgcagatagatcgcggtcgactggatcgacgcatgaccaagaaggacctgcacgatcttgagcgggttgaggtcaggcgttgtcgccgcctgcttttgcaggcggacaagcatcg

SEQ ID NO: 210 - DNA, 11613 bp, Bradyrhizobium colbertium
aatagcacccccgccacgagatacagaaatgcagagagattggcgctcatctcaggtccccattgatcccttcagcccgaggtggccgcttacttcgacttcttcttgtacatcgccagcatccgctgggtgacgagaaagccgccgaagatgttcacgcaggcgaagatgagcgcgacgaagccgaagccgcgcgcccagcccgagccgctcgaaaccatgccgacgccgaccgcgagcagcgcgccgacgacgatcaccgaggagatcgcgttggtcacgctcatcagcggcgtgtgcagcgccggcgtcaccgaccacaccacgaaatagccgacgaagacggcgaggacgaagatcgacagccggaagatgaaggggtcgacgacctgtgctgcgtgctccatggcgggtctccttaaaccttcggctggaagttcgggtggatgacggcgccgtctttcgtgagcgcggtggccttgacgagctcgtcgtcccagttgacggcgagcgctttctccttcttgtcgaccatggtctcgatgaaggagaacagattgcgtgcgtagaggctggaggccgaggccgcgacgcggccggcaacgttggtatagccgacgatcttgatgccatcgagatcgacgacctcgcccgccttcgcgccctcgacattgccgccgcgctcgacggcgagatcgaccagcaccgagcccggcttcatcgatttgaccatctcggcggtaaccagcttcggggcgggccggcccgggatcagcgcggtggtgatgacgatgtcctgcttcttgatgtgctcggcggtgagcgcggcctgcttggcctggtattccttggacatctccttggcatagccgccggccgtctgcgcgttcttgaattcctcgtcctcgacggcgaggaatttcgcgccgagcgattccacttgctccttcgtcgcgggccgcacgtcggtcgcggtgacgacggcgccgagacggcgtgcggtcgcgatcgcctgcagtccggcgacgccgacgcccatcacgaacaccttcgcggcgggcacggtgccggccgccgtcatcatcatggggaaggcgcggccgaaggcctcggcaccctcgatcacggcgcgataaccggcgaggttggcctgcgaggacagcacgtccatcacctgcgcacgcgtgatgcgcggcatcaattccattgcgaaagcggagacgccggcatccgccatcgccttcagcgcggcctcgttgccatagggatccatgatggcgatgacgagcgcgccgcgcttgtactgcgaaagctcggacgcttcgggacgcttcaccttgatgatgatgtcggcgtccttcaacgcgtcggcgctgacggtggcgccggccgcggtgaattcggaatccggcaggcccgacttgacaccggcacccggctcgacggcaacctccgcgcccagcgctttgaacttcttcaccgtatcaggcgaagcggcgacgcgcggctccgacggatcgatttccttggcaacggcaatcttcatgaggcctccggcgacgcgggaaaaagcgcgcacgcgaacttagcgttactcccgcaacgttggataccggttttgggaccggcttgaatgcaaattttatgggcaccgtcgacgctggcggtgcggcggtcgaccgatcaggtgaggaagatcgccatcaggatcacgatgagcgcgaccgagaccgtgccgtacttcaccagcttgatgaagccctcgtaggtctgctcgtgggcaacgtagtcgttgccgtcggcggtggtgtaggccacttcgctatggtcagccatggattgtccccagtcgaaagtcgaattcctggggtggataccttaaagatctgcacagggcaacggcaccgaggcggggttttcccgcaaatcgggtcatttagaattccaattgtcgcggatccagcgcgccagagcgcagtcgcctcagccaatcgcctccagatcatcgatcattcccgagatgacactgagcccgccgtcccagaatttcggatccttggcgtccaatccgaacgggcgcagcagctcggaatagtgcttggtgccgcccgctgcgagcatgtcgaggtagcgctcggcaaagccctcggccgcgttctcgtagacggcgtaaagcgagttcaccaggcaatcgccgaacgcataggcgtagacatagaacggcgaatggatgaagtgcgggatgtacatccagtagttctcgtagcccgccttgatctcgatcgccggccccaggctctcgccctgcacggacagccagatctcgcccaggcgcgtcgcggtgagctcgccattcttgcgttcggtatggaccgcgcgctcgaacgaatagaacgcgatctgccgcaccacggtgttgatcatgtcctcgaccttgccggcgagcagcgcctgacgctgcctggcgctcttggtctgtgcgaggagacgcttgaacgtgagcatctctccgaacacgctcgcggtctcggcaagcgtcaacggcgtgggtgccatcagagccccgttcttggcggcgagcacctgatggacgccgtgaccgagctcgtgggcgagcgtcatcacgtcgcgcggcttgccctgatagttcatgaggacgtaagggtgcgccgatggcgtggtcggatgcgagaacgcgccgggcaccttgcccggacgcaccggcgcatcgatccagcgatcggtgaagaagcgctcggcgatgtcggccatttggggcgagaagccgcgataggccgtcagcaccatattccgcgcatccggccagccgatgacgtcggtcgccgcaaatggcagcggcgcattgcggtcccaataggccagccgcttcttgccgaaccacttcgccttcagcgcgtaatagcgatgcgacagcttcggataggccgcgcgcaccgatgcgaccagcgcatcgacaacctcgcgctcgacgcggttgttcagatggcgggaatccgcaacgtccttgaagccgcgccagcggtcggagatgtccttgtccttggccagggtgttggtgatcagcgcgaaggtgcgctcgttggccttgaaggtcttggccagcgcctcggccgcgctcttgcgcttggcgccgtcgcggtcctgcagcagattgagcgtcggctcgatcgcgagctccttggtgccgaccttgaagcggaggctcgagatggtctggtcgaacagccggttgaaggcggaatagccggtctgcgccttctccaggaagagctgctcgagcttgtcgtcgagctgatacggcttctccttgcgcagatcctcgatccacggacggtagtatgcgagttcggcggcctgcatcgcgcggttcaaaatatcgtcatcgacgcggttgagctcgagcgcgaagaacagaagatgcgtcgacgcggccgtcaggcgctcagacacgtcgccgtaaaactttgatattgcggggtccacgctgtcgccggcatggacgaggccggcataggagccgagacggccggcgagatcctcaatcgcctcatagcgtcgcacggcctcggcgagccattttccgccatcttcgtttgctgtgcctgaggcgagcttgcccttgtagtcggtctcaaaggcgacgcagtcggcatccagcttttcgagatcgcgcgccacttccggcgcatcgatcccggaatagagatcggccaggttccactccggaagctttccggtcttgctcgcaggttttgccggcgaagacttggagcgcgaagacttggagagcgaagacttggagagcgaagacttggaaagcaaaggcttggagggcgatgccttggtgacagacttcttgccgacggatttcttcgtggcaggcttgcggagtgcagtcttttcaagagcagtcttggagcgcgaagtcattgtgtgggaaacctgtgttcaacgagcacgacgtcgggcgggggcatcaaggtttaagagtgcgttaatcggcttcggccagagtgccccgattcgagacagatagtagtagcgtgcggggaacaccatggctgccagtattttgatcgccgacgacgacgctgtagcccgccggctgatcgagaacatggtgcagaaatgcggctatgagacggtcgtcgtggactccggcgatgccgcggtcgccaccctcaccgcccccgacgcgcccgccatcgacgccgtcatcctcgatctcgtgatgcccggcctcgacggcatgggcgtattggcgaagatccgtgaagcgggtctgagtatccccgtgatcgtgcagaccgcccatggcggaatcgacaacgtgatctcggcgatgcgcgcgggcgcggccgatttcgtcgtcaagccggtcggcgtggagcgcctccaggtgtcgttgcgcaacgcgctcaacacctccgcgctcaagggcgaattgcagcgcatccgtcacagccgcgaaggccggctgaccttctcggacatcattacgcgcgctgaggcaatgacccaggtgatgcgaactgcacagaaggcggcgaactccgccatccccgtgctgatcgagggcgagtccggtgtcggcaaggagatgttcgcgcgcgccatccatggcagcggcgagcgcaaggccaagccgttcgtcgcggtcaattgcggcgcaattcccgacaatctcgtcgagtccatcctgttcggccacgagaagggcgcgttcaccggcgccaccgagcggcacatgggcaagttcgtcgaggctcatggcggcacgctgttcctggacgaagtcagcgaactgccgctgaccgcgcaggtgaagctgctgcgcgcgcttcaggaaggtgccgttgaggcagtcggcggccgcaagccggtcaaagtcgatgtccgcatcatctcggcaaccaatcgcaagctgctggagcgggtgaaacagggacatttccgcgaagacctgttctaccgattgcacgtgttgccgctgacgatcccctcgctgcgcgcgcggcgtgaggacatcccgcatctgctcaggcatttcctggcgcgctttgccgccgaggagaaccgccccatcaccggcatcagtggcgaggcggtggcgcatctcacccagctcgactggccgggcaacatccgccagctcgagaacgcggtctaccgtgccgtggtgatgagtgacggcgaccagctcgacctcgacgattttcccctgcttgcctcgcagccgcacgccacagcggacattccgacggcaccgctgatgattgagccgattgctgcgccttccctcgtatcaggtagcgaaatacccatcgttcccctccccgcggcaggaactctccccatgctgaccgcgaccggcgacgtccgcccgctggaggacatggagaacgagatcatccgtttcgccatctcgcattaccgcgggcagatgtccgaagtcgcccgccgtctcaagatcggccggtccacgctctaccgcaaactcgatgaagcgggcgttcccgggcatggcggcaaaagcggcgaagagacgcattgagcctgatacaaacggaggctcgcgcggaggtgcgggacctttgtaacccgttcgcagcacgacagaattcgactgcgatttgaaccgtgacccggaagtgacagacagagggaaaagcgcgtggcagaagcgcacaatccgttgccaagaggctcccttgaagtcagtttgtcgtgagttgtcccgggtagcgctggctgcaaaatcggggcctgtatatcgtctgcgtaggaatcgttgcgtgcaggcgtgcaactttcgagaggccggcgcggtttagccgaaactcattaggcgataacgaagctgttccccgacggacagcttacccgaggggtgcgacacaatgcgtgactgtttgaaccaccgtgtgggctttgaccgtgtcttgatgacagtcgcggcgaccttcctcgcggtgtcggccagcgcggctctggcgcaggatcaggcgcgcagcagcgccgccgagctcgcgatcgaagctgcgatcccgcgccccgagccggccaacgtcccgcctccgactgcagccgacatcaagctcgacaccaccgcgacgcttcaggacgcgaccaaggagcccgcgaaaactgaggcggcgccctcgcccgaacccaaggcttcggacgttgccactacgcctgccaccgaagcgcctaagaacgatacagccaagacggaaccggcaaagaccgagccggccaaggccgacaccgcaacgacagcgcccgcgcctcctgctgctgcggccgctccggccgccgagccggtgaaggccgcgagcagcgttcccgctgccgaccagccggttgccgacaggctcaaggatatcatcggcgccaaaacctcgcggcacttcgaccgcaagaacgagcgcgctgcagtcgagaagttctacagcgcacgcgatttcgcgccggtctggacccagggcggtactctcaccgctgcggccaagggcgtggttgcgcggctcaaagacgcggcctccgacggcctcaatccctccgactatccggttccggatttcgccgccgccacgacaccggatacgctggctgatgccgagctcaagctcacctccagcatgttcgactatgcacgccatgcccagagcggccgcatgcattggtcgcaggcgagtggcgacattctctatcccgaacatccggtcgatcccaacgaggtgctcgccaaggtcacgacggcggcggacgcctccgcagcgctcgagagctacaacccgccgcacaagctctacaaggagctgaaggcgaagctggccgagctgcgcggccagggcaacggcccagtgatcgagatcgccgagggcccggcgctgaaatacaccccggccagcaagaagcggcatgagatcgtcgtggaagatccgcgcgtgccgcagctgcgcgccaagctcggcctggccgagaacgccggcgacacccgctatgacgcggcggttgccgaagccgtgcgcaaattccagagcggcgccgagatgaaggcgaccggcatcctcgacgacaagacggtcaaggcgctcaacacccccaagcgcgacaagcagatcgatgtggtgctggtgaacatggagcgctggcgctggctgccgcgcgacctcggcgcgcccgcgctgggcgacgcttatgtcatcctcaacattcccgacttcacgttgaaggtgatgcagcgcggccagcaggtgtggaccactcgcgtcgtcaccggcaagccgggcaagcatgcgaccccgctcctcaccgagacgatgaagtacatcacggtcaacccgacctggaacgtgccgccgtcgatcgtctataacgagtacctgccggcattgcagcaggacccgaccgtgcttcagcgcatgggtctgaggctcgagcaaaaccgcgacggctcggtgcacatctcgcagccacccggcgaggccaacgcgctcggccgcatacgcttcaacttcccgaacaagttcctggtctatcaacacgacacgccggacaagcatttgttcgccaaggaggagcgcgccttcagccatggctgcatgcgcgtgcagaatccggatcagtacgcctccgtcctgctcaacatcgtcatgccgaacgagaagtacacgccggagcgcatccgcagcatgtacggcaagagcgagatcgacctgaaattcccgacgccgattccggtgaacatcacctatcagaccgcattcgtcgatgacgcgggcaagctgcaattccgcaaggacatctatggccgcgacgccgccatgatcaacattctgaagaacagccgcggcaaggacatcgagaacgtcgtcgcgcactcgcagccgagctactcacggccggcgacgacgctgccggcgggggttgcggtggccaacaatggcggcggcttcaatggcagcggcttcggctcgtccgggccgaacttcttcgagcgcctgttcggggcaccaaccccggccgcgccgccggccccggtcggccgccggccgcagcagcagcgggtgttcacccgctgagggcgacccagcgcacccacctcgcgaaattcgacaatgaaatcagcgactccatccgcatggatggagtcgcttaacgttaaccattctccaccgcgtcccgcggcagcgggcgtttttttgccacagtcaaccgtttaggattgtattctgaattggtttgggggcgggaaggtcaacctcgagttaaccttcttgctttaagaaagcgttcaccctctttcgcgctgctaacggggttggcgggagagtccatttgaacgctcgtcgactgggtgggctcatacgtgctaactggtctcgcacgccgatttgctgtgctgtcgttgtcccatgcgggcgtgaaggccggatcccggatcggcctcgctgctgcattgctgcttgcggccgccggctcggttcatgacgccgccgccctgaacgagaccaagacgctctcgttccaccacacgcattccggcgaagacctcaccgtcaccttcaaacgcgacgggcgctacgacgaagcagcgctgaagcagctcaaccacttcctgcgcgactggcgcacccaggagcagacggtcatggaccgtcgcctgttcgacatcctctgggaagtctatcgcgacgtcgacggcaagcagccgatccagatcatttcctcctatcgctcccccgccaccaacgccatgctccgccgccgctcctcgggcgtggcgcgctccagccagcatatgctgggacatgcgatggacttctatatcccgggcgtgccgctggagcagatccgtttcgccggcctgcgcctccagcgtggcggcgtcgggttctatccgacctccggctcgcctttcgtgcatctggacaccggcagcgtccggcactggccgcggatgacccatgaccagctcgcccgcgtcttcccggacggaaagacggtgcatctgccgaccgatggcgtgccgctgaagaattatgagctggcgaaggccgagatcgagcggcgcggcagcggcgacgatgccggcagcaagccgaatttcttcgccgccctgttcaagagcaagccggctcccgccgcgagcagcgacgaggatgacgagggcgcgcccgccccagccgcgaagccggcggcaccgaccgtcgtcgcagccgccgccaagcctgccgagccggtgccgacgcctcgcgccaagccgcagatcgccgccgcactccagctcgcttcggccgatgcgcagatcgttgcgccgcccaagccgaagcccgcgcccgtggctgacaagcctgcaaccggcaagctggagacccctgccgacatcatcaatgcccgcggcttctgggatgatgtcccggctgcgccgcagcaggctacaccggcgcaggtggcggccctgaaggcgcgccaggcgcttgcggccgccaccgatccgcacccgaccgcgagcgtcaccaacgcaactctgcaggcgctggcttacgcgccggccgcctccccggtcgatcgcgccaacgtcgtcgcggcatccgcgccgatcccgcgcaccgcccgccccgcggcgtcccgcagcgtcgctcaggcaaccgagatcaacacggtcgtcggcaagagcatcgacggcagggtcgcgaccgccacccgcctctccgcggcgaagggcgagagcatctggctcaagatcgtcatgctctcgccgagtgccagccacgcgatgtcggtgacgctgatgggcgagctcgataccgcagcgctgcgcggcttcttcgtcaagcctcatgccgtgatcgcgatgggatttgccgacgaccccatgccgggcctgtcctgcgacagtttctcgggcagcgcgaccgcaaagctccagacgacgtcgttcgtcgtgcggaccgcgtcgctacgctgatagaaacgacgatttccaggaagtcggtctggtggcccggatggagcgaaagcgtaatccggggatgccgcccgcgcagcaagagcccggatttcgctttcgctccatccgggctacggcagcgttgttgagacgcgaacgcctcagatcatgcccagcgcctgcatgtaggtctcgaggatcgtctcggcctcggcgcgttcgttcgggtcctgcttgcgcaggcgcacgatggtgcgcagcgccttgacgtcgtagccgttgcccttgctctcggcatagacgtcgcggatgtcgtcggagatcgccttcttttcttcctccagccgctcgatacgctcgatgatggatttgagctggtccttggcaaatttcgtcgcgggctcgtcgtcgcggacggcggcggaggtggccatcttgtactcccaatggaactggcaaaacgaggtgacgccggcatccctcaccgcgcgtgctggcagaacccttagggttggcgccgccagcgttcaaggcggcatcgcgctcgtccacagcgcgcccacacattcctgcggcgggcgcaagaaagctgttgtgtggtgcgactcagcaggccgccagcgccccctcaatggccgtggggatggaccttcttcatcgcctcaagctgctcaggcgtggccgcgccctgatatttcgatttccaggtctcgtagggcatgccgtagactgcctcgcggctctcgtccttgctcagggcgacgccctgggcgtcggcggcgtccttgagccagttggacaggcagttgcggcagaaacccgccaggttcatcagatcgatgttctggacgtcggtccgcgcctgcaaatgatcgaccaggcgccggaaagcggcggcctcgagctccgttctggttttgtcgtcgattggcatggctgaattcctcaaggctcgtcccgatggtggtcacccttacgggatcaggtgggtgctgtcacagattttgccatatcgcggcgcaaaggggcaaaagcccggctaccgagcgccgtcccggcccaacgccaaatcgtcaatgatctggtatagcttccgcgacaatgattgccgaatctctccgctccccgcttcgcctgcttgcccggtcggtcccggtgctggcggtcgccttgctgtgccttagcgccagtcccgcctccgccgatttccgtctctgcaacaacacctcaagccgggtcggcattgcgctcggctacaaggacgccgagggctggaccacggaaggctggtggaacatctcctcgcgttcctgtgagacgctgctgcggggcacactcgtcgcgcgttactactacatctatgccatcgactacgaccgcggcggcgaatggtcgggtcaggcctacatgtgctcgcgggacaaggagttcaccatccgcggcaccgaggattgcctcgcgcgcggctatgaccgcaccggctatttcgaggtcgacaccggcgagcagcgcgcctggacggtgcagctgaccgacgccaacgagcagccggcacaacaacgtgtacctggcttgcccgggccggttggacctggtggcggcgttccgggtttgcccaatggtccgtccgg

SEQ ID NO: 211 - DNA, 5630 bp, Bradyrhizobium colbertium
ccacaccttatgttcggcgacggtttggcaggtttggcttttcgcctgccacaccaccaccccttaaggggtgtggggtgtggcgaggcaaaaacataatggagaagtaaggtggggcaaaatcaggttgcgtctgccacccgcacaaactttctcttcatacgtttttcgtccaactcctcgtagacctccaaagcgccagctccaatccagagcttcaccagcccattaaccttggccttgtctgccttgcggctgatatcgagcttcatagccctggcgatcgggatgccgacccattctttcgcttggccatcgtggcgccaattccctgcgcgaatggcagcggctgcggcgtcaaaatccgccccggtcacgccgtccaacgggttcggccatttccaactgacgaccacaccgacactatcaccggggtcgaggtcgccatcgccgtttccgagatgcactggcgtgatgtgaaaccagtctttgccatccgggggcggggacaggttcagcttgccagtctcaacgctgaagtattgccggggattttcaacaccagccctgttgccttcctctgccgtcatcttgttgagcacttgggcggatcgaaccgcccctaacagggcgacagcgcctcgcccatcttcaaccgtcgcctcagccccaccggtctttctgacgtgatggacaagctcaatcgctgcgttggtctcgtccgcgatggcggtccacttcttcgccaccatgtcaatggcgccgttgtcgttctcggtaacgcggtgacacgaaatgaaggggtcgaccatcagcacatcaattttattgtagtggatggtatcgatcagcgacctgaccacgggagccgcgattttagtaccttctgttgaggtctggctggcaatgatgatttcttgatcacggccactgtcaacaaacagccacccctccagttcttccgctctgatgttgtagtagaggcaaacagctgcaatgcggcgattgatttcttcaagcggatcttcgccattccaataccaaacgcgacaccgctcattcggcctgacgccgagcagagctcggccagtagccattgccactgcctccgtgatcttcagaaatgattttccgatgcctccccccgcgaaggtcgccgagccgaacttgcggatcagatggtggccatacagaaattggcgcctcggcatggtcttggggtcgcgccaaacaaacggcgtagccttgataccgggcggttcttgcgccgccgcagtcgggccacgagaactgcgaagggagttgtcattatcatgagcgaccaggctcgaactgggtgccgtggttgccatcacataaattccttcttcttcgcagctgcggcgatgatgcggtccgcgagcgcagcttcttcgggattttcaagcggcacgtcgacaagcggagcgagccaaaccagagcttcggcgttggtcacgaggcgcgcttccatgacaacatcaatcggggtgtagcccttagagccatcgccaaagtctacgataccgcccgatttgaacgacaggttcggcttgcgcaaatgaagcgcccgaccagtgccggacggccgccactcggcgacggccttgaaaccaccaccggccggatagcagcgctgtaacccgagatgcggcacccaggcgccaaggttcgccatcgcagcttcattcaccgcgcggaagagggacgccgcatcagagtcgccgggagatgcaacggactgctcgactgccccgccgcatgacttgcggcgttccagaacggtccagccgaatgagcgaaggacgtcttccatcgcggcgcggtgctcatgagtgagcacgggaagcgcttcaagcgcggtgtcctctaacgtcgcgtccgaccaccagtaataggaacgacccgtgtccggatgaatcgaaggaggaatcacagtttgacgtccactactcaggaaatcgagcaggcggattccgctggcatcattgtaggagcgagacttcatcggtacgatcgaacgataaaacgacgtgaggcctcgccgaccgatcttgacgacgatggcaggcggcagcgtcgacagaatcggaccaatgatcgagtcgtagccgtcgatatcgacagcaactaagccgccaaatccggtggcgacgccgacgcccaccgccggggcgcgagaatgcccggcgataaaaaaggagctcggcgcttcgttgcagtatttctgccatccagacagagcaggggccttgcccgcaccggcttttggggcatcaggcggcaagatcggcaaaggcgaatagccgagcttcatgagggacggagcggtctgcgcaaagggagagctacgcatttgacgccgcccaaaccgggttgccatctacccaggtgtcgggccagtgctcgcgcgcccagtgataaaccctcttaaagccatcaaagatgggcgtgcactcattcagtccgagatggtcgccaatatcgagaacttcctcacgccatagctcgatgaccacgccatcggtcccaagaaatcgaaagcagtcactggtaggtgacggcgtgaaacggcgcgccgtaacaagcgcgctagatcaatcagttcttcttgcgcagcgctgcgcgcggcagtatcttggtcgggcttcatcttaatgtctccgttcttaaaaggtccaccgttggcgcggtgcggcctttttcgttgtttggttatgcggagggctttccacccgacctgacggtattggcatgcatccattctgcgatggcctcgcgggggtacatcggcgttcggcccaccttgatgtggccgggcgcgcgctgctggcgtcgcagaagtcgcgcccacgacactgatttgccgacgaagtcggcgaactcagcctcagtaaaaagaaagtcttcactggtcatgactggcctcggattgtttcgggtggtcggagtttggcagacgttgtcacttgccgtggggtcggttcgatctcccttactgaaattcctcttgcgcgagggcaaaagcccccgatcgcacggccgatgccgcgcgtcggaaggcgtgaattgtcgggagttggtgcgccctggcgcgccgggggttaggccaagttcgtttcgatcaggtcggcgagagcccgtaagcccagcgcgcaaaactcatggtcggtcggcccgagaatcacttcctcttggccgtcaagacagtctgcgagcaggcgaaggtatgcggccgagccgattctagggtagttgtcatccaacatggtcacgccgcgcgcttgtcagggtgcttattcgaccgagtcgccagccaagcgtcaatggcgtcaacgtcgaaaaaccgggtgcggcccatatagatcggcttgggaaaattttggtcgggggcgttgatcgtgcgatcaagcgtcgagcgcgagataccaccgagcttttccagcagcggtgcggtcttaataagtctcttagtcactgttacttcctcttggtgcgtgttgatgcgccaagaggtagcgcgacggctgatgtcgcttccacctattcaaaacgtcgatttcaccagacgttttaaagccggattagcgacggatgatccgtcaaaacgtcggagtatccatgtcgcgcttctttcgcgccgccgtaaggagttcctcgacggccttgtcacttaggttgtggtcatccatgagtgccgagagtgcgtcggtgggcctgactccgctcgttatcttctcccaatactcgccgacgatagatgcggcgcgacgactcagccgcaaggcctgcgcaagcttggtgccccgcccgcaaccccatgccgtggtgatgtccttggtggtgatccttgcccgaccatcaccgttccaagccgcgaccagcggttttgatacttctgcggcaaagcgctcgatctcatttgccacgatctcaggcacgggcagattgtgcttctttgccagataaaacgcgagccacgcggctgcggggttgtgcgtcgcatggaagacgccggcgagttcggtcaattcaagctcttgaggggagggaagcggtgccaccggttacgctccggccttgatcgaaacgacattggatggtcgttcaacgatcaagctcgcgacgtgatcggcccacaggttgagggcgtggcgtttctcggcaagataatcatggcgctggtaaacgccgacgatgccgccgaatgttcccgatacgtggttcactactttttcgacgacagccacaccaacgccgagggccgccatacctgacaccatcgttctcctcaggtcgtgaatccgccacggctcaatcatgacaggatcgccgccacgcttctccgcttcctcccgtgcgacttccatcatggctttgtccagatgcaccttggctttggaaaatcctgagatcggtgttgttccggtcgtggtcagaacaagcggggagtcctcccatcgttcggcaccattgaccattgccttgacctgaacctttggaatggcgcgcagaatctcaacgacggctggcgaaagcggaataacatgttcccgaccattcttcgtccgccgggcgggcagcacccaaagcggggagggtccgtctaggtccttgagctctgcccaagccatgtccgcaacctcatcccggcgctgtcccgtcaggaccaagagccgatagaacgctcgccatgtccagtccattcggtcgagcgcgagagacagtgcgcgcagatcggcgtttgagagggcgcgctcccgcgcctcttcaaccaccacaggcttcgtacgctcgaatggattgtcctcgatcagggccttatctatacaccatccgaagaacgtccgggcggcggcgcgcgtccgattcgccagcacgggcctgccgctgtccttgattgcgtcgattaatttgatggcgtcagcgcgtgcgatgtcatcgactctgcgcttcgcccatggggtcaattccttactcagaagccgtttgagttccttggcggacttcatcgcgttgaccttgtcccggtagtagcggtccaggacgcgctccacgatgtcatccttgcgccgggcttccttctcctcagccgcgatccgtgcagcttccgccttgcgcatagcgcgcttctgatcggctgggtccgagccaagcgcacgctgccggcgtgcatcaccggccgcctcacgggcctgcacaagcgtaagcgcgccgggccctgccgccgggcctagcgtaagggtcacgtcttgcccgttgtcgcgcttgaaacggtagacgaacgacttcgcgcccgaaggctgaatcagaacccgcagcccgggatgccccacgtccggcagagcgtagcgcgtcgccttgggttcggcattggtgattgccttcgcggacagcggctttttcattggtcccccttctgagccccactctgagccccaccaatattttgattggtggcgatgcatgttgatgcatcgagatgcactatagaggaatcaacaacttgatatcaatgtagaatttcaatttttgctgggcttggtgacgcatcgcggttgcggtcaaaagtcccaagcatgtgtctgtggaacaggaggtcggtggttcga

SEQ ID NO: 212 - DNA, 3470 bp, Bradyrhizobium colbertium
gctaggtgggtgcctcatgccgcttacgaattatggagcaacggcaccaagttcggggctggtcgcggccggctgatttcggcttcaatgcagcatggccgatcagctcatcattcaaatgttcaagcaaaagcgcgccgagatcagcggcatgattgctgcctaccaagccaagatcgagcaggctcagcacgaacttgcgtacatcaatgctgtgctccgtctcgtcgagggtggtgagcaagagcgcgctcagtcttcactcgcgcgaagacgggggcctgtccatcgtcccccggggggagaatttgcgcccatcagcctgaccacacttagaagccttgcccgacgcagctagtctaaaacgcggctggtcatatcgtcaagtacgcccagacgcacaacctcatcggacacctgcgccgaggcaacgccgccgaaggcgctaaccaccgaaattatcagcacgccccaaatagcccttctcatcgcttctcaagcagcggtacgttgaagatgtttcatcctgcgtatttcgcaaaaattggacagcaattttgctaactgacggacagctggggtaagggcttttggttacctggttgttgaggtcaaccgggattcgtttcgctgttttcgacgtcggtcaaggggcgcgcggattttttccttcgcatgctgtcgccttcaagggcgatacggtgggagttgtgtatgatcctcaggaagctgggcacctatctcggccgcgtcatccgcgacattggccgcaagatcgaaggtgacggcgggctcgaagcggcgttcgcaaagctgctattgctggcgcggcgtgtgcgcgagcgcgcctgttccggctagggaggttcgacgagagataccacgcattgtccgtcctcctatgagagcattgacttggcgatcacgttgcggaggatttcgctggtgcctccgcctatcgttccgaccctggaatcgcggaaatacatctgcatttccgaactcatcatcagtcccgcgccgcccatgatctggatgccggcatcggcgcacttggaattgctttcggtggcgaatatcttcgtcaccgccgcggccgtattcggcgcgacgcccttgtccatgagggacgcgagccggtacgtcatgacacgcgaactcgctgtagtagcgctgcgcactcgcagggtgatggagggttaagtacggtttcatccctatctcgcaatgcaacacggtgcttcaagttctctttgtgaaagcctgagcaataaaagtaccagcgtcgttagtttcgggagtgcgagcacatttggggttggacgcgcaagaagtcctaccggctcgtcagtcgactttggcgccagacatctcaatgattggcttccaacgactgatttcactcttgatgaactcgccaagctcgccgggtgtggtgggggcagtaatcgctccggcttgatcgagaagcttcttcgtcccaggagactccatggccttgcgagaagcggcattcagcttctcaactatttgctgtggagtaccggcaggcgcgagcagcgcgtaccaagctgttgcaacataccctggcagggcagcttcagccaccgtcggaatgttagcgagagccggaatgcgatccttcgaagtcaccgccagcgcgatgaggtgacccgactgcacgatggggatgccggtcgcaagactcaaaaagatgatcgggacatgacccgcaataacgtcattaagcgcgggcccttcgccacgataagccacaccgctcatctgcagctgcgccatcgatttgaacagctctccgccgagatgctgtgtagtgcctgagcctccgtgcgcgaaattgtgcttgttgggctctcttcgaatcaactcaatcagttcgctcaacgttttcacacccagagcaggatgcactgcgattaagttcgatacgaacgcgatgcgggtgattggggcgaatgccgtggtcggatcataaggcagcgacttgaagagcgtgacattgcctgcgagcggtccattcgtgccgaagccgatcgtgtagccgtctggaggggacttggcgacggcgtccgttccaatgtttccgcccgcgccagttctgttctcgacgacgactgtttgtccaagtacttccccgagttccttagcgaacgttcgcccaagcgcgtctgtcgggccacccgcagcaaatgggataatcaaccgtatcggctttgacgggtacgtatcagccaacacagccataggtagcgagcttaggatcagagcgccaacgattgccgaccaactcttcatgtaaccctcccgaagtcattattttttggtagtcagcaaagcgtgtgccacgcacgttggctgtccgcatggccgcgataagtaagaaagaagccagtgcgacggatagatgttgtggccgccccggattatcaggtccttgaggcgcccctcgatgcggagattgcctttggcgtccatgacgccaagatctccggatagaaaccagccgtagtcgacggtcgcacggtcggtcccccaaccgtcttcagtcagaagcgcccgcgccgacagcgtgttgagaaggtcgccgacctcggcgcatgtgtaggtcttgtggaccgaggggttgcaggcgatcccttcacgcgcgcaggcgaggaacatgacgaccgcctcgatgcggttggacaaccacatcatcacgcggtcgctgccgaccagcccgtattcgcgcagatctgccgcgacaccgtccgtccaacgcttgagctcaccccacgtcagcgtttggcgagcatcctgcagcgccacggcatcaggccgctcggtcgcatgactggtgagcagactgtagaaggtgtcttcgcgccacatccgttcgctgtagtagcgctgcgcgctcgcagggtgatggagagttaagtacggtttcatcctatctcgcaatgcagcattcgagaactgccttcatgggcgttgctgctatccagacatcagcaacacccgtgccatttcgccgctgctgctcctgggtcgtggaactccttgttttgcaggggtagcctttggagcctcttaaatttgtgtcctcaggagcggcaaagtttcttgagcggcgtcctcactgtgctcacgtgtcctcaacaaggacactgaggaaatgcctaatccgattaccgccacgattgccggtgtgcttctcttcgacgctgcggctcgtgtaatcgcttcggtcggcgtgggctccgatccacgtctgaattcgttgaccgcagatcaggcatggatggccgaggcccgcgagcggcgcatcacgacgctgaatctcgatcgcaagatctacatggtgctggtcactccggccgggtccagagagatgctcgttctcagcgaaacgccgggcgacgcacttctcagcttcatcggcagcgtcgatttctcctgagacatcc

SEQ ID NO: 213 - DNA, 45076 bp, Bradyrhizobium colbertium
  misc_feature (42795)..(42804): n is a, c, g, or t
ggcagcgtcggtcagtcggttttcggactggcccactttgccatttgtcacagaagttatgaagcgcggatcccagtgccagcgaagacgtccgtcatcgcatcgtctcaaatagcggtcgaggctctccgagcctttccgtcgccgtcgatttggcaaatagttggcgatcgcctcggcggcttcatcgggcgaagcaaagccgtccgccaaatgtgccctcatgaaatccaggacgtgcgcaacgccgaccggctccatatttggtgtaatatctacaagcgtaagcgaagtgaaggatcctgagcgaagttcaccttcggctatcaagcccgccaggccgccgagggaagcgccgacgagagctggtttctcgtctagttgatcagacatcgcaaggagatccatcgcaaagtcgtcgagttggtaagagcccgatggcgaccatgcactttccccgtggccacgcaaatccatcgcaattgcactatatcctgcctgcatcaaggcccgtgcagttcgagtccacgccaagcgggtctggccccctccgtgcgccagcaaaatcggcgaaccctcaccaaacacgtcggctacaatcgcgtgtccctgagccccgcaaaaaatcttctgttttttcacttgcgtcctcaactatcgtcacaccgcgctcaagttgttccttattgaaacggcacctcgaaataacgcgcaacacctggcaatcgccaagtcctctctaagagttgtcgaatttgactgcggcgcgatcgatttcgcccttggcggtcctcggcagttgatcgacgaaaacaatgtgctttggcttcttgtagcgtgcgatctttccggcgacgaagtcgatgagctcgtcggcggtgacattcgcgccagttcggcgcacgcagatcgctttgatggcttcgctccactggggatcaggcacgccgatgaccacgacgtcggcgatatctggatgttggagaatcgcgttttcgacctccgccgggtagacgttctccccacccgtcttgatcagctctttctcgggagcacggccggcataccagagatagccatcggcatcgaaatagccgatgtcgccggtgtgatgccagccattacggaaggtgtgggcagtatcggcgtcgttattccagtagcctttaaaaacggtgggaccacgcaccacgatctcgccggtttgtccggtgggccttggtttgtcggcgctgtcgacgaccgtaatggtgcgccagaacagggggcgcccagctgatcctggccggttgcggtagggcgacagcgttgcgaggcccgatgtctcggactgtccgaaggctgcccagaataccgcgtgggggcacgctttctcgaagcgttcaatcgtcgccggggtatccagtccggtcacagcacgcaacgtcttcaattcgtcgcccttggcctgatccatcaggcccgccagcatcggcgcgaactccgacatgacggtcaccctctcggcggcaatgtcgcaaaccgcctgttgcgggtcgaatttcgaagcgatgacgctggcgccgccagcctgctgtaccgtcagcatcaggccaaggccggcgacgtggaacagcggcagcacaccaagattgacgtcgcgctcggtcaggctccaggcctgcaccagcgagctgtgcgccgttagaaggttggcttgcgacaacagcgcgccgcgcggccgcccgccgacggcggcggtgtgaatgattacgaagccatcatcggcgctgaagttcacgtcagacatcgacgcgtccgaagccgcaagatttgcgagcggcgcaaacggcgcagtgtgcttgccgatgccaaaatagctccggaccgaaggtagcgacggttttagagccgcgataatctcctggtattctgcccccgccacaaccagcaccggcgcaccgtcggcgaggacgtagccgatttcttcggcgttgagccggaaattaaccggcagcaggatcgcgccgagccgtgcgaccgctccgatcacatcgatcatttcgagcgagttttgcgaaaggatggcgacgcggtcaccggattttacgccctcgcgtgctaggcccgccgccagccgctcgacccttttcagatattcacgatgggtgatgcgctggccttcaaaaacgaacgcggtgcggtcgggaaaaaattccgcattgcggcggtacacgtcgaggaaagtaaattctttcaggggcatcgagtcctcgatgttatgcacgatctatctaccgcaaagtgctccactcgaagaaggtcttcgaagccgtcgctcgcagcgcgctttgtcaactctcgaattttggctcacgtttttcgagaaaggcagcgataccttcctgtgcgtctcgatgcatgaataggagcggaaaaccatcgatggcgtgccgtatctcatctccaccgaggccgcggttgtaaaacgatttggccatctgcaccgcaagctttggttttgatgcaattcgttcggcaaatgccagggcgtccgtgagcagatcgccgtgaggaaccacacgtagtacgaggcctagtctgaatgcctcatccgcgctgattggatcgccgaggatactcatttctttggccttggcgcggccgaccatatcgtgcaggcgtacaatcgcaaaaccgggcagtagtccgagcttgatctccggtaccgcgaagcgtgcgcgatccgatgcgatgataaagtctgaagcgatcgcgagttcaaagccaccgccgaacgcaataccattgacggcggagattacgggtttgcggcaattttccggtgccgctaataccgccaaagcctcgatcataaacttgcgtactttgtccggatcaaagttgaagccgctaatatcggcgcccgcgcaaaatgccttgtccccgttgccggtgatgatggcgacgcggacgttgtcgtctgcatccactttcttcaggccatccagaataccctcacggatgcctgtgctgagtgcgttaagcttgcccggctcgtccagcgtaaggatggcgatcttccctttagtttcatagttgacgctgcctagtctcatcgcagtctcccttacgttatagcgccctgtctttagcgaaacgcgctgaaatccggcttgcgcttctcgaggaatgcattggcgccttcctgctgttcttgtgtcgtaaaataggcgggtgcgacctcgcggacgaggtcatccatgtcgcgctccatgatcggcgccatgtgatagtagaatgagcgcttcagaatcttcaggcaagtggggctcaaagccaggagttcgtcgcaatacttccgcacctcgacgtcaagttcggccatcggaacgacggaattggccagtccccagtcgagcgcttgtttggcggtgtagcgtcgcgccagcatccagagctctcgcgcgcgcttgtggccaagcacattggcgctgtgcgagacgatgtagcctccggccggggagccgacacgtggaccattctggccaaagatcgcatgctccgcggcgatggtgaaatcgcagaaataggcgatgtggtgtccgccgccaatcgcgtaaccgttgacacgcgcgatcaccggtttcgggcattcgacgatgtggcggttaaagttgaatttcagtccttcgagcccgctcttgccgccggcgtccttctcccagttgacgtcgccgccgacgcagaacgcgcgctcgccggagccggtgaggacgatgacgccaactgttttgtctgcggttgcctcgaggatcagccgctccatctctacgatgttatcgccggtaaaggcgttgagggtctttggccgattgatggtgatggtcgcgacgtagtccttgacgtcgtacaagatctctttttcggacacgatggaactccattttgttctggcgaaattaacggccgacgtcagccgatcatggtgtatccgcctgacaccgacaggacctggccggtgacatgacctgcggcggcggacgagaggaacactacggcattggcaatatcgtttgggcgacccagcttgcgcagcggcagcgccttggcgactttctcgaattgctccgccgtgaacattgagtctggctttgtccacatgctgttggcgccgacttcttccgtatccacgggaacagtgacgccaggacaaacgacgttgcagcggatgccatagcggccgttctctttggcaatggtcttcatgaaagaattaacggcggccttgacgccaccatagaccgcctcgcgcggctcgcccgagcggcttgcgtcggaactgatcgacacgatagcgccggcacccttcggaatcatgatatcgagcgcacatttggtgcagttaagcacgccgacgtagttgatcttgataatcttgtcccagaactcgggcgttgtttgcgtaaagaacatcagctgatcccagcctacgttattgacgagcacatcgaccgtgccatgcttatcggtagcggccttgaacatggcgtttacctgatcgaaatcggtcacgtcggtcttgattacctgaatgctggcagcgccgttcttccgcgcaagttcggcaactttctccgcctgcgcctggtcgagatcgccaaccgtaatgttggcgccctcggctgcaaacccgagcacaatggctcggccgatgttggagccgccgccagtgacgacgaccgatttgcccttcagattaaaatccatacttgccactcccggttctgtcattgaattacggttgctgctctggctccacgaccacgacaaccgcgttgcgctcgacggtctcgcccggccggcaattgactgccgtgaccacgccatcggtttcgcaattgatccgcaactccatcttcatcgattccagtacggctgcgacatcgcccgccttgatcgtatcgccgactgcgacgttgaccttcaggatcatgcccatcataggcgcacgcagctcgccgctggtttcggcgacagcgctgatgtaggtaagataggggattgccgtcagcgtgtggacgccgcggcgatggtggacaaagatggtttggttttcctgataaatgcgcaccgtctcacgccgcgcgccgacaatcgccgtgaagcagtcgtctttgagcgggatgagtctgaccggtagcttctcgtcgttgacgccgacaatcatcgagccgtcggccttgagcggtgcgaatcggatctccgcgcttgcgcccgcggtttcgaggtgcaggatcggaatcggtgacaatccgtcgccacccgcggccatgtgccatccagtcatttcgcgcgactgccacggcccccttgcgaggggctgtcgttgccggatcatccagaagtaggcgcccagcgccaacgccccggcgtccagattctttgccttgtcgaccaactggtcgatttgctcgtcgatcaggcgtgtgtaaaaggtggcactgcgcgtcgctggcaggccgagcaagcgcttgagaaatccttgattggtcgtaattccgaaaatcgaggtcgcgtcgagagcccgctcgagtttatcgagcgcctcattgcgcgtttcggcgtgggcaatgagttttgccagcatcgagtcgtaatacggcgtgactaccgacccgctttcgacgcccgtctcgacgcgaacgccgtcggcgggaaatttgacgtaagcgaggtctcccgtgcaagggagaaaattatctgccggatcctccgcacaaatgcgcacctcgacggcatgcccgctacatgtcaccgcattttgtgtaaacggcagcccttctccggcggcgatgcggagcatcacctcgacaatatcgatgccggtgaccatctcggtcacggggtgctcgacctggagacgcgggtttacttccagaaaatagtaggtgtctccgctcaggatgaattcgacagtgccgaccccgcgatagttcaggcgcttgccgagccgcaccgcgtcggcggccattttgtcgcgaagcgttgcggcgagattgacggcaggggcttcctcgatgagcttctggtgacggcgctgcagggaacattcacgctcgagcaggtgaagcacgttgcctttgccatcgccggcgatctgcacttcgatatggcgcccgcgttcgaccagtttttcgacgatcagtccgggatagccgaacgaattcttcgcctcacgcatggccgattcgatctcattggcaaggccatcgagatcggaaacggcacgcatacccttgccgccgccgccggccgctgccttcagcatcaccggaagcccgacttcctggacgatccgggcgatctcggcagcatcctcactgggcttcttgctgccggggacgataggcacgtcggccgcctcagcctctttcttggcagaggccttgtcgccgagccgttcgatcacgtccggcgtcggcccgataaaaaccagacctgccgcctcgacggcgcgggcgaacgtggcgttctcggccagaaatccgaagccgggatggatggcctgggcgccggtcgctttcgctgcggcaatcaccgcatcgatccgcaggtagctgtcggacgcggcggcgcctccaatctctatggattcgccgatcatcttcacatgcaaggcgtcggcgtcggctgtggagtgaatgccggcaaccgcgaccccgagccgatggcaggttcgcgcgatccggcaggcgatctcgccgcgattggcaatcaggattttcttgaacacggaacgatatcctctgtcatcacatcctgaacacgccgaagtctgtttcctgctgtggcagacggccggcgagatcaagcaagagggccatcacgtggcgggtctcgagcggatcgatcaccatgtcacaccaggtgttgcgcgcgaagttgtaggcgttcgcaaaatcctcaaaagtcttgcgaaccggagcgcgataagcctcgcgctcttcgtcggtccagctcgtgccatcgcgcttgtggatatcgtccttgaccatcgcgagcgtgttggcggcctgatccggccccatgatcgcggagcgcccgtgcggccacatcatcatcgcatgaggtttgaaggcacggccgcacatcgccagatagccggctccgtaggaattcccgatgatcagcgtgtatttcggcacgttggcgctggccattgcggtgatcatctttgcgccgtgcttggcgatgccgccttcttccgcctcgcgcccgaccataaagccggtgacgtcggccatgaacagcagcgggatattgcgcttgcagcagaggtcgatgaagtgagtcgccttcagcgcgcattcggaaaacagcaccccgttgttacagagaatcccgatctcgaagcccattatgcggccaaagccggtgatcagcgtctcgccatatagcggcttgaattcgtgaaactcactgccatcgaccaaccgcgcaacaatctctcgattgttggtggggatacgcgggtccgtgctgatcagcccataaatatccttggggtcgaagcgcggctctcgcggtggcgccacgttccaccgttgcatgggaatgtcaccgagattggcgacgatatcgcgggtaatcgcgatcgcgtggctgtcgctttccgccagatggtcggtgacgccgctgacgcggctatgcatttcaccgccgccgagcgcttcgacgccgacttcttccttggtcgcggcatagaccagttgtggtccgcccaggaacatggcgccctgattgcggatgatgacggtctcgtcgcagagcgccggcatgtaagcgccgccggcggtcgagggcccatggacgattgcgatctgcgcgataccctcgctcgacatccggatctggttgtaaaagatcgatccgaactgtccgtcgtcgggaaaaatgttgggctggtccggcaggttggcgccgccggattgcaccatggtgacgcaggggaggcggtgttgccaggcgaatttctgtgcgcggacgtgcttcttgcaggtgatcccgtagtaggtgccgcctttgaccgtggcgtcgttggcgatcagcatgcaggcgcggcccgacaccattccaacgccggtgacgatgctgccgccgggcggcacgccgtcatacatgccttcgcccgcgaactggcaaaattcgaggaacggcgagccgggatcaattagcgcagcgatccgttcgcgaggcagtaattgcttgcgctccttgtgcagcagccgcgcccgttccggaccgccgaccattgcagctgcccggcgctcatgcagatcggcgattctcaagccgtaagcgtcccggttacggcgatactcttcgctcgcagcggacacatcggacttcatgagagccattgcagacaacctcgttctttggggggatctctgaacaattgaagacgaatcgccggtagaatcgcgcctcaccgttccgggtcttgctctaataactgcgaggcaagcccatcacgtgctcgccgatgtagttgagaatcatttcgcgattgagcggcgcggtcttcaacagccgcaccagcggatagatatcgaagatgccgtactccttggtgaacccgttgccgccgaagcattgcagcgcggtgtccaccgccttgatgccggcgtcggctgcggcaagttttgccatgttggagaattcgccggcttcgcggccctgatcgaagatccaggcggcttttagtgtcatcagcgatgccaattcgacatcggtgcgggcgctggccaggggatgctgcaagccctgataagatccgatcggcacgttgttgaaaacccgccgctccttggcgtattcgactgcccggttcagggcatagcggccgagaccgcaggaaatcgaaccgacaagaatgcgttcgggattaaggcttttgaacaaaatgccgaatcccttgtcgacttcgccaacaatgtcctccggcccaagatcgacttcgtcgaaaaacagctgccattgtgtttccggggccggaatgctcactggaatgtattgcttctgcacgcccttggctttcaggtcgaccacaaacagggtgaagccatcggttttcttctgaacctcggtatgcgctgtcgttcgcgtcaccaccagcgcgtagtccgcgccatcggcgtcggtgataaatgtcttctgaccgctcagcgcgaagcgattgccacgcttctttgctatcgtggaagtacgaatcgtgttggttcccgcgtcaggctcggtgatcgcgaagcaaaagcgcgtcttgccgccacacgcatcgggcagatagcgcaatttctgcgcttcgctgccgtatttggctatgaatcccaagctcattgccgcgccgacgacgaggtttagcagtggaatgccattgtttgacaagccctcaaggaacaggtgcatctcgaccatgccttgtcccgagccgccgtattcctcaggcaccatcgttccgacgaagccatcctccgcaaccttgctgtaaagggcttgggggaatacgtgcttgtcggcgcattccatccagtatttgcgatcgaattgcttcgcaaccatatcgccgtattcgtagatttgccgctgctcgtgcgtaagatcaaagtccatgtgggaactccgccgccggccgaaaccgcgttgttctaagttgagaattcgaaaccctctcgggaacaccgtcgagtttattgtttgcgaggcggccggctgtcggtcggcagcatcaattgcttgctatctttaggcagaagcggctaggatttcaacctaacaatcgttcgaaaacgaacgaatgttagaaaataatgaagaccgtcgagcccgcatttcctggcttgtgatcagttttggggaatagccaattgaccgcgatgaaatccgctgtcgcgaccgggtcggacgagttcaagctcaatcgcgctcattatctggcgcggatcgccgatctccaaaggcgtcgggccgaggccaatcagggcggctccgccaaggctcgcgccttgcataaatcgcgcggccagctgctgccgcgcgaacgcatcgcggcgctgatcgatcccggttcgccgtttctcgagttcggccacctggcgggcgaggggatgtacgacggcgtgccgccgggcgcgacaattatcacgggcgtcggacaggtctgcgggcgcggttgcatgcttatcgccaacgatgccacagtgaagggcgggacgctgttcggcatgacaacgaagaagcatacccgcgcccagttgtttgcgtggcaacaccggctgccctgcatcaccttggtgcaatcaggtggcggcttcctgccggacatcgccaatatctttccggacgaagggcaggccggatcgatcatgtacaatcaggtaaagatgtcggccgagaatatcgcgcagatcgccgtcgttcacggcccttcgaccgcgggcggcgcttacattccggcgctgtgcgacgaggtggtgatcgtacgcgaccagggcgcgatgtttctcggcagcccgcaactggtatttgccgcgaccggcgagaccatcgagatcgaaccgctcggcggcgcggagatgcacagccggatcagcggcgtcaccgaccatatcgccgagaatgacagccacgcgctggcgatcgtgcgtaatatcgtcgccaacctgggagagccgccgcgattgcgctggacggtcgagcagggcgaaccgccttgccatgcggtcgaggaaatctatggaatcgtcagcgctaaccggcgcatcccaacggacaaccgggagatcctggcgcgcctcatcgacggcagccgctttcaagacttcaagcatcttcacggcgaaaccatgctatgcggatttgcccgcatccacggtttcgaggtcggcatcctggccaataacggcgtgctgttttcggaaagcgcggtcaagggggcgcacttcatcgaactttgctgcaagcgcgacattccgttgctgttcctggtcgatgtctccggctttatggtcgggtccgcagtcgagcgtcagggcattgccaagcatggagccaagttcatgaccgcgatggcctgcgccgatgtgccgaaatacactatcattaccggcggctcttatgccgcggcttatttcgcaatgctaggccgcgcgttcaaaccaaacgctaccctgatgtggccaagcgcccacgccgccttgatgggaccggagcaggcggcgacaacgctaacgatggtgcgcgacaatatccatcagcgcgaaggcagttcttggaccgacgaagaacgtgaagagttcaagcggccgatcctgagggacttcgaggcgttcgccgatccctataactacgcccgccatttgtggtgcgatatggtgatcgaacctgcggagacccgcgaggtgatggcgctgctgctcgacctcgccggccggacgcctgccaagccgacgagattcggggtgttccggatgtagctgctcgcctgtcaggctaagcccgccggaagcgcggcagcgtcacttcctcgctgattttttcgcagacgagcatgacgtccatgtcgaacgtgacctcttcgggcttgccgccggtataggtgctgatcatccgcgggccctcctccagatcgatcaacaaaacagcgtagggcagatcggttttgaaagcgggtcccggtgcgcgctgtaccacgctgaaggaatgtaccttgccgcgcccgcttgccggtcgatgggcaagattttcgccgccgcactgccggcacatcgcctgctggtaatattgcacgtggccgcaatcggcgcagtgctgcagcagcagcacgccgtcgtgcaggccgcgccagagggcggcggaatccgcgtcgggcgtcggcaccggcttcttcatggcgtcttcggacgagatcacagcgtgttctccgtgcccagaatggtggtggcattggttgcgaaacccgcgccgaggctgtgcaccagcccgagttccgcgcccggcacctggcgttcgccgcattggccgcgcaactgcgcgatgacctcatgaaaatggaacagcgatcccggcattcccgaatgggcgaacgacaacaatccgccatgggtgttcgatggaatctggccgccataggtcatatggccgtccgcgacgaaacggccgccttcgcccttcgggcaaaaaccgagatcttccagcatcatgatgacggtgccggtgaagcagtcatagacgccggcgacgtccatgtccttggggccatagccggccatttcgtaagcctttcggctcgacgcgaccgcgccggtttcggtcagcgagggcatcaggaaaatatgttcgtgggtgtagcattcgccgccgcccagaatgtagatcgggcttttgatgccgagcgccttggcatgttcggccgatgtcagaatgaatgccgcgccgccatccgatatcagcgagcaatcgagcttgtggtagggcgtcgtcaccatagctgagcttagcacgtcgtccaccgtgatcgggctggtctgctgcgcaccgggcgtgcgcatagcatgacgccgctggaccacggcgacttccgccaactgttccggtgtggtgccgaaatccttcatatgccggtgtgccgtcatggcaaaggtattcgcgacaggaatgccgaacggcatctcgtattgctgatcacggctttccgtcatcgagcgcagcgccagatccggcgtcaggccggtcagcaggctgtcgccgccgaccacgagtacgacctcggcgaggccgccatgaatggcagcggcgccaatattgaacatcgtcgccgccgtcgcgccggatacctgaagcgtgttcgaaaaggtcggctgaatacctaaatactcgctgaacgcaacgctgaagcgatggaagggagaagcgaaggcatggctcgacagcacgccgtcgatctcgtttttcccgatgccggcatcggccagcgccttcttcgcggcgtcggcggcgagccataacgggctctttcccggcaccttaccaaccggcgacattccgataccgattaccgcgaccttgccgcgtagcgtttgtttacgaatggaaagcatttggtctccgcccggcgtgatgcgtgaaggtcagtttccggccgtcgtgcgtgccgaggcgacgcccgtgctgccgccggaaaatcccaagaacttggcgtaggtatcgactggcacccgcctggtgacgagcttgttttcgggcgcagtcgtgtcctcgtaacccagcgccacgccacaaatcaggatttcggtgtcgtcaaacgaaagatgcttgcggatgatgtcgtggtaccaggtgaacgcggcctggccacaggtgtgcaggccatgaccgcgcgcggcgagcaggatgttctgcaagaacatacccatgtcgatatagctgccggtgttcaagcggcggtccatcgtcacgaaaagtccgaccggggcgtcgaaaaaaagatagttgcggttcatctgcgatgtgcgtgcggcaacgtcgtcgcgagcaatgccaagctttgcgtaaaggtcgtagccgagctcgcgccgacgcccgatatagggctcgtgccattcggtcggataatactcatattccggccgatgcttgtccggttcagtttcggcagctttcaggatgtccgcgcagagccgatccttcacctcgcccgcgatcgcgtagaccttccacggctggatgttgtggccacttggcgcacgcgccgagacctcgatgatttttcgcacgaccggttctggaaccggcttgggaagaaatcgcctgaccgagcgccgcgtcaaaatggcttcttcgacattcatgtttccgtctccgattgcggtgccttgccgcgagcagttttcgttcgacgaaaattgcgacgcgaagagctaatgggcgtgtccgtattagctgtttacccgttgcctttcgcccgccagcctggcttcgagctcgtggcgctgaaccttgccgctggtggaccgcggaaattccgaaaaatcgatgaaccggaactgccggggacatttgtatccggcaagatcgcgccggcacagagcaaacaggtccgcctcggtgaccgtggtgtcgcggcgcgacacgaatgccacgggaacttcaccccatttcacatcggggacacgcacaaccgcggcctcggtgatccctgcatcactcatcaaaacgcgctcgatctcggctggataaacgttttcgccgccagtcttgatcatgtacttggcgcgatcgacgaaatcgagcgagccgtcatcattgcgccgaaacacgtcgcccatgtgaaaccacccgccgcgaaaatcgcgcacgttggtatcatcagctttccaatagccggagaataaagttgggctgcgaatagccaactctcccggtgcgccaatcggaacctccttgtcggcagaatcgacaagcttgatgtcgcagaacgcgctttgttgcttcgccaggctggcaggtatttcgcctaccgggatcaacgatctggttgccggcggcaagccagtctcggtcgaaccaaaactgttgacgtagggagctcgcagcaggtcagtgacctcggcgatgacatgcggagggaccaggtcggccatcgcgccgcaaaggccaacgccttttacggtcgttttttgctccttgaagccggcgatgaatgcttcaatcatgcccggaatcaagacaaaccagccgatccgatggcgctccaaagcagacaataacggctcgatctggaagccatcgaccacgacgaccgttcccccgcgcaacagtgtcgcgagactgtggtccggggatgccatgtgaaacagcggcgcccaggccacaaaggtatcgtgatgcgaaatgttcagctcggaactgaacaccagcgcccgcatgatcatcgcccgatgcgaaatgacggcccctttgggttggccggtggtcccactggtgtaaaggataaccaggccgtcttcggattccgccgcaatgggcagcgcatgaccgttttgttcttgcaatatatgctcgtattgcgggccgatcttgataaccttgcggtcccctatgggagaaagttcgagatttccggccagttcttcttcaacaatcaagagcttcggtgagaccagatcgatacaataggcgagttcccgctgcgacaatcgccagttcaggcaagcggtgatgaccccgagattggcggccgccagctccacttcgagatactccggtctgttacgcgagagcaatgctacgcggtcgcctcgtcgaagatcttggctcgccagcatcgaggttgcccgatgtacacggtcaaggagctgcccatagctgatctgtctgccctgatactcgatcgcgaccgaagatttgtggatcagcgctctcgcgcgaaacagctcgccaatcgtgggactggcgcccgccctcgttgtcagagctttttcgtgcccgtctgtcacggcaaatcctccgaatcttgctctcgccgcccccgacgacggcctcaattgaaaagtataagcttgcagcctttcccgatcggttttaaattctaacatctgttcgaatgaattcatagcaggttcgtggcgaggacgtatcggaaggcaggagaaatctgccgactgcgatatgcatcgtcatcccctgtaagatttaacccgaccaagcaaatcaagtgtccagaagggaagccgatgtccaatcgttatgctgcttataccaaattgaagctcgactatccgtccaagcgggttctccggctcacattcgaccggcccgagacctacaattcggtcgacgccgagacccacactcagctcaccaatatctggcgtgacatcaacgacgatccagatgtcaacgcggtcatcgtgaccggagctggcaaagccttttcggcggggggcgatttcgagctgatcaagagtattctagacaacccggtcgcacggatgtcgacctggaaggaggccaaggatctcgtttataacgttatcaattgcaacaagccgatcatctcggcgatcaacggcgtcgccgtcggtgcaggtctcgtcgtcggaatcctggccgatatctcgatttgtggaaagtccgcgcgcatcgtcgatggtcatacgcggcttggcgtcgcggcgggcgatgtcgcttgcatcatctggccgttattgtgcggccttgcaaaagcaaaatattacctgctgacctgcaagccactgtccggcgaagaagctgagcggatcggtctggtgtcgctatgcgtcgaagacgcggacttgcagaggatagcgatcgagacggccgaggagctttctagcggcgcgcaaagcgcgatccgttggaccaagtacgctcttaacaactggctgcgcgtcaatggtccgctgttcgatacctcgaccgcgcttgagattttgggtttcaccggcgccgaggcgcgcgagggattggcgtcccatctcgaaaaacgcaagccggtgtttccgcaggattgcccgctctgattttcgcgcgcggcggtcatctcagaagggggccggaatttcacccggccttcttcttgcggcagccgttagccgagaattatttcatcgaactgacgatctcgcgaagcctgaatttctgcactttgccgctcggcgttttcggcaaggcttcgagcacctcaatgcgctccggccagtagttcttggctacagcgttctccgccatatacgccatcacgtcagctaacgtcagtaatgctccctcgcgcagcacgacacaggcacaggcccgctcgcccaagcgttcatctggcactccgacgattgcgacttcccggacggctggatggcgatacatcagttgttcaatctcgatcaccggaacgttctcgccgccgcggatgacgatgtccttggtgcgccccgtgatacgaatgtagccgtccttgtccttgcgggcgaggtcgccggtctcaaaccagccatcctgatcgacggcatagagatgcggccgcttgaggtagcccacaaaggtgccggggcccctcgcttgtaggcgcccttcttcatcgtgaggcaggactttgcccccgccatcgacgatcctgacttccataccctggcttgggcaaccgtcggtctcgaagactttttccggtggatcgtcgagcttggtggtcgtcaccagcccgttttccgtcatcccccatcccgagacgatgtgcgcacaaagattctgtgtggcctggcgcactaaaacacggggaattggggcgcctgccgatacgaaagtgcgcagtgaacgcagcgcttcaggccgccgctccgcctccgcagtcaaatccgccagaaacggcgtcgatgccatggtcatcgtcacgcgctctgtctcgacaatatcgaccgccttggctggattccagatatcctgaagaatgacccgtcctcccagatacagcggcagcagcaggccgacgagaaaaccggtctgatgggccatcggcgaggccatcagcacgacatcgttggctgtgagacggacgcgatcctcaaaatatcgcacgctgttcagcaacgtattgcctgtatgcatcacccccttgggctcacctgttgtgcccgacgtataaagcaattgcacgacatcatcggccgaggcagcggtcgctgcctcaacccgctttcccggcgaattcagcacggtctcgaagtcttgattgtcgcccgaaccgataatgacgacgtgctcaagtgtgggcaccttggccttgaggcggtccgccattgcggcgtgatcgaaatcgcgaaatcgctgtggaacgatcagcacgcgcgtctcggccaaggtcagcatgaattccatttcgcgatcgcggaaaatcggcatgatgggatttgtgaccgcgccgatccgcagcagtgcgaggtgaagagccatgaattgccaccaattcggcaactgatacgacaccacttcgccaggcttgacaccaagccgcaacaaattagccgcggttcgctcggcagcttgctgcagttcgccgtatgtcagcgccgtacgtcggttggacgcagcttcgtagccaacaaccgcgagccgccctggatcgtttctggcatgcctcgaaaaaaactcgagcaaggtttgatcgctccagaatccagcggcccgcatcgcttgcttgcgctgatctgacaagatcggatccatccccattgtacgcctctccttatgaaatccttggagtaccggggtcggggcccggtaaaaagtccgcttccacccagcccgacagctcgccattttctccgtggtttatgcggcgccaagtttctcgcgaagcctgtcaactgcttcgggattggcgagtgcggaaagatcgccgggatccttgctttcgaacactgctcgcagcacccggcgcatgatcttcatgttgcgggttcgaggcagatcatctacaaaaattatcttctccggccggtacgatgctcccatgccgctcacgatagcggatgagagctcgttgacaatttcactctcgacgttcgtacctggcatgagcacgcaggcacaaacgatcgccgaaccctttaccgggtgcggaataccgaacaccgccgcctcggagaccttgccggtgtcgatcaaaatgccttcgagctcggacggcccggtccgcttgcctgaaatcttgatggtgtcgtcggagcgcccgagaatatagtaaagcccatcatggccgcgcatcgcaaaatcgccatgcacccaaaggccgggaagcgtgctccagtagctttcgacatagcgcgcatcggccttccacaagctcttggtcaatccgatcgacgcctggcggagcaccagttcgccgacttcgccgggcggcaagctcttgccggacatgtccacgatgtccgcgccgacaccgagcgccggacgggagaacgaaccggggttcatcggatggttcggcgtccccgtgaagatgcaacctccaacctcggtgccgccggaaatgttgatgattggaagctttctcttgcagacatgctcgaagaaccattgccacggcgcgttggtccatgcctcgccgcccgacgcggtcatacgcaggctcgacagatcgtggcgctcgacgtcctgcgttccatagcgcatcaaactacggactatggtgggggatactccgagatagctgacgcgatgatcctggatcagccgccagaatcgtccggtgtccggaaaatccggcgtgccttcggcgatcagaaggctcgcgccggcgaaactgggaatacatgcgcacatcgcgccgaccatccagcccatgtcactgagaaagaaaaaacggtccgatgatttgaaatcggcgcaaatgatcatgtcgcgtgtgaccatagaaccgatgaagctgatatgggtccaaacgcaacccttcggttcgccggtggttcccgaggtgtacagcagaatcgcggcatcttccgcattcatttcggcggtcgcgatagcgccgtccttgccgatgacgatatcgtgccaccagtgatcgcggccctttcgcatcggggtttcgatcttaaggccttcacgatcgacgacgatcacgtgctgcactgtcggtgaggattcgagcgcgacgtcgaggacggatttgagcggtgccgcagcgccccgccgccaggtcccgctcgcggtgatgacggccttggcgccgccatggttgagccgggtttgcatgggagccggaccgaagccggagaacagcggcatcaggatcgcgcccaatttcagcacagcgaaaaacgcgataaaggtttccggcaggttcggcaaatagagagcgaccacatcgcccttaccgacgccgagatcacgcagtccctgcgcaagccgtccgacgccgcggtccaattcacgataggtaagcgcgcgctgttcgcgcttgtcttcaccctcccagaccaaaaatgtctggtcccatacgggcgtgctgcgatgcttgtcaatgcagttcagcacgatgttggtggtcccgccgacgcaccagcgtgcccatggctgcccgcgcgacagatccaacatttggtcgtaactgcgatagaatcgaacatcgcagaacttaaagacttcctccattagccatgccggatcggcctcagccttcgacgcgaggtgatcgtaatcgtcatatccggttgcgcgcaggaaagcggtcagattgcttgttgcaattagctccggcggaggtgtccatgcataggacgttggattattcatcgactacgttccctgatttgcagtcaagttcaattcgagattgacttaccggccgataggaacgcatgcccgatcgaacacgagacggtggacaggcccgcccgataagcatgtgtccagcctggacgcctaatgctaacgctctcgtcttgcgagttcaatcgattctaacaatcgtttgataaatctattcgtatggaacaacaaatgaggtatccatcttttggacgccggtcgcaacccgatttgacttgcctcaatttctaacgtctgttaggttagtgcaggtaccaatcgaggcacaagtgaaagtcaacccggacctcgcggaatttctcgctccaacgcattacgtggattgcgactcacctgcgattagagagtttgtctcgcgtgtggctggcgacaaacaggaccggtcgacggccgagaaggcaatcctcctatttaacgcggtacgagaccagatcagatacgacccctacgcggtgagtttgtccgaagccgattatcgcgccagcgagattctcaaaacgccttcggcgttttgtgttccgaaggcaatattgttgacggccgccatgcgcgcagcgggaatccccgccgcgatcggctttgcagacgttcgcaaccatctgaattcccccaagctgacggagttaatggggactgatctcttcatttatcacggctacgtcgcgctttggctcgataggaagatgttcaaagtgacgcccgcgttcaacatggagctatgtgaacgatttggagtccgacctcttatcttcgacggtacggccgacgcgttgtttcacgagttcgacacgagcgatcatcgccatatggaatatgtcaatgaccgaggttggttcgccgacgctccgataggcaagatgcttgaggactttcgcgttgcatatcccgcgctggtgacattgaatactggtggcgtcttaatagatgacgctgccttcggagcgcctcaatcaggggagtaggccggagcgaacgaaaccgcgggatttgactagccgaatccaggtgcgagctgaacacgacacttgggcgcgcagtttatcgatggcgcgatcggaatcgtccgattggccccagcccgaaaatctacgcacggcggcacgcgtctcgccgagagatggcaatgggggcgataggtacgctcattttgagatctgccgcaattcggaaggctgcttggcgtattgaaccgcgacacgaccgaccttttcacgtgcgatgacaagtttctgaatttgtgcggttccgtcgccgatttgcaggcccatcacgtcgaggtaacgctgatgaaacggcagatcggtggtgtaaccgtagtggccgtgagtgaggaggcactggtggatgatctcgcaggtcactttcggcacataccatttgcacatcgcagcttccgcggtatgtgcaagcccgcgatctctgagcgaaagcgtatagtagcaaagctgccgcatcatggtgagctgggtctcggcttccgcgagcggaaagctcacgccctgaaactgcgcgatcggccgctcgaaggcgagcctttcggttgagtattgccatgcttcatcgaccgaagcctgggcaggtccgatgcactcaaggccgatcaaggcacggctatagtcgaagcctgacatgatcttggagaatcccttgttctcctctgccatcaggcactcggccggaatgaagacgtcgtcgaagaacaccgagccgcgtccgacaggtttggtaccgatgtcatcaaaatgcgtccgcgtgattccgctctgcgccagatcgacaaagaatgcgctgacgccacgtgcgccgtcttcgaccttcccggttcgggcaaagatgactgctgcgtcgcattgatctgaaaaactcatggaagtcttttcaccgttgaggcgatagccatttcccgatttttcagctcgcaaaatgaggttggcagcgtccgaaccgccccgcggctcggtcaggccgaggccgatgatcttctcaccccgggccacttgcggtagccactcctgagcgatttcgggcgaggcgtgctctgcgagcattccgccgagcagtgacgccagaagttggacgtagctggcgttgaagtctccataagcgatctgctcgacaataatgcctgccgtcacgctgctctcgccaaggccgccgtatttttccggcagatcggcgccaatcaggccgagtgaccccatttgtttcagcatggcacgatcgatgcggtgttcccttgcccgcctctgatagtgggggcccagcttgtccttcgcgaaacgcttcgcggtttcctgaaaagcctgctgctgctcgctaagcgcgtaatccatcgcgattcctcccatctaggtgatcttcagttcttgcattcagtctaacaactgttagaaatttaacaaccagccacggaggcaagtccatgctgacgccgaccagccccggaacatcgctttaccctcatttgctatcttcgctaaaggtagggcggaccacgttgcgtaaccgcatgatcatggggtcgatgcacacccgtctcgatatggaggacaacggcgtgcacaagatggcggttttccttgccgagcgcgccaagggggagataggactcatcattaccggcggttatgcgcccaacagcgcgggtctgattgagcctggggggccgattttgaccgaacgtgcgcaagctcgcgaacttcgtcgcatcactgatgctgtccatcagcacggtggtaaagtctgcatgcaagtgttgcattcgggccgctattccaagcaaagggactgcgtcggtccttctgacatccccacccgcatcaatcggtttcccccgcgtgcaatgactggggcagagattgaacagacgatctcggattacgtgcgctgcgcgctgctcgcaaaggaggccgggttcgatggcattgagatcatgggatcggaaggttacctcattaatcagttcacggtggtgcgaaccaacaaccgtaccgatgagtggggcggatcggagcagaaccgccatcggctcgcggtggaactcgtcaaacgctcgcgaagcgccaccggcgacgacttcatcattgtctaccgaatctcggcgctggacctcgtcgaaggaggtgcaaccggcgaggagattgatcggcttgcccaacgggtcgaggccgcgggcgccgacattctcaacaccggtatcggctggcatgaagcgcgcgttcccacgatcgcttacgtcattccgcgcggcgcatggcgttttgcggcatcgcgtctgaagaaagcggtcaggattccggtagtggcatcaaatcgcattaatacgccggataccgcagaagagattctggcggcgggggatagcgatctaatatcgatggcccgcccgatgctggccgatccgcacttcgccaggaaggtgcgggagggcaacgccggcaaaatcaacatctgcattgcctgcaatcaggcctgcctcgacctgatcttttccgagcggaccgcgagttgcctggttaatccgcgtgcctgccgcgagactgagtttgaggacggcccggctcagacctcgcgcaggatcgcagtgattggcgcaggcgcgggcggtctcgcagctgccgcggaagccagccgacgcgggcacaaggtaaccctgtttgaggccgctgatcgcataggcgggcaactcaaccttgcccgagcagtcccgggcaaggtcgagttcgacgaaatgctgagttattacagcggccaaatcgccgatggcggcgtcgatctcaggctgaattctgctccatcggttagtgacctgaaagacgcgcggttcgatgctgtcgttgtcgcctgcggcgtccatccccgtgtgccggagattcccggcatcaaacatcccaaggtggtgttctacaacgatttgttgagtggcaaaagccacgcgggacggcgagtcgccatcatcggcgcgggaggcatcggtttcgatgtcgccgaatacctctgccattcgcagcctgatgaaccgccaaaatcacgggcaatggatattcgtgagtttcagcaggagtggaatgtcgatgccagccttacgaaagctggagggctatcgggcgatccgctggcaccaaagccaagttcgcgcgaaattaccatgctgcagcgcaagaagacgcggcctggcctcggtctcggcgtctcgactggttggatcctacgtagcagtcttgaaaagcgcggggtcaagattgtcggaggggttatctatcagcggatcgacgatcaaggtttgcatttcgtggccgagggtgagccaagtacgctcgcggtcgatacgatcgtagtttgcgccggccaagtatctaaccgcgatatgctcaccgaactgctcaagaccggaatcgagacgcatgtcatcggcggcgccaaggaggcttccgaactcgacgcgatgcgtgcggtcgaggagggcgtgcgggtcgcgcacgcgctttaaaggggggaggagcctgagatgagttcgcaaagcagccagccgagttacgggttctccgacgacgaactctccacgatcccgacagtgtaccgacctgatctgttcaccggccagaccatcatcgtcagcggcgcggggagcggactcgggaaggcgatcgcattcctgtttgcgaggcttggcgccaatctggcaatctgcgggcgcgacgccgagaagctcgcacacgtcgttccggatctagagagtctcggcgcccgcgtcttcagtagaagtctcaccatccgcgaccccgatcaagtcaacgaattcgtcaaagacgtctgggatcattttggtcgtgtcgatgtgatgatcaataatgccggtgggcagttcgcccagatggccatcgacttcaagccaaagggctggaacgcagtgatcgataccaacctgaacggatcgtggtggatgatgcaagcggcggctcgcgagtggatcgagcgcggcaagaccggcaatatcgtcaatatcgtggcattgatctggcgaggcctgccggggatggcgcacaccgccgcggcgcgggccggggtgatctacgcgtccaagaccgtcgcggtcgaatgggcgccgcacggcatccgggtgaattgtgttgcccctggcgtcaatgaaaccacggcattcgaccgctatgttccggaaggctccgcgacctacaaggaagcgaatcccatgaaacggcacggcgatgcatgggatatcgccgaggcctgcgtttatctcgccgcgccgtcagggaaattcatcacgggcgaaacgctttcggtagacggcgggcagcaaatgtggggcgatccgtggcctgccggacgtccgaaatattttcgcattggtcagacgtaaacaagctcccgaaatcgaatatccgatatgccgccgcagcgttaacgattttgaccgctacgacaatcctgcatcgccgcgttcgcgtttggcaaatttaacggcgtcgatcatatcgcgggcgtcgtgggccagatgtagcgtctcgccgccgtcgatgtaccagtcctcgccggtgacgaattgaccgagcggcgaggacagaaaaatgattgctgcagaaatatcctcgacgctgcccatgcgccccagcacgttgcggttgagcctgacccagtcgtccggcggtatcggatagcggccaagcgcctcggtcttgatggttccgggtgcgacgcagtttaggcgaataccgaactcggcccactcgtaggcgagcgttcgcatcatcgcggtaacgccgccgcgcgctgccgcggtatgcacgaagccgccaaggccgctgcggatacaggcggttacgaacacaatcgatccgccattcgccaacatgaaatggtccgcggcagccttggttacctgccacgagccgatcaggttgttgcggatcacggtttcaaagcccttgttgctgagttcgcgggctggcgtgacgaattgtccgccggcattattgacgaggatattgagcccgccgaactcggctttgatcttctccatcgcgcgttcgatcaagtcgggttcgcgaatgtccgccgacacggcaaatgcctcgccacccgcgtcgcggattacctttgcggtgctctctatcggatcgatgcggcggccgagaacggcgatgcgggccccgcagcgcgccatctcaatggccgtggcgcggcccattcctgtgccgccgccggtgacgagtgcgacctggcccttgagaagttccggcgcgaagcgcgtttttgaaggactctcgtgcatcaccaatcccatgcctgaaaatacttttgcgttcggtcgagtttaatatattctaacatatgttagaatacataaaaaggcagatcgatgtcagacaatgaacctatacgttattcgctcgaggatggcattgccacgattaccatcgatcggcccgcgcgtaagaacgccctgtcggttgaggcgatgaacggtttgaccaatgcctgggagcgtgtcgaacgggattcccaggcgagggtggtgatcctgacctcggctgactgcggcgtattctccgccggtctggacctcaggcaggcagccgagatcagggcgcgtgacggcgtcgacatactgaccctgatgcgcgatccgatgcaaacggccatgcgaaccgtttcaaagccgatcatcgcggcgatgactgggtcgctgatggcgggcgggatgctgctggcgctgaagtgcgacctgaggatcggcttacgcggtacacgcgccgggattaccgaggtcaagatggggcggggatcgccgtgggcagtaccgctgctctggatgttgccgcaacccgtggtgatggaactcgtcttgaccggcgagaccctgccgatcgagcggctcgcggagtatggtttcgtcaattatctggaagaaacacccgacgctgttcgtgcgcgtgcattgcaacttgcgcgcaagattgtagaaggcgcaccattgtcggtgagggcggccaaggccagcgtgttggccgcgatggacctcggctgcgagaaggggctcgttgaggccaacaggcttcatgtcgaagcctacgcaagcctcgatgccattgaaggcccgagagcctttgcagagaagcgtaagccggtgtggcaaggtaaataaggcaaggcagatgaggattgtgccgaacgatgtccgctttcatgctttcgagttgatagcggataccaatcctttccgacaatttttccttacccgcagggtcaacgatgagcacgcaccacgtcggcaccccgaaacgctcggcttatttcagagaagagcatgaactgctgaaagcccagatacggcgattcgtcgaggaggagatcaagccgtatgcgctgcaatgggagcaggacggcatggtgccgcgcgacgtgctgcggcgcatgggtgagcttggctttctgggcatccgctattcagcagaatatggcggctcgaacatggatacgttggccaccgttgttttggccgaggaactgggacggtcgacgttctcgggagtggcgatcacggttctggttcataccgacatggcgtcggtgcatctctacaacgccggctcgcaggccttgaaggaccacttcatgccggatgtcattgcagggaagaagatcgtcgctgtcggcgtcaccgaacctggcgcgggctctgacgtgaaaggcattcgcaccaccgcgcgccgcgagggcgacggctatgtgctcaatggcaccaagatgttcatcaccaacggtgtacatgcggacctttattgcatcgccgccgtgagcagtccggatgcacgtccgtcccagcgcttgtcgatgttcctcgtggagaaaggtacgcccggtttccgggttggtcgcgatctcgacaagcagggctggaggtcatcagacacggcggagttgctgttcgaggattgccggatccccgcaacgaacctgctcggcgaggagggacgcggtttctacgggatcatgcaaaacttccagaacgagcggatcgtgctcggtgcaatggcgatgggtgaggcgctagctgcgatagagatcacgctggactgggtcacgcagcggcagaccttcggcgcgccgctgtggtcgagacaggctatccgtcatcggttggcgatgctggcggccaaggttgaggcagggcggcaacttgtttattgcgcggcatggctggtaacgcaggggatcgatgccaccaaggaagtatcgatggtcaaggcttattgcggcgagctcgtcaacgaggtgatgtacacgtgcctgcaatttcacggcggcatgggttacatgcgagagagtacgattgaacgaatgtcgcgagatgctcgcgttcaatcaattggcggcggcactactgaagtaatgctggaagaggtcgccaagcgtatgcgataaccaacgcacaaactggaaacactaacgcggcaagatgccgttgaagatcagcaacgtggtccggctcgccaattcctgtaccgagctgctttttcgcgcatcgaaccactcgaccgtccaattcaaggcaccaagaataaacctgcgtagcggaacgattagtatctccgggcggatttcgccggcacgctgcgcatccgccagcatgtcatcccaatatttgccataggcgcggcgcagtggacgatggcgcttcttgatgcgctccggcaactgaccgtagacgcgcatgttggcggaggtgtagtcgctttcttgcagcagggtgacaagatgagctttgatcgcggcgctgatcttgttccggtgcgaccccttgccaagttcgttcacacttgcctttaccgcatcgaatatacgttgcaatccaagttcgaggatttcgtccaatatcgcggttttcgaatcgaagtggtagtagatgctgcctgccttcattcccgccttgtcagcgatctgtcgaagcgtagtggcggaatagccctgctgtcgaaaaagctgtgccgcgacccgaaggataaggtctcgtgaaacgtgcgatttcggcggcacggaaagtgcgacatttttacgcttgggctcgcgcttggcaacccgcttcattctcgatgaagatttcaaatcttgctcgctcaaacccgaatggcatcaccgtacaaagcccagctcttgcaccagatgagtaatgccgtgtaatagaccaacaaggctgttcgggcaacattgcgaagcgctgaaactactttcaatgggcggccagcgaacgactcaagcctcggacgatacatcatcacgatccgaccgtaatagacggatcggcctcttgcaagggagccgggccttgtccccattggtctggccggctacaactcgatatcgccggccagcagccgctgcgcgatggtgcgtgccaggatctcgttggtgccgtcggcaatgttgatgattcgcaaatcctgcaaggcatggacgaggccgacctcgttggtaaggcccatggcgccgtgggcctgtatcgcttgatcgacggctcgatagcccacctgtacggcgtaggctttcgccatcgacaactccttcacggcccgctcgccactatcgagcagcatcgcggcgttgagtcccatcagatgcgcggcgtgaagttcagtggcggcgcgcgcgagcgggaacgagacgccctgatactcggcgatcttggcgccgaacgcctcacgctgctttacatagccgagcgccttctcgatcgcccagcggccctgaccaaccgcacgtgccgaattgtagatccgcccgagcgaaacgccatagagcgcgagcttgaagccgtcgtcgagcgcgccgacgagttgccacggctcaaccctgatgttctcaagcaccagcgcgccttcatgaccgccgggatgaccgaagagccgcaccacgctttcaacttcaaacccctcggtgtcggtcggcaccagaaagccgctgatcccgccggcttttcgctgcgccttacccggatcggtgacggcaaacacgatgcaccattccgcggtgggcgagttcgtggtccagagtttccgtccggtgatgcgccagccgtctccatcgcccaccgcgcgggtctttatcatgctggcgtccgagcccgctcctggttccgacagtccgaaacacatcgaggtgcgtcccgtgatcattgcgtcgagacagcgcgcctgcgcctccggtgtcgcttgcgtcagcattgcgctcggcccaaaggcccaatgagcgatcacccagggcgtcaggatcgaatggccgccgattcgtcggtagacggcctcccaggcgacgtaataggcaagatgtccgagcccgccgccgccaatcgcggctggcgcacacatcgcgtagtaacctgccgcggcggacgccatgcgcacctcgcggattagcgcgcgcacctccggcgcataacgcccgtcggcagcataggtgaggcgcggatcattgaacaacgcgtggttgcgctccaggcgcgggagaacctcggcttcgacaaaccgcatgaccccatcgcgcaccgcaaccacgtcttcgggaagctgaaagccgattgcgctcatgtaaccatcttccgtgtcgagaccaggggctgcgggcgaagcgactttagttataaggcaaactcatctcacgagcgattgtacgctgtcgtgttctccggctgctaaacatcgagggagccgaccagggcgtatcaagggcgagccactcatcttttcttttcaggctaaagccggaaataccccgtcagatcagattgcgacgctcggcctcgctgatggcctgcacgcggttgcgtgctttcaggtcagcgaaaatcctgcgcatatgccatttcaccgtgtcttcgctgaccaggagttggtcagcgatccgcttgttcgaaagtccatcgcgggcaagccgcaggacgctgatctgccggacggacagcgtggtaagctcgagggggaacgagggccgctcagtccttggccttggcttggcgatcccgtcgaaatcgaacgtgacaaaggcatcggcggataccggggccaaggcgagcaacagatcccgcgtgtctagcccggtccggtagcatcccaactgcttgatgagttcgaaggcattgaccgcctttcgtcgcgcgggcgtcagcgccccggcggcggcgtgggccccagcttcgcacatcagcgcgcgcacttccaatcgaccagcaccgatcgaccgcgcgatcttggcagccgcctcggcgttgcggagggcgaggctgtgctgccccttggggatggcttccatcgcgcgcaacagcgatatttgggcacgcaggggtcttgcatggggcccggtcaggacctcactagagtcacgcggcagcaggtagtcgatatcccgcgcgccgcttaacagggccaattcggcaagttccaactcgatcagcattcccagtcgcggcagtgccctttcccccgcaagggcgcgtgcccgttccagcaatgccgcggcgcccctgagattgccattggcccgatgccaggtcgcgatgacgcggctgaccccgtagaacacgtcggtaacgccgtagttggcgacaaagtcaagcaacccggcgacagagtgctcggcgatatccagccgccccagttcgaacagcacgtcaagttccagggcgatcagcagctttgacgagaaggatgtgcgcgtcacctgaacgtcgctgtcattgcgggcggtatcgataagttgcagcgccgtgcgcatgtcgcccctggcgagggctgcctgaatctcggccgcataaagccagccaaaggcatagtgttggtgcgcggcgctgttgactgaatgggccatgactagcgcctgcttcagttcgtcaaaccggtattcactcgctagcatgaaggccagacaggtgagtgccgcacccttgccgacggcattatcgtcgccaaagttactgatccaatcgttgcacagccgctcgctcaactccagttcgtcatgggtcgcagcaccgatcgcgcggaccagttgcagccagccgcggtcaggatgcgcaccggacgacgcgcgcggggcgggcagatagcccagcagcctttcggccttgtcggcctgttggctgaaatacatcgtccaagcgtagctgaggcagatgatcggatgcttgcgcaactcgcgggttgggaaccggcccagccattcgcgcaacgcctcgatctcgccttggcgcagggcgagatcgagcatgatgtcctcactcagccccagcgcccagcggtggtcgcccgcccgcagcgcaaggtttaccgccttctggaactcgcgcctccgccagtgccagaaggccgcacgtttcaggacataggattttcgctcagcactgcgcaccagaaaccgatgctgaaggtaatcgcggagaaccgggtgcagcgagaacagcgttgagtcattttcggcggggcgaaacagcaggtgatcgaggtcgatctccctgatcagcgcgtcggcgttggtggacttgtaggcgtaattgtagctttccgccgaaatcgggtcgatcatcgctgcgttttcaacgaactcaagctgccgacgcgacaggcgtctctcgatctcctcatggaggaaggtcaccgtttcgggccagtttaccgcgggccggaccggcaattcggtccggcacatgatgtggcagagcgcgggccagccctgcgtctcggcgatcatctgctgtgctgttacgttggcgaccgggtgcgcccgcaaaaacgtttcggcatcgtccaaggtgaaggccagatcgcgggcatggacctcccgcactccgctttccagccccagccgggcaaaaccgcgccgggtatccccggcgatagcgaatcggacattcggcggggtttccagcacgaaggtttccagtgcgtgcagcagggcgggtgcgtgttcgatgtcgtcgatgcagattacattggccggtcgctcagcgccgaattcttcccatagcgtggccactaactcggccagatccgccgggaccgctcggccttcgcgggacgctgcgtcgagcagttggccgtagatggcctccgccagcgcgccttccgtttcgtatccgtcgcgcaaagacacccaggctgcgttgtttccagcagccctgaaggccaaccagttctgcgccagaacgaccgattttccataaccctgcgttgcgcgcaagatcagtgtccgggtctccggttggcctgaaaacgtaaatcggggccgcgcgatacagcgcctggcgattgtccccagacgcgcggaaatgcggacggcacgcagccgtcccggatatgtcggctcgtcgcaggtacccctgatcatgggcgtctcaaggcagcgcagatagctataggataccccaatcgggaactacacttaagtgtagttgtgagtcccggcccaatgatctccgcttcctccgctcgctcggaatcgggatgggcgtactggtgtcacctgccgcgcgacgaatggtggggtcaaggggaggacatgccgaatgatcaatacgccagatcagtctgtttcaatcttaggctacatcgaccgtaagcgctatctttggatgctgtccaccctgtggccggcgacgccaatgatcgggctctggctggtagcgcagaccggatggagcatctggtacgccttggtcctgatcgtctggtacgcgatggtgccgcttctggacgccatgttcggcgaggatttcaacaacccgccggaagaggccgtcgagatgcttgagaaggaccgatactaccgcgtcctgacctatctgaccgtgccgatccattacgcagccctgattgtagcggcctggtgggtcagtacccatgcgatgtcttggctcgaaatcataaccttggcgctctcgctaggaatcgtgaacggcctcgcgctgaacactgggcatgagcttgggcacaagaaggagacttttgaccgctggctggccaagctggtgcttgcggttgcgggttacggccatttcttcatcgagcacaacaagggccatcaccgcgacgttgccaccccgatggatcccgcgacctcacgtatgggcgaaagcatctacaaattctccacccgcgagatacccggtgccttccgccgcgcatgggcccttgaagaagaacgtctgtcgcgccggggcaagagcgtttggagcatagagaacgaaattctgcagccgatgctgattaccttcgcgctctatgcgggtctgcttgccttcttcggccccctgatgctggtcttccttccgatccaaatggcgttcgggtggtggcagctgactagcgccaactacattgagcattatggcctgctgcgtgaaaaactgcccaatggccgctacgagcaccagaaaccgcaccactcgtggaactcgaaccacatcgtgtcgaacctgatcttgttccatttgcagcgccactcggatcaccacgcgcatccgacgcggtcctaccaatcgctgcgcgacttcaaggatctgccgacgctgccctcgggctatccgggcatgttcttcatcgcgttgatcccaagttggttcaggtcggccatggactcgcgcgtggtagattgggcccatggcgatctgagcaagatccagatcgaggatggcaagcacgcgctttacgaacgcaagtttggtacggtcggcaccgacgcaaagcccggcttggttgctgccgagtaaaccgccaacttccgcaccgctctcgcttgccaaacgatgcggacacccgacaccacagccctgagccactcgactcgtttcaatcgtcgggcggccagcggctggccatgtggggcggtcaggccgtgcgatagggcagaggttgcgcgccgattacggaaaaaaccagggatagctgccattcggcccagcaatgtcagatcggcggaaaaggaggaaaaaggaacatggccaagtaccagtgtcctggttgtaaatacacctatgacgaaacgctgggccatccgcatgaaggatttcccgcaggcactgcttgggccaacgtgcccgacgaatgggcttgccccgattgcgcagtgcgcgacaaggtcgacttcgaattgatcggcgaagcgccggccgctacgacgccggccactcaggccgtcgagtttgccgggacggcacgtagcgcggtcccggtcaccgacacggccgttatcgaaaagcccgccagcccgatgtcgaaaccggcggcgcggatggccgccgtaccgcaggccgcggaggctttgcccccccaattgttcagcctgcaaagcgagcccggctttgccgaaaacaagccctttgtgaaatgggtctgcatcacctgcgggcatatctacgacgaggcactcggcgacccttccgggggcatcgctgcaggaacccggttcgaagagattcccgaggattggtgttgcccggagtgcggcgccaccaagaaagattacgcgctttgccaggaaacctagtcaactcgtgttggcaaagggtatcgggccgatcaggcccgccatggaggtcattgtgaatattcacgccgatccgaacgacattccattggtggataccagatctaccgttgcggatgtttttgcgaagcaacgggaggcgggctgggcgcgtcgctcggatttcgaccgcaaggcacgcatcgcggcgctgaaccggctgagggaagtcctgcagcggcgcgagacggacatcatcgcggctctttatgcggatttccgtaagcccgagagcgaggtgaggctgaccgaaatcctgccggtgctgcaggagatcgcgcacaccaaacgccacttgaagggctggatgcgatcgcgccgggcagcggccacgctgggtgttttcggcaccagggccaggatccgacccgagccgaaagggatctgtctgattattgcgccgtggaattatccgttgaatctagccttcgggccgctggtctcggcattggcggccggcaacagcgcgatcatcaagccgtcggaactgacgcctgctacctccaccctgattgcggatatagtggccgaaacgttttcgcccgatctggtggcggtggtcgagggcgatgcagcggtcgcgcaggagttgctggcactaccgttcgaccacatcttcttcaccggcagcccgcaggtgggcaagctggtgatggaagcggcggcgaaatcactggcctcggttaccttggaactgggaggcaagtcgcccaccatcgttggccccactgccaacctgaaaaaggccgcgcgtaatattgtctggggcaagtttgccaacaacggccagacctgcattgcgcccgaccacgtgttcgtgcatcgcgacattgcgcaagagttcaacgagacggtgatggcggaaatcggtcgcgtctatggcaagacgcccgaggtgcagaagatgacgcccgactattgccgtatcgtgaatgaccggcatttcaaccgggtcgccggcctgatcgaggatgcccgtgccaaaagcgcgcggatactgctgggcgggcagacggatgcggtgcagaaattcgtggcgcccacgctgatcagccagatcacccccgagatggcgatttcgcgcgaggaactgttcggcccgatcctgccgatcatcgaatatgacgatatcgacaaggtgattgatcagattaacgccaatccgaaaccgctggcgctttatgtcttcgacaatagccgggcttttgccgaggacatcatcacgcgcaccagttccggcgcggtggggatcaaccttaccgtcgtgcatttcctgcatcccaatttgccctttggcggggtgaacaactcgggcatcggtgcggcccacggagtctttggctttcgggcattttcgcatgagaaggccgtcctgcaggaccgctactcgatcgtccacatgctgttcccgccctatacaggttttgtgaagcggctcatcaggcttgtcgtcaaggtgctggggtaactggttcgatggaacaacgatctgaaagtcacggaacgtacgactacatcatcgtgggagccggctcggcaggctgcgtgcttgcaaataggctgtccgcagatcccgcgaagcgcatcctcttgctggaggcgggaccgcgagacaagagcgcgctgatccatacgccgatcggcatcgcgctgctggccaacagcaagaaactgaattgggccttcaataccgaaccccagcagcatctgaacgcccgccccctgttttggccgcgcggcaagacgctgggcgggtccagctcgatcaacgcgatggtctatatgcgcggccacaaggcggattacgacggttgggaagtcgcctctggcacctcggtctggggctgggaccgtgtccgcgccctgttcaagcgactggaaaacaatcaacgattcggtaattcagaataccacgggacgggtggtgaactgtttgtcagcgaattgcagacggtcaacccgctcagccgatccttcgtcaaggcggggcgcgaactgcagatccagcataatgatgatttcaacggcgagcgtcaggaaggggtcggcctttatcaggttacccagaaccgcgggcggcgctggagttcggcaaaggcgtttctggaaagcgcgctggaccggccgaatctggaggtcatcaccgatgcgcgggtgacccgcgtggtgatggacgggcggcgcgcgatcggcgtgtcctacaggcggaacaaccaaaacaagcaggcgcggctgaaccctgcgggtgaggttctgctgtctggcggcgcggtgaattcgccgcagatattgatgctctcgggcgtcggcgcagcggaggagctgaaggaacacggcattccggtgctgcatgacctgcccgccgtgggcaagaacctgcaggaccatctggacatcacgctgatgaacgcggccagttcgcgtcaaccgatcggagtggcactcagcttcccgccgcgcgcggtggcggggctgttttcctatatcttccgccgcaaggggtttctgaccagcaacgtcgcggaatcgggcggcttcgttaaaagcacgcccgagcgcgaccggccgaacctgcaattccacttcctcccgacctatctgaacgaccatggacgcaagatcacctacggttatggctttaccctgcacatctgcgacctgctgccgaaaagccggggcaggatcggtctgaaaagccccgatcccctggatgatccgctgatcgacccgaaatacctcgatgacccggaggatatgaaaaccatgatcgcgggggtcaagatcggcaggcgcatcttcgacgcgcctgccatggctgttcattcccggcgcgaggttttgcccggtcccgcggttcagagcgatgacgaaatcgccgccgatatccgcaagcgggccgagacgatctatcacccggtcggaacctgccggatgggcgccgatccggcgtcggtggtcgatccgcagcttcgggtgcgcggtatcgaggggctgcgggtgatcgacgcctcgatcatgccgacgctggtggcgggcaacaccaatgcgccgaccatcatgatcgcggaaaatgctgctgacatgattttggggaagatccatatttaggctgtgtcgcagaatatttccagcaaagctgtcaatccgtgtgaaatatgccgatccggcgggtgtgactccaaccgagttcggatgaaaagcctacgtccgacgctctcgtcgacgaagcctcgccatgccgcaagatcgtcgaagtcgcgcgacgcgcgcagcaacagggcgtcggcgagcgccctcttgagatggccatgcgcgctctcgatcgaaccattctcatgcgacactccgcgattgttgcgggtcggtgtcatgccgtaatagccgcagaatgcctcgtagcgtgtcgtcaaatcctccttggcgtcggcgccgagattgcggaacgccgccgaaaggctgtcgcttcggtgctgctcgggaaccccgcccagcgaccacagggcgttctgcaacccttccgccagcgcgacaaagctctcgccaccgagcacgacatgggcgtgttcgaagccggaaaacggcagacggaagtgatagaaccggcagtccagcaactggccggcgacggtgatccgcgacctcggtgaagtctgacaagcccatgcgacccggcggatgctcctggcggaagatcacctcccggtccgggccgttcaccgcgcgccacgccctgatccgccgttcaagcgtccgccgcttcccggagcccagttccgggtgccgacggcatagttcctcgaacacggcgatcggccgcaatccggggcggccttcagcatggggaggacgtcgttctcccagacgtcgacgaatggatcggcgcggcgacgttcgcggggcgcctgtttttgggttggaagtcggggatccttctcgaaccggtaggcggcggaggtgctgaatccggccttcgcagcggcaatggctggcgaatggttgcggcgcaagttcatgaaaagcctcatttgttgatcggtgacgtgtcggtcagccaaggaattggggtcctctcgaaagagaaaaccgatccttgaccagccgccgttaccgccaaatgaggcccttcgggcgcccacgccgctgctggggtaactccggtcgggctacgccctcccttcgtcaccccagcagcggcgcattctcatcctgattgtcgcgggattcccatcttgattgtcgcgccgcacgacccggacatcatcatgagatgctcgacgaccttggaaaggaccatgaccccagcgatgacatcagaaaggaacttgacacggacccgcaattaaagggccgaataacggtaaatgtggcttggacattctggtcgtcatcacgcaacgactctggtctgtccccgcattctggaaagcagggcagcgatctccccggccggtcgcgctgggctgaacagatagccctgcacctcggtgcagccttcggctcgtagcgcagcaagctgctcctccgtctcgacgccctcggcggtcgtgatcatgccaaggttcaccccgagccccatcatagcccgcacgatcgccaaggaatcggcccgatccggcaaacctagagtgaaagacttgtcgatcttgatcttgtcgaacgggaatttccgcaggtagcccaacgaagagtagcctgtcccgaaatcatccatggcgatgctgagtccgagttgtcgaagctcatacaggaccgcgatggtcgcctccgtatcctgcaacaacgcggtctcggtgatctcaatttcaagccggcttgcaggcagtcccgaatgacctaaggctgccacgacatcgagggataacctgttactcctaaattgaagagaagatacgttaacggcgagtttcaggtgatcgggccatcccatggcgtccgaacacgcctgtttcagcacccaggctccgatttcgttgatcaatccgatctcttccgcaagcggtatgaaattgtcgggcccaaccatgccgcgcacggggtgtcgccagcgcagcagcgcctcgaagctgctgacctcgttcgtctgaaggttgacgagaggctgatagaacacctcgaactcctcccgcgccagagccttgcggagatcgacctcaagcgctcgacgagcttgcattctctcgtccatccaggcttcgaaaaagaagtacttgccccggccatccgccttggctcgataaagagccatatcggccttcttcagaagctggtctgggtcgtgaccatcggtgggcgccacggcgatgccgacgctcgctccgatcatgagctgatggtcgccgatgtcgtagggcgtgctgagcgtctcgatgattcgttgcgccagcacggccaagtcgtccggctgacccacggccaacacaactgcaaactcgtctcccccaaggcgggcgacaaaggcgtcgtcacgcatgctcgcgcgcaaccgatccgcgacagcgaccagcaaccggtccccgatcgcgtggccaagcatatcgttcacggccttgaaaccatccaggtcaaggtagataacggcgagctgttcgccccggcgcgctcgcttgagcgcctgctcggcctctagacggaacagcacccggttgggcaagcccgtgagcgcgtcgtgatgcgccatatgcgcgatcctcgcatccgccgcgcgacgttcgctgatgtcctcgaaggtcgcgacccagccaccattctccgttggtacggccgagatcgagatcgtgcggccatccgcgagccgctgctcaggtagcagacgctcatccctcgcgagagcagcctttatcgtcgcgtaagcttccacaaggtcgcattcccaatcgtggcccacgcattccggctcggcaacgcggtggatgggagttccgggctcgatggcctcggcggggagaccgtaaatatcctgaaagcggctgttgcagacgacaagccggtcatcggcgtcgtacatgcaaagcccctgcgacatgttcgccatggccgaattcagtagatttgatttaaactggacgtccaggccacgctcatggaactggcggagcgttcgggccaacgctccgatctcatgtttgcggccttcatactcgggcaaaaactccatccccggatatgcgtcagcagatgtttcgggccgctcgatagccgaggaagtccgggcaagcggcgtttcgccggtgcgtaaccgttccatggcagcggtgagcaattcgattggcctcaacatgctcctatcgacgaagtacccgatggcaagcccgatcatcaacgccgccatcacggcgcaggaaccgagaacgagagttaagtcaatggcggccaagtgacgatcggacagcgccatgatgccgtccggctcaggtttggacgcaagttccaggaagctcgaccgaatgtcgtttcgcgtgaggataaggttagtgacagctaccgccccgagaagcggtccaagtacgcagaggagcgccacggatccaagaacagtttgccgaagattaaggtgcattttactcgttacagacattgccagccgttggctaatattaggctgtcgttacgaaaggaagtattaaagccggttgacgatgtgtggacactcacaaatctttcaggccgctatgatctagcccgtcttattcgccagatggcaccggagaggctggcgagcgtggtgtaaagcgctgatgcggcgtaggattcggttgcgaagccacccccatccccttcacccgcgaacgccccgcccgccatgaccgatgatacgattcnnnnnnnnnnaccccatcaccttcaaccgcgaacgccacgcccgccatgaccgatgatacgattgcccttctcatttccagccgttcacaccaagaaaattacagctgccttcgatggcggtcgcctgacctcgaatgggggcgtgatgcttctggcgatggccgagcggcgtctcggtttggccgacaagttggcccggatgttcccggatcggcgcgacccgacgcgggtcgtgcacagccttgtcgatatgttccgcgctcgcatgtttgcgatctgctgcggctacgaggacgccgacgatctcgaccatctgcggtccgatccggcgttcaagctggcctgcggacggctgccggacagcggtcgcgatctgtgttctcaaccgacgctgtcgcgcctggagaatgctccacgcctgcgcgacgtgatccgcctgacctacactttggtcgacgcatggatggataaagccgtaaccgcgcggccacgtggatttggatcactcaaataccaaaatgctggaacagaagcggggacggcaaccctgggggaggtgtgattgtcgtctcagtcaaatgcgacgccaatccgtttctcttttcgccatttgacatgacacggtcggcttagctgatctgcctctataaccagtctgaactcgtgaggaatgcctagcggactttcgacgtccagggcggcgccgctcgccgacaagttccgcacggtacagctaataccacccccaccgaattctatcgtcccggctttcagcacgcgatgtcgaggcgcggtacgtttgttgtccataggcggaccatagccgaaaattcttagaaattcgcaaaggtcatagtcgacccgcatgagcatgggtcatcgacgggacgtggtgacgggaagaccaaagccagctctgtgaaccgttcctcggcggcgtaggccaagggtgcagaagtcttgaggccattcgacactgactaaagatactacacgccctcaaatcgagccagatctggactgcgtctccccaatattccccgacttacatcgcctcatttacaaagcgttaacctcaatccgtagcggcaacttagccgggaagcatcatcgtgacagcaacccgatggaactttcgagatcgaaatggcggcgcaacacaaccgggcaagaatgttcgcggtactgagcgcgaccaacgaagcgatcttacggagcacttccgaacaagatctctatcaagatgtttgtaatgctgcggttgatggcggcaaatttctgggcacggccattttcctgatcgaggacgactcttcgtggttccggatggccgctggggccggtcccttcgttcatttgatcgagcaacttcgtttttcttctgatgccaccattccgcacggtcagggactcggtggcgaggcgtttcgcacggccagaccgtgcattagcagcgatgttctcaacgatcccagaacccaaccgtggaaggaactggccgcgagcgcgggcctgacggcgagtgccgtgctgcctctccttcgagacggccaagcggacaagacattggcacgatagcccaattcccatcagatctggagccggcctacccctattgagaaatggagaagcggttggcgtcctgctcttcctgtcgagcgaaacggatgtgtttaccccagaatttatgaagctgctggggcggcttgctgacaacgtatcattcgcgatggaaatgctggagcgtgaggacgcccgacgcgctgcagagcaagctaaggaccggctgacgcggatgccccgtcaacgacttcatgaccaagaacggaagcatccgcgacgacggccgcatgatgcgcgacatgtaccttttgcagaccaagaagccgtcggaatcgaagggcgagtgggacctgatgaacgccgccgcgaccattccggctgaggtagcgtatcggtcgctcgcggacccgcccaatggcgccgagcaccttcccgtccctcttgatgggaatgcgggaaacgactctgtctccgccgcgcatgcgctgaattttcccgacctcggccttgcccgtggccacgatctcatgcagtcgcgtgttgtcgatgacggtctcgaccgggcgtccgtttccttcgccggccttcagcccgaaaaacgcttcgtggatcggagaaatgtagacgatcttggccttgtcatcgacgatcgtcatggcgtcgaacggatccgtcagcaggtgctgcaggatgtctcaggagaaatcgacgctgccga

SEQ ID NO: 214 - DNA, 3395 bp, Bradyrhizobium colbertium
tcgagctggtcagtccaggcacgctgccgaacgacggcaaggtgatctcggacgagcgctagaagctgaccagttttgcgcacacgtgcgcttcaatagtccgctgttacgacgagccgccggcggaaaataacagggattccaaaccgctaccagggaatttctcgtcagataatagggaatatgcgtagcccaagcagggaagcctcatcgaagcgcggaagtggatgagacaagcgctcgagatacttaccccgtctggcctacgacggaagtcgatggggtcgttccaggagttgatgaaagcgcgcactatgagttcgcttatcggcgcgctggtatcaaggtcgctcattgtgccgagcaattcgagaacgatggaagcatgctcgcgagcatcgtcaagaacatcgagcgcgtgatggcggccgagtacagtcgcgagctatcggcgaaggtctatgccggtcgatgccgctttgcgcggctgggctataaaccctgcgggcgtgtcggctacgcgctcgtgcgggagctcgtcgatgaagagatgcaaaccagacaagcgatgaagaagggggagcggaagtacatcctggccgaccacattcgcattagaccgggcgatccatggaaatcgctgtcgtgaaatggattttcgaacggtttttggaggttagatccgtgtcagtcatcgctttggagctcaaccagaaaggcctcgtctcgagtaccggcgcggcgtggatccgcgcggcggttggcactgttctcagaaacgagagctatatcggaaatctcatcttcaacaaaagctccgacaggcggcggtgaagaacccgcccgaacaatggataagaagagagggttgcaccgagcccatcatcgatcgcgaggtcttcttcagagtcaggaagattatcgaggagcgtcgggttgatctgtccgaggacgagatgctcggtccgttgcgcaaagctcttagagagggccgcttgacgccgaccaatatagattgaacgctaggactgccctggtctgcgaactgccagacccactttggcaattttcgagatctgtagcggctgctcggctacaccccgaagcgcaattacgagcttctcgatgcgcgtccggtttggtcggagcttaggtcaaagcttgtcgaacaggccgctgctaataggcggctggcggacggatcatttcgggggctggagcaattgccttcgagtgaacgggacggcctttctttctgtgagggccgcccgttggacccttggccaaaagccaacgcatgcaccgtattggagcatcgagcgggaggtgtgccttcctcacggccggatcgccgccatccgcctagccgagcacaagacagtgctcgatcacgtatcgttgccgaccgacggcaaaataaagcgcacaatccgcttttccgaaacgtcacgagcccggcgggaggattgcgcgtttgaagaccgtcaatgatgtagtctaagccatttttccggcgacttaaaaagccggatgctacttcccgcgttgcgcaatggtcgaggagcaagcggccaagaacgccgcaacctaaaccagaaacatccgccggcggcgctgatatcagtaaaccgggtttaagaccttgtgctggcgctcgggctgagctttgatgctcgcatttgggatatgcctactatgagtgttaagtcgattgccgcgaaaatcctcagagacgaactcacgtccatggcatccgatcgctgaccatccaggagtcggagaggatcgccgctcacatcttcgaacggatcactgacctcgaactggagcttgccgcatgcgacttcgtctcctcgcacaccgcgatcgcgactagccttctcgctttcgcgctatgcagtccgaagggtcgccatgccggcgttgggcgccatcccggtctcaggttgcaaattacagcggggattgcgtcgggaccgaaaggaagagcatttctgaagctggctcccgcccggtcaacaactttcaatcacgagcccgctctagatcttcgcctctagtctcgggtcaagactggatggaccagctaaaaaatgagcaggcgcccccgtttcacgccagcaagctgcagtgctatcatcagcggacggccggttatgcggtcgcaatctcagttaactcccgccggccttccaagtcggcgggtttttctatgagattgaaccgaggagatgcttcggttcggaaaaggcggatattacggcgcttttacaccgttgtgcggccgcatcgggtcatatagatagagccggtgtcagcgtcagtcgcgtttgagattcatgattgcgtacaagcagtatcacatccagcggtttgagcacggccacaagcgctgggttgcccgcatcacacgctcggatggccaaaacattcgcaccatcctgccggcttctgagcatccctaccttgatacgaaacccaccgcctccgccgaggaagccgaggagcttgccaaggaaggcatcgactttgggggtatcgtttaagcggctcctgcggagctctcttccccttagcacgcgagatcggaggatcccctaatggccttcccgatgggcactcacgttcgttaggaagctgtcacctggctgctcacggagggatctgttttccaagccaggccagccccgccgagcaagcggatgagagcaatgctgtccaaaaccaggaacggccacgagcggcgctgattgatcgaaggtacaggaacgctccgagtacttttccgtaattcctttggaactctccattaagcttagctacttcaggcaggtcggacaaagtcttgcattcatcggccattggctgggcgccattggcgggggaccagcaccctatgaaccactgttttgtccgacgatgcaagttccatttcggttttatcgattcgcctcgcaaggccggctgacgaggccggcttgcgattgaagatcagacctaactggcttagccgcttacctcaggcttgaatcgggccaatggggaatctcctcgaacgtccgagatcgacgcaaggtcggccgcaccatcgcgtagagcacgaagaggccgatggcaatgactgccagcaggggaaatgtagttcatgacgcttccaaaggaataccagcagtactgcacaaattgcccaactgggcggtgtcactcagcttgaaccgacattggtgagctcccgctctgacggctcgccttgagcttgacaccctcatccattattccccttcacgcgtttgagcccacgccgctgtctcgacaaagcagccttctcataacgctccaggcgcgccaagaccttcatctgcagtgctgaacttcctccgaatgagtggacacct

SEQ ID NO: 215 - DNA, 72556 bp, Bradyrhizobium colbertium
  misc_feature (27667)..(27676): n is a, c, g, or t
  misc_feature (61303)..(61312): n is a, c, g, or t
ccagccccaacctgatgaaggggacgctgcagaccgagttgtcgccgaaggccatcgtggtgttttctgcgagcttgcacggtcattcgctcaccgccagatacacagtggactagctgccactctctgcgcgccaaattcggccaaccttcttcggcgagggagcgctcaagccgcgcccacgttcggcgcgacggccgacccgacgagagcctcccggaaccgggtggcaaaccaggagatcgtgaagtgaggccgcgctcattcggagtgcggccccttcgtgagatgagcgaaacgcttaccagtggtgatgattccaacggtgccgcacgacgggataggatccgcggtaataggcgtgagcgggacgcacgacgcggcgatagcggtagccgtaggaaaccggctgcgtataatacgtggtcgtggtgtatccgccgccccagcggtacggtgcatcatatccgtagtcgtaagcgtatggaccgccatagtagccagcgcggtagtagcctggagcgtagccatagccaggcccccaaccatacgcggaggaggcgagcccgccgataacggcccctgcaacaaggccgcccgcgatgccgggtccccagcctcgccaatgagcttccgcgggagacgtcgccgcgaccgagctgagaccgatagtgccggctaccagtgtcgacattgcaatcttcttcatcgcgataccctttcacatgacattgcttccgccccggcaataacgggaaaaataggcaatggttgctagtgtgcggttggcagctacgtcggcagctcctccgacgcacgcggacgccctggagcggaatggcttcaggttgaaccgaatgccgcgggtggttcacctctcgcgcctgcgggagaggtcggcgcgaagctccgggtgagggctgtctcctcttggggagcggtcccatcggaagcaccctctctccaaccctctcccgcaagcggcagggcaatcgcatatgcggaaacgcggcgggaagctcgcgtgcaaccctccttcgagacgcccgcctccggcggccctcaggatgaggaccacgtgcgcggcagcagcttcagcgagcgcgttgccacttagcctcatcccgaggagaccgcgacgcggtcgtctcggcggacgaggcgctcgctcaggcagttccgaaaggtcatgtgcgatagctctgcgcaagcgggagagggagcgcacctccgtcgttccagcgagcaagcgttggcccatcatgcttggtctcgtcggcgcgttccgtcaccagaatcgggaaaaacaggaaaccttctggagcgccttagagttggcacggatggatccggccttcggagagcaagcgtggtcgacgatgccgtcttgaagaacgccgcggagaccgcctggacagtgtaccgggcgcagcatcctgatgtcgacgcgttcgacagccggcgatgcctgctggaacgccacctgcacaggagaggggaagagcgcgaaagcgatgccgaggaactcgccagcttcgggatagcctacctgcatcgacttcccagcgatgaatgttgatgaacatgaaaatgctcgttgcacgcgtggctcgcggaagcacaaggccgagttggacgctgctcgcgatttcgtttctcatctcggcggtcatcgtgatcgccttgcgcatcatgttcgggagctagtggctgccacaccggggagcccaagcttgcggctcaaccccgagagtctccaccccgcaatcagcttcaaaacgcaccgacggctgcggacgagatgttcgatcaatgaacaatgggcaatgccagccttgcaccgcaacgccggcgcgctcctcctgcagactcggatggcaccgccttattgcaggggactgcagtccagcagcttgatcctgccgacggcgtcaaacgccaaaagcgcgctcatgacgcccgtgctggtgacgtaggagataaccgtcccgttatcggagggattgaggtcgtccaaggtacccgccggaaagttctggagacgatcgatccaataggcacgaagggcctcccggccggtgatggtttgggcgccggagcagccgcagtgcaccacggcatcgtcggcatgaagttccatgatggtctcgagatcacccgcgcggtaggcgtcaagccaatcgaccgcaacggccatcgggtcaaacgacatatttgtcactttgtaccgtccaaactgagtcaggtgggaaccaaatcgattgattttattttagtatcccacccggccacggccatatgccgaaggacatagaggaccgggtcgaggcaaagtcgatgttggacgcgtccgccaggcaagggatactcaaccccatccggcttgtgatcgtcgatcggcaaccgatggtcctgcagggtttgaagtcggtactcgggacgcagcaggattttgacgttgtcgcatcgtccagcgatggcgcgagctgtctcgaagccattcgaaaattggcacccgacgtcgcgttgattggcgatgccctgccggatctgaccgcaaatgaaatcctggcgattgcaggagccgagaagctctccacgcggctggtgttctttacggagtccgacgccggtctgaccgcggcgatcgctgccggcacctgtagcgcaatttccaagtatgccgccccggtcaccatgctgcgctccctgaggttgatggcaaagagcggtgtgtcgctgcagcagcgggatctctcgccggtcgagaatgccgccgaggacggcaaaatcgaaaagatgctgacgctgttgacggatcgagaacgtcaaattgcgcggctcgtgtcggagggaatgtcgaacaaggagatcgcgcgcgagctgaacgtttcacaagggacggtcaaggtccacctctacaacattttccagaagctcgagatcaccaaccgaaccgtgctcgcgaccatcgcattgctgcaacgcacgtcgggcctcggcgcgctcgcattggccttcctggcgttcgcaattgcggatgagctcaaggcctcggaagcgaacggcatctcccaggccgatagccaccacgcgggcgagcacgccttgtatgaggtttggaagaaggccattctccagcgtctcatcctctcgcaatccgacgcgacgccggcgttcagcgataaggacttttctgcgagggcgaaccaggtcgcgaacccggcggcggcgatggaagcactgcgcgcagccgagcaattcatcgtctcgaaaccgtggaaggatgtcgatcctgtcggatcgatctcacccaatcttcctggactcttgctgcgaggaatcaacgatacgccggctggcgatgagccggctccgaaacaccaattcccgccattcgcctccagtccgatgtcgccgcaaggcggatatggcgccttcgccgctgtcgccggcgcgctgatcttcgcgctgcaggatcccgatcaagccaaggcgcatgagctggatcaagggtccatagacacccttctggccatcggcggagagaatgcgaccacaagcctggccgcgatcacccatgtcgagggcaatcacgggggcaactccgcgtcggatcatcttccccatgatgccggtcggcattccggttccgtgaccattgcaagcgacatcgcgcaggacagcgttcagggccaagcgggcccggatgtccctggtcacaatgttcaagaacctgtcggcttgttggactccgatcacgatgcaggcccggccggatttggccgcgatcaaccgatggcaggcaacgttgaacacgttgtcaatcattccccgatcgagtccaagtccaacgccaccgagctggtgctggattccacgtccggccccggcaggctcaatctcgcagcattcggagcgctggcctggctgcatctgacggcggcgccgaaatccattccgccacataccctcgcctgggtctacgattccgaacgcaacgagacgatcgtctatgtgaatccgaccgatcgtgtgctcgatgtcggggatcgcagcctcgtggaggtccatctgcagggaatcgtggccgttgccgaggcggacttcgctcagcaaacagagggcggcgtccatgcagccaccttggagcaactcgaacaagcgctgatgccggcctcaaccgatgagaccgctgtgagtgcgagcagcggcgacgcgagcgaggattcgctcgcgacggccgacgtttggagcgctttggccgatgacggcttcagcttccaattcgcagccgttcggatcggctcggggacagcggcaaagtccggcgccgcaacgagcggctcggcggatgcaacggaggagagcaccggtccttccggtgtgtcggcatacggatcatcaaccccgcctggtcatagcgcggcgaccccggccgcggagaatttctccgcgaagaatgagccgatgaattcgaacgccggcgttccgtcgacgaagcagaacgacacggcccaaccgggcttcggcacgggcgccggcatcggcggcggcaaccctgagcatactgcagcgccaggttcgacaaaggcagagatggcgcaggcggattcaaaacccggcaacggtgtcggtcatggcaatgagccgcattcgcaagccccagacgatccgccaaaggcagcgaagacaaaaggaccaggcgccgagcacggcaattcaggccatgcaaattctgcaaaagggtcgaaagcggctgaggccgccgaaccgagcgtcgcaccggatgacaaggcgggccgcggccactcacagcacggtgcggagccgtcgtctgcaaaggcggcggacgcaggcatcaccgaagccaagtccaaacccggcaaaggtgtcggcaacgaccatgaacactattcccaggctctagacagtccccgaggagcagagaagacggcagagtccggcggcatcgagcacggtcattcgggccactcggcttccgccaaaggagcggaagcaagcaagagcgggacaggtggtggtgacacggagcacgggcactcacagcatcctgcggagccggggtctgcaaaggcgggggctgcggagatggccgaggtcaagttgaaacccggcaacggcaccgggaatgaccatgagcaccaatcccaggctccggacagtccgccaggagcagcgaagacggcagagtccggcgaggccgagcacggtcattcgggccgctcggcttctgcaaaaggatcggaagcgggcaaaggcgacgcaaatgctggcgacatggagcacggccattcacagcacgcggcagagccggagtctgcaaaggcgggggcgttggagatcgccgaagccaagcccaaatccggcggcggcattgggaacgacaatgggcatcctcaagacggttcgccgggagccgtgaagacggcagaacccagcggcgccgaacacggcaatccgagccattcaagctcggccaaaggagcggatgcaggcgcgagcatcgcaaccaacagcacggaccagagcaattcgcagcgcgatgcacattccggtgtagcggcatcagaatccgcgcccgcgctcggcggcatcgatcaggtgttccgcttcgacgacggggcagcttcttccacgctcatcaccctcgcagagcctgacgaggttcataaaccgcacgctgcgctcagtcaggaagatgaagtgatgccgcatgcgctggacgagcacggggcccgcgacggtcatcatggttcgcatcccggcattccatctgcgccccatgatctgctgatttgacatcttgcagcctcattggctgacgctgagcagtgcgcgagcgcgaccggcggtcgcgcgctgccagggaaccagccgagagtgcggaacccgccggccgctattgaattaatctgggataggaaatagcggactcttcgatgaccaatcgcttcgccagctccatctctgccgccctccgtcatcccggcgtgatcgcgctgatcgtggcgggcgtgacgattgcggcaatgctgatcgtcgaccacgggccgtggagccgcgccaagacgcagccggcccatgtggcaatgtatgcgaccacgggcgaagcggcccgggccgcgggcgcgaaggtgcttccgaccaatccgaagtcgtcggtcgaaccggcgcggccggggcccaagacgtccccgaccgtcaatcccgtgacgccgtagcgtctcagctcttgcggccgtaattcagcagcccgccgctcgtcttcggcggatgcgcgcgcaaggcttcctcgttgggctcggtgccccagccgggccggtccgtgacgatcagatggccgtccctgatatcaggctcgtgcgtgaacaactcgcgatcccaggacagacgatcgatgtcgatctccatgatgcgcaggttcggcactgccgcacagaaatgcgcgttcatcatcgagcagagatggccgtagaaattatgcggggcgacgttgacctcgaacgcctcggcggcggcagcgatcttcatggattgccagacgccgttccacggtgtgtcgatgatcgcgacgtccatggcctgcgcgtgaaaatagggcaggaattcgcgcaaggagagcagcgtctcgcacgacgagatcggatgcgggctctgcctgcggatatagccgagtgcctccggattgaagctgtcgatctcgacccagaacatgtcgatatcggcaatggtgcgcaggatcttcagatagccttcggtcttggcgttgaagttgcagtccagcaggatgtcgacatcggggccggcaccgtcgcggatcgcctccagatgcatgtgcaggtcgcgcaggatcttgcggtcgacgttgatctcgggcgcgaacggtgagccgaagccgggacgccagccggtcggcctgccctcgtcataggagaagatgttggtcttgagcgcggtgaacttcttctcgcgcacctcgcgccccatggccttgacgccgtcgagactttcgatcggcggcttgtaccaggaggggtgattgatccgccaagtggcgcaatgcgaccagtacaccctgacacggtcgcggatcttgccgccgagcagctcgtagcaggggacgccgagcgatttcgccttggcgtccagcaacgcattctcgatcgcaccgagcgcctgcgccaccacgccgcccgcggcgggacgcgtcgccgcgaacagttcggcaaagatgcgctcgtgctggaagacgttctgaccgatcacccgggcagagaggcgctggatcgcggcgccgacgccgggcgagccgaagccctcgtcgaactcgctccagccgacgatgccgtcttcggtcgtcagcttgacgaagtgatagtttctccagccggcgtcgcaggccagaatctcgatgttcgttgcttttgatgatccggtcatgtcgctccctgtcgcccggcggcttcttgtggcccgatctcatgccgggccctggccgcattgtttagggcaagcgaggactgccgggaagggtgtagcgaaggagagctgggcagcgcgtttccgcgctcgccgggctcgtcagccaatcagggacgagccgagcagggcgaggactgccagccccatcagcgcggtgccaagccagccgagcccgatcaaccatgagcgggccctgaatcggcccatgatgttgctgctcgagacgatcagcatcatcatggccatgatggggacggcgacgatgccgttgagcaccgcgctccacaccagcatgtggatcgagtcgatccccgtgaagccgaggccgaacccgatcagggttgccgcggcgatgatggtgtagaagccggccgcttcgtccggcttcgcttccagcgtggcccgccagccgaagatctccgcaacgccgtaggcggccgagcccgccagcaccgggatggcaagcaggccggtgccgatgatgccgagcgcgaacagggcgaaggtgaaatcgccggcgagcggccgcagcgcttcggccgcttccgtcgccgaattgatcctggtgacgccggcggcgtggaggaccgatgccgtcgtcaggatgatgaagaaggcaatgccgttggacagcagcatgccgcagacggtgtccatcttgatacggtcgagctcgcgcaggccgccgcgcttgaggtcgcggagcggcttgtcgcgcttgccctggttcatctcctcgacctcctgcgaggcctgccagaaaaacagataggggctgatggtggtgccgagcacggcgaccaccatcatcaaatagtcggcgctaacattcgccttcggccacaccgcggccagcagcgccgtgctccagggtatttcgacggtgaaggcggtcgcgacgtaggcgaacagcgccaaagtgagaaatttcagcaccggcgaatagcggcggtagggcaaaaacacctggagcagggtcgagccggcggcgaaaatcagcgcgtgctcgtggttgaggccgccgatgacgagcgagagcgcctcggccatcgcggcaatgtcggcggcgatgttgaacgtgtttgctgtcacgagcatggcgatcagtgccaggacggcccagcgcggcgcgagctgcatgacgttggcggcgagccccttgccggtgacccggccgatccgcgcgctgacgagctggattgcgatcatgaacggcgtggtcaggaacacggtccacagcagaccgtagccgaattgcgcgcccgcctgcgaataggtggcgatgcccgacggatcgtcgtcggcggcgccggtgacaaggcccggacccagcctttgcagcagcgtcggcgcggatttcgtcggggtgagggcgccgtcgcgcatgaaagaacctcgaagggcagatgctttcatagcaaatgtcagcgaaggaacaaacgttccctgccgccggcccaagaattctgattattctaaattcgtttgtgccgtcgggcaaaacaggggtagattgccatcatcgcaacaatcatcccgcgtccttcggaggcttgtcgcaagcggcaaattgcgtgcgggatgaggcggcgcggccggtctacttcacgctgacgaacatgccccaggcggcggcgagcgcggcgcccgcgaagacgagcaccgggttgtcgcagaacgtgctgccatagcggcagacgtctgcgccgaactggccgagctcgtgacggcccgcggagtagaacagtcccgacagtcccagcaatgcagcggcgacgtagtacatcgacgatctctccggctagtccctcgttagtccgacatgtcccagcatggagcgaagagatttcgtttcgccgaatccgctgtgctgcattcgagataaagttgacgcgtcgggcaaaacaccggcaggatggcagcatgggcaagccggcaccgggatcaccggcgctggacaatcgaaaggccccgctcacgcggggcctttgtcttgtcggctgtgatggcttatcgccgcgagcccgcgccgtacagctcgcgctcgcggccgatatcttccggcgacagcggcgggcttgcggcgtcgaagtcggtccagccggccttctgccacgtcgcgctgcgctccccgaggttcactgacttttcgtgcagaagcgcatcgaggcgtgcgcggtcctggtcgggcactcttgcagagaccagcgtcccgccgcggcggacgccctcggcatatcgcgatgcatcttccttggagacgccggcttccgtcagcgcgccgatgatgccgccggtggccgcgccggcagcagcgcccgcagcggtcgcggcgagccagcctgccgcgacgaccgggccgaggcccgggatcgccaggaggccgagcccggcgagcagacctgccgtgccgccgaggccggcaccgatgccggcacctgtcccggcgccttcgacgcgatcgtcggtgccgtcgcgatcacggtcgaccttgccggacgacgagccgtaccaattgtccgaattgttggcgacgaggctgatgtcggagtgcggcacgccggcgctctcgagccgggctacggcccgctcggcatcggaataattgtcgtagaggcgagagatggtggtcgtcatatctggatttcctttacttggcggggttcacgttgccctggaagtcgacgctgacgtcggccttggtgccggccttgtcggccttgccgcgccagacgccctcgttgtccttctgcaggccggagacgttggaatagcccgccgcctcgatgcgcgacttcgcctggccttcggtgaagctgttgcggccggcgaccggtgcgttggagttgttctggtcggcgctgttgacggcgttgtttccagggccgctttgcgccggctgcgactgcgcgcccgcgggcgccacggcgagcagcagcaaggttgcagccagtacagctgaacgtaacatgtttttttctcctgcaagtgattgtgccggcgtcaacatgcgagattcgaattggttgcgtgggctccggacgagtctgctgcggcgctttggccgcgacagcgtcgagcgagcgcagccgccgctcgtcgtacacgcgaggaccagcccacagtcattctacttcgcagactgcactgcttcgcgctggcccgttgcaggctcccagggcgccggcaggatcacgcgaatgggacgcgcttcggccgcgccttgagcgacaggtgccgccttgtccttgacaggctcagccacagccacggtcatcagcgcagccagcgtcgccagagaagttgtcacaagccgtacgtccagcatcgaagcctcctgttctgcgcaccaacgccgcccgccggaattggttcggacccattcgggaacaagtggcaatttgtgatgtttgtacgagacaagcccggatgacgggctgctggaggaggacacgatgaacatcaaagcgatcattgctgccgccgtgctgacgtcggttgcagctcccgcgttcgcgcaatcgttctacgtggtgcaggacgtcaagaccaagaagtgcaccatcaccgagtcgaagccgacgaccacggaaaccacggtcgtgagcggcgacaccgtttacaagaccaggtccgaggccgaggccggcatgaagaccgtcaaggtctgcacctcgaactaaggagaagaagcgcgaaggcctcatcgcgccggcgcgtcgacggcagcccgcgcggaccggtccgcgcgggctttgccgttggaagcccagtcgctcatgcaggggccatgtccgttcgccgcctcggccggatccgggaacttcctctgtcggagccgattgtgctatccgttttgaacggcgtttgaggcagctcccaccatgcaatcgcgctatcccttgttgaagaagtggacggcggacgaacacgagcggttgaaagccatggcggaagccggacggcggcccgacgagattgccgctgagctcaatcggagcgaggcggcggtgcgggtgcgagcctggcagcacggcattgcgctgcgcctcgtcacgcagaagcgcggcaagtgagcgagcctagtgcgagggaccgcagacgtgcgcggcgatctgcccgcacggatcgaacgtcaggcttgcgctgacgatgccgccacgcgcgacgtacgagatcaccaccgcgtcttccaacggctggaggttgtcgaggccggtcgcaggataattccgcagacgatgaacccaataggcgcgccgtccatccgggtccgagctcatcttcgagccgccgcaggcgcagtggatcgccgcgtggtccgcatacattccaaggatgctctcgatgtcgccggcgcggtaggcatcaagccaatcgaccgctgcggccatcgggtcaaaggacatcgtccgacctgcctgccgtttctccggccggcggtttaggaccgggatcatgaatgcggcgtgaaggtcggcgcggacccccgttcatcagtctgtcggaagggtgaacgaatgcttgccgtccttctcaaccggcgaccgacacctcgagcggctgaaaacccgcgacgcgcggcagcgacatgaagccgggcctggcgaaatagtacccctggaacagccggatgccggccgcccgcagggctgtgagctcggcctcggtctccacgccctcggcgaggagggtgatgtccagctcgcgggcgatcgcggccagcgcggacacgatcacctgcctcggatggctggcatcgatgccgcgcagcagctccatgtcgatcttgatcaggtccggctgcagccgcgccagcaggcagagcccggcatagccggcgccgaaatcgtcgagcgcggtccagaaccccagcgccttgtaggcgccgatgatgttctcgacatgcctgggatcgctcatccgctcgttctcggtgaactcgaacatcaggttggtcgcgggaaagttcgcgcgccgcgccgccgcgagcgattgctgaatgcacgcgcgcggctcgtacacggcattcggcatgaagttgatggagaggcgcgcctgcggatcgtcgaacaggcgtccggcggtttcgatcgccatgacgcgggcggcctggtcgaaacggtagagctgatcgtcggtgagctggctcagaacgctgtgcgcgctttcgccgttcggcccgcgcaccagggcctcatagccccagacccggtgttcggcgacgtcgacgatcggctggaacgccatcctgaattggaacggcaactccgtcccgtccccgcatcccgcgcacttcacgtccgtctccagcccagcgtccccgatgcggcgagggtacggcacagctcgttaaggaacaaagaagccttccgcccaggctgcccggcggcttcgcccgatgttcatttgtgcacacaagccggcggtgccccggggtggacgcccgatgaaacacgtctgaaacagggacgaaaccatatcgtcctgaactcggccgggccggagcccgaccaacggatcgaaaggagagacgatcatgatccagatcggttcgaaggaagaagtcgcgttcctgctggcgctgttcggcacccacacccagccggtcaagcggccgaagccgaaatcccagcagaggtgagagacgccatgcccggcttggccgaatgccagagcctgctcaggctcctgatcgccaggggcgatcccaaggccatcccgctcgccgagggcgccatcgaccagttcctgaacacggcgccggccagcatgcgcggacgcggcctgcgcgtgctccagcgcgatgcgctcgaccagcacgatgtggctgtcggcgtgcagcgctcgttcgccgagacggtggacgcctatatcgagcgcaagctcgcggaggaatgagaggcgctgcgcaagccggccgccgtgccgtcggagcggagcggccccgcggcgttcccggaactcctgatcaccggcagaaatctttggtcgcgccagaaacctttgctcgttcctcgacctatttacggcaaaggatgcggccatgccccggtactacttcgatcttcgcgacgacaacggaattgcgctggacgaggaggggctggaattatccgggccgcgcgcggttcaggccgaagctgccaagtccgccgccgacgtggcgcgtgatgagatgctgtcggcgcagctcaccggcgcccggcacgagatggcgatcgaggtgcgcgatgcctgcggtcccgtcatgcaggtgaagttctgcttccagatcgaagatctcaagtcgcgaccgtcctcacgcggtcattgacgcgccggggccgatcgggacggctgccgcaagggcggcagggactgctcgggctccagcacggcaaccttgcggccgagctgccagacttccaccttgccgtgccgcgtgaaccgctgcgcgaaggtgagggcggaggaatcggacggggcctcgaatgcttcggccgagcggaagacgccgtcctcgccgacgagataagcgcgatattgccgggtcatgtcggggccctcaggccgggcgagcgcagccaggcctcgatctgcatggcggtctcgtcctgccgcgcctggcgcagcagcatctcgcgccggtggcccggcgcaagcgcgcgcgcttcgtcgcggcagcgcgcggcttcatccgcgaggcgttcggtgagggtctttgtttgtttgaaacgtcgccgtgtcagcatggcgcatctcccttgttcgaaagggcgggagcgaaattcgcgttctcatcaccgaccaatgcaattcgcttgcggtgacgggtccaccttacgcttcttgcgggcgcagagtcatatcatttggcaaaggcgcggcgatttttttgccgcgctgagattgaggatgttgagcggcttactcattttgcgccgccgcaggaaagccacctgcacagcaaaagagagcaccgcaatgcgcgtcgatcggccgttgcctgtcgagcacgagcaggccgaatacatgcgcttcggcagcgaggcgattgcaagcaatgagttcggcggcttccgacagtcgctggacgttctgcttcaatccggcgtaacgcgagaacatcgcacgcaagctgtcaccggctatcctcccccttcggaggcacctccatcgtcttccgtcccaaaacgcatcgggaagcggctgcttcaacaactcgcggcattcgcgcgcgatctggcgcctcgcgcggtctgctcagcacgcacagttcgtgccgccagtttcattcacgggaggccaaactcactcggtgctgggctaggagggtggtcacgcctgttgacattgttcctgttttgttctagtaatctatattacaacctacaggtgaagagtcgaagtagcggctcgccctcgattttctgcggggtcgttcatgagaaactcgcttctcgctttggtcctattgaacaagccagtgacgccggacatgtcggcggttgccaaggtccttcgcgcccgacatccggagttggcaacggagacggcgaacaatgaagagaagcaaccgtctcagacgaatgcgccgctcattcgctgcggcgacaagctttttgcggtcatgtcgatgcctgcacctattccgcaggagccggagctgtgggcgcgcgctgcgcgaacctggccagagagcgaggctgtggcaaagcgccatcaaggtcacatgatcgtctcgctgatcggaaaaagcgagcggccgttgaccgccgcgcgccttacgaccgcggccatcggcgcgttgattgaggccgtgccggaatgttgtggtgtggtgtgggctggccgggtggcgcggccggcggatgtatggatcgaggcgtcacgctggtcgctcgcaccatatccagattatccctttagactttgggtcgacatccttccgttccggtcaggtgcaaaggtcggggtcattacgatgggattgtcggcatttgttgaccgcgagatcgaatttgtgtcgagtaagctcgcgcttcctgcgttgttcgacaaagtagcaggactttccgtgtatctgatcgagcatggaaaggtggtgaaggatggcgatacgatcggtgcaagtgcgagcgagcggattgcggttcgctacaagaactctgatctctttggagggatggcggtgttttgctgtactgattccgcggaggcggactccgtccgcacgcgatttgcatgaagttgaacgaggagggactaatggtgggctcccttccgcaagaagcgggcatgaagggcatcgggtttatcgatgcgcgaagttgagctgctgcgccactgctgccgatcttgaattcaactcatatggatgtggtcgatcagagccggcgaagctttgctttcatgccgcagcggcatagaagagaacattcgtatggaatttttccgcgttatgctgagggcttgttattaggcgcggttcatggtggtccgtgaggggcaggcgatgccttagcgaggttggtcatgagtaatcaggaagcaattgcgggtgcgaagcgacctagagtacgaaggcatcggttctataggatgcgcccaaaaggcggaggtaggcggggctattgggtggaggacgagagtgtccttcctcctcaccgagtatatcgtctgcccgcttctaacccgcatgtgccttatgtgttcaacaagaagaaaggtcgcctgccgtacgacctcgagctctgttatcaatggtggctcatctcggatcgggccaaggcagtgttcgagaggctcgaccccgaagctttcgtatttgtgccgtgcgatgtgcgaaagccgcaaggcatctatgatggacccaaatattggctttgcgatgttgcccgagttctagacgcgctggacgaatcgcaatcaagcctgcgcatcggaatacgaaacgatgtccgctatctcgaccacggcaagaagtactacgagatcttcacgggtgacaaactagtcttcagagatgccgcaatcggcaacgctcatatcttccgcatggctttcgctgattcggctgtcatatgcgatcaagacttcaaagatgcctgcacgtctgcgggcctaaaaaggatttggtttcacgacgttctgaaattatgagtcggccccgatgctacccgaaaatgccgtcagtttcgctcgcgcggccttgttgccatgataggcaaaggctggaaccgctcttcggggggaggatcaaggcagatcagtttcaatcagcagacatttgggcccgctagactgattgctatctgcacactgacaaatcttcgaacgattgcagaccgcgctgacgggcgtgcggtccgttggatggtcaagtatcctggtgttccgtcagcgcaccaagccgatgatctgattttagtggctaacgtgctccggtagcacgtcacaaacatttcaggccttttgacaggcgcgcggcactcgccgcagcgtccgcgctcgcgcgccctcatccattcaatcagcccacaatccaatgaacctctttgtgagggtgcatgtattctattctctttgatcatcatattattcccaaacaatgtagagaccataaggcatttcgcgatatagccaaagaaacgttcgatttcgactctcccgcaaatcgtatctacttgccagcagatcaaaagcttgccgcccaattgaatgtgtctcctcatcccgggagacatcttgctacctacagcaaatcagtctgcgaagcacttgatcagatcgagacgatcgatagtccgagcgagcgagttgcggagatagggatcctcatcgatgcactgcgcgtcggcttcgtcaacggcgatctctatacaaacttgccgatcggtaggacgccagcggaggctgacgccgaaattaggagggtcttgaaagaccacaaagcctaccttgctcagtacccggaccaactcagggctatcagggatcttgagcaaagaggcgccaacgctggtttaaaccatctaatcaaatggttgccgtacctggacaacccagagaggcagaaagcgttgaatgaggtgattgcccgcaatcccgacgttaatctgacatctgggaatcgcgatcgggacggaacaccttggtccaagttcgaagcgtcggatccctcttcgggcattcttcgcatacccggctcgattccactcgacccgagagactctccgcaactgcctggctacagttcaccttcgctagccggtttggacgaacaagaagggttcacgggaagtgatccccgcttcacacgtgcgctgccaccctctcccacgccagatcccaatgaacagcggctgggtcaattgccgcctactacggccgccccggcggatccgctggtcctccgatccgatccgcactccggaacgccggatccataccatgagaatccattagcaggcggcacaccagtgttgcgcaatgcacttccttggttggccggagcggcggcggtcggcgcagcggctccccttattcccgcttggctgcttaccattgggggcaccttggcgcttgcgcgcgccgtcaacgctcaggaaaccgatgccgccgcgacgatgggcgatgccattcccagtggaggagttctctcagcaggagcgcctgcacacaacgccgtgggcgatggactcagcgccggcaacgctgccggcaccagcggctcttcggcatcatcgtcgacaatctggccgcggctgggcggagcttggtcggttgatccagaagtgccggctagtacttttgctgatcgcttcggcaactgggttagcacgtcgggcggcaccatgcctgccagagatttgccagaaggcccacctcggcctcacgcaggatcagtcgcgcctgaaaacgtccggcgtctcacccgggccaacgcgtcggctgcaagcagcgtgttctcgtccgggagtgcgcctgtcccatttctgccatctaccgaattcagcgaacagtctggtagctggagcgtgccggtcgccgatagccggccagcccagatgagcaggccgacagaagcattcgcgcacgagcccagctacctcattcaaccgccgatcttcggagtggatggcgcgggcaatccgcgcaatgacaccgaggagtggttctcgcgctggatacggttttcgtttgggccggaatgaagaggctgccgtttgagttcgagatcggtttgacgcgtcgggcaaaacactggcagactggcatttcgaaaaaggttcgaaaccaagcccgcgagatgtcgcgggctttcgttctttggagggagccatgacttccgtgcactacgcatcggcagctccgaaccacgtcgtcaacgcctccgcaagcccgcagctgttttcatcgcctacccaggccacatgcccgtctggccgcaccagcacggcgcccggcggggggaccgctccgatcgccggaagctgccatgcgccgtcgtgttcggcatcgactgcgacgatgcgatcagcccagggcgtgatgtcgatgccgcgcacctcgccgaaattgagcagcaggccgcgcgcgccgtgcagaagcgtgaacagccgctgcttgcgtccgtccaccacgagatcgagatcgggcatgcggcggccgagcaaagcgtggccttcgccgagatcgtaggcgatgtcgagcccgctcatcatcgcgccgaagcgtcgtcgcggctcgtccatggcgagcaggtcggacacgatctcgcgcgcggccttgcggccgtcgtcgccgcggcggagcagggcgatctgcgccatggtgtgcttcaagacgcgcgcggcgacgggatggcgctcggcatggtagctctcaagcaggccgtccggcgagatgcccctgacgacctgcgccagcttccagccgagattgaccgcgtcctgcacaccgaggttgaggccctggccgccgacggaatgatggacgtgcgcggcatcgccggcgagcagcacgcggcccttgcgataggactcggcctgccgcgccgcatcggtgaagcgggagatccaggcgggatttcgcacgccgaagtccgtgccgtacacggcggcgagggccgcgccgagatcgcgcaaggtgggctcgcccccgcgcgccagcgtcgcttccgtcacgacgacgagaatgcgtccatgctccgtcctgctgaggccgtggaagccgagcgcgtcgtggcgcaggccgagcaccggctcatcgtgcatctcgacctcggccatcagattgctgagcgtcggcgggaagccggtgaagtcgatgccggccgccttgcgcaccgcgctgcggccgccgtcgcagccgacgagataatcggcgcgcaagcgctcgccgcaggacagggcgacgtcgacgccggtctcgtcctgcgcgaagcccgtcacctcgcggctccgatagaccggcaccgcgagctccgcgacccagccggcgaggatgcgctcgatgtggctctgccgcagcgcaagcccgtaaggatggcgggtggggaggtcgccgatgtcgagcctggtccaggcgaagccggcgagctgggtgatctgcccttcgcgcaggaaacgctcggcgacgccgcgctgatcgaggatctcgatcgtgcgggcgtgcagtccgccggcgcgcgtctcgacgatcgcctgatcggggcgccgctcgacgatcgcgacgtcgacatgcgcgagcgcgagctcggccgccagcatcaggccggccgggccgccgccggcgatgacgacctcatggccggtgatcgcgcgttctgcacgcggtcggcggcgcgaccgggacgtcggaagcaagacaggcatggcgtgacccctcgaccggttgttcgggtcgaggggtcttacgcgatcgccgggggcttgaagcaagtccctcgcgcaccacatatcgagctgggaggaggggctttcggcttccgtgccggccgcgttgacacgtcgggcaaaacaccggcagaatggcatcatcgaaagagttcggccgagcccgcgcggaagtgatccgctgcgggttttctttttggcgcgatgtctcagcagatgccggtggttcgctgcatcacgtcggcgagctcctcgaaggagaagggcttgcggatcatcggcaggccgccgcgccgcggctcgcgcccggacaattgcagcatcttcagctccggacgcgcccgcctcgccagctcggcgagctcgtggccgtccatgcctggcatgttgatgtcggtgatgaggatggagatgtccggattctgctcgagccgctcgagcgcatgcgcgccgtcgtgggcgctgatcacctcgcagccgagatcctccagcatgtccacgatcacgccgaggacagcgggatcgtcgtcgacaaccaggacggtgtggctcatgtcacgaatgttccttccgcaagagagataaacgcgccgctcgccggggaagttcctgcaagcctagtcgtccttcgacaaatcgccgggcttggcggggaggtccatggcgccgccctcgccatgcgcgaggtcgcggcccgtatcttcgttctcgccgctatctttgacgatacctcgctcgtcgcgcgcctcctcgccgcgtggcttctgttcgctgcgcgggccggctccggccaggttgcgcgatgtctcttgtggaatcgagttggatgtcatgggccgatccccctgatcggttaactttcgcgcagcctgcaagttcgtttgacacgtcgggcaaaacaccggcagaatgacatcatcgagacgagtttggttgacccgcgcggagagatccgccgcgggttttttcgttctcgatcgcggaatcggacggcggcggcgcattgcggccacgcactcgtcagacctggggcgccaatcggcgcgccgtcgtccgaaccattgctggccggcacgcgctaacgtgccggtccgcggcgccgggccattcgcccgcgccgctgcggtctccgggatggagagagggttcgcgcccgaaacgatcgcgccgcgatgctgcgatccgccgcgcattttcttcacgggagagatgatgaccgcttatctgataacactcgccgttacgagccggacaagctgatgggttattgcgtcgcgctctatttcgcaaagctcctggtctgggacaaggttctcggattgggctcgaccgatgccctggccggatttgcggcgatcacggccaatcttgtggtctcgttctacttcgccaagcgcggtttcgagaacgtcgcgaggataatcaagcgatgaagatgccggaaaacgagatcaaggccattgtggccgaagcgctggctgaacatcacaggctccagcaagaaaacatcaacgcgatcgtgttgaaggcggtggcttcggtgctggcctcattcggcatcgaagatgacgatcgaagggagctgagggccgatctccaacatttgcgaaggtggcggaggagcgtggagcaggcccagagctacactctcaaggccgtgatcacgatgatcgccaccggcctgatgggggccgtctggcttggcgtcaaggtcgtgctcggcaagtgagccttcacgacgacggcgatgctgcacttgcggttacgtcaatccttgcggacggtttcgatccatctacagaattcgtattgtcgatgcgtccgatgacgacatcgtcgattcgttgtgtgaactgcatcggttgacgttcctcaattcagccaccatgcctcaattcgagattggagcgtggtggctggcctatcatggggatgttgcagtcgctttcgccggcatcgttccatcgacgcacgtgagcaatggtggttatttctccagggtcggcgtgctgcaacggcattgggggatgcggccttcagcgcagatgatgcgtgcggtcgaggcaaggggaagccgcatgggttgggacagcatcgtctccgacacaacggacaaaccggtatctgccaacaacttcatccaggctggttatcggctcttcgcgccgaagacgccatgggcctgagcgcacaccctctactggagaaagcgcatccgctgagcaggtttacatcgcagggagcgtgcctgcaacagccccgggatgcgggcgagatgccgcgccggcttcatgcgcatgggcatgtccagggcctggcagctcgagcgctgccgggccccttttgcgtattgaagcgatgcaggcgaggcacttgcgaagtcggcggcgccgggctttaagctttgctcttgctgcaaatcggcggccataagccgatgtaagggagcgctctatcgatgcccaccaagccccaattgccggaacgttcaccgcgagggacggcaggtccggctgcgctcgatggtctgttggtcgtcgattttacgcgggtggtcgccggaccggcctgcacacagacgctcgccgatttcggtgcacacgtcatcaagatcgagaatcccgatggaggcgacgacacgcgtgcctatgagcacgccgaaatcggtggtgaaagcgccgcctatctcagcctgaaccgcaacaagcgcggtattgcgctcgaccttgccattccggaggctcgagagatcgcgctggatttgatccgcaaggcagatgtggtcgtggagaacttttcgagcggggtcatgaagaagttcggactcgactatcagtcggtcgcgccgctgaacccacggctggtctattgctcgatctccgcctacggacgcaccggaccgtttgcctcgcggcccggcttcgatcccatcacccaggcggaaagcggcttcatgtcgctcaacggatttgccgacggccctgcggttcgtaccggtccgcccatcgttgacatggcgacgggcatgtctgcctgcaatgcgatcctgctcgcgctgctggcgcgcgaccggctcgggcggggccagcatgtcgaagtcgccctgttcgacgttgcgatgggcatgacaggcttctacggcatggcctatctcatcaacggcgaaaaccccggccggttcggcaattcgcccagtgggtctcccacggtcggcgtctacgaagcctccgacgggccgctctacatggcctgcgccaacgaccggctctaccgtcggctcgtggtcgacgtgctgaatcggcctgatctcatcaccgacccgcaatttgcgacgcgcaaagcgcgttcggagaacaaggagctgttgcgcgcggccatcgcggaggtcttcgcaagctatactctggagaactggatggccaagatgaagcgggccaatattccggtcggttatcttcggacggtcgaggaggggttcaatgcgcccgaggctcgcgagcgccatcgcctgaatcggattccgcacccgacggcggaatgggtgccgaatatcgagccgccaatcacaatgagcctgaccggcgcgatcgatcccgttgcggcacctctgttgggcgagcataccgggcaagtcctgcatgatacgctcggctacgacgaaagccggatcgcggaatttgccgagaggggcgcgtttggcgcggtcaagcctccaacctcggcgtgagtcgcttcctcggcttgatttggcgaaggtcccgccgcataaatgcgtaacagcgagggacaccaatggcgcctggcaaggagccgagcatgatccaacccaccggttcgcaagccggtggaggggcctatgcatcactgatcgcgaaggcccgggcgcttctgccgcagctgcgcgagcgagcggcgcagacggaggaactgcggcgtctcccgccggaaaccgaaagagatctccacgattccggcttgttccggatgctccagccatcacgggtcggcggcgccgagcttgactatgtcgccctcgtcgattgcgctgagctgctcggaaaggcagatgcgtcggttgcctggaatctcgccaacctggcgagccatcactggatgctcggcatgttcgagcagaaggcacaggatctcatttggggccgtgatccggatacgctgatcgcatcctccttcatttttccggccggacgcgccacgcgggtcgagggcggataccggctgcacggcagctggccgttctcgtccggcgttgcctcttgcgaatggaacatgctggcaagcgtggtctactccgacgacgaggcggatggtatcgaatatcgaatcttcctgctgccgaagggcgattacaaggtgctggacacctggaatgtcgccggactgcgcgggacggggtcttgcgacgtggaggtgagggaggccttcgtggccgaccacatgaccgtcggggtcggggatctctcaggtggcccgacgccgggaagctccgtcaatccgaatccgctttacgcactgcccgtgttctcgctcttcccatacgtcctctccggcgtggcgctggggaatgcacaggcgtgtctcgacgattatactgaggtcgcgcggcatcgcatttcgacttacaaccgcgccaagcttagcgattttcagagcacgcagatcaagatcgcggaggcttccgccaaaatcgatgccgcacgcctgatcatgcgttcggcctgcctggatgccatggatgacgcgcggcgcggccatatccctgacatggcgaccaagaccagatatcggcgcgacggatcgtattcagtgaacttgtgcacggatgcggtctcgatgctgttcgcagccagtggtgcgcgcggtctgttcacgagcggtgtgttgcagcgacagttccgcgatgcgcacgcgatcaattcgcatctggcattcaatttcgacgcggccggaaccaactacggacgggtggcgctgggcctgccctccgaaaatctcacgctgtgaggtcggtcgatgaatgatctgccgaagcagccccgcgcgcccgatcccgccaacgagttcgcgagcgacagctcgcagatcgatccgcgcgactttcggaacgcgctcgggacctatgcaaccggcgtgacgatcatcaccgcggcagcgcccgacggcaagccctacgggctgacttgcaattcgttcgcctctgtctcgctgaatccgccgctggtgctgtggagcctcgtcgtctattcctccagcctgaccattttccagaacgccagccattttaccgtcaacgttctaggcgcctcgcaacaagcgcttgcgaacaagttcgcgaaatcgtcggacgacaagttcaccggcgtcgcctggacacctggcctcggcaatgcacccgtgcttgccgagagcgtcgccaattttcaatgtcgctccgtgaaccgctactatggcggcgaccacgtgatctttctcggtgcagtcgaggcctacacatacaatgcgaaggagccgctgcttttcgcgcggggagcgttcggtcgcttcatggctgacgatgagcggaagaagtcgtcatgaagcgcttcagcttgccttggacgggtgctctgtcgctgaaagcttgtagatctccagcgcatccgcctctgcgccgcgcgccgccttcgccatcctgaaaagctgtcccgcgagcgaggccatcggcaccggcgtcgaggtcgcctgtgcgacatcggcgaccgtatcgaggtccttgagcatcgtggcgatgtggccgagcggagggctgtgaatgccctgcaccatccgcggcacgaacagctggagcggaatggaatccgcaaagccgccggcgagcgcttcgggcaatcggttggcgtcgatacccgcgttcacggccaatcgcgctgcttccgcgaggacggccatcgcgcatcccacgattacctggttgcagagtttggtggtctgtccggcgcccaatcggacccatatgagtgaacctgcgcgccatggccagcacatagggtcgcaccctctcgatatcaccagcttccccgccggccatgatcgccagcgtgccgtcttccgcgcccttcgtgcccccggataccggcgcatcgatccaactcgtaccattcgcgtctttcagtcgcgctgcgagatcgcgcgccgcgtcagggtggatggacgagaagtcgaccacaagcttgcctgcgccgggccctgccgccagaccctcgggtccgaaaatcacctcctcgaccgctctcgcatccgtcacgcacatgaagacgatgtccgagttcaccaggagatcacgcggcgtgcccgcgcgcttggcccccgccgcggcgagcggagcgactttgccctccgatcggttccagacagcgacctgatagccggcgttgaggaggcgtcgggtcatcggcgcgcccatcagtccgaggccgagatagccgagcctgtcggtaccccgcgggcttgcgttgctctcttcagccataggttgcctccttctgccgcaatgtggcgccgccttaccatacattgcggacgggaaggcgaaaccgccccggtccgcatggcttgcctgattgtttgaaccatgaaacatttgatgcagtcgggttgggggcgccggtcggcgccgtagcagcggagtggcacgatgcgaaccgtttcgaaatggatcctggctttgggagcggcagcagccgtgagcgcgggcgcaagcccgtcatggggacagcagacgatccgcgtcggctggaccatcccggccgaggaatccaagtactggatgatgcgcaggccgaccgaattccccagcatcggcaagacctacaacatcgaatggacccaattccagggcacggcgccgatgacgcaggccttggcggccggtgcgttggattgcgcgacgcaggcgcctctctcgctctccaacggtgtcgttggcggcaatctcaaggcctacatcgtcgcgcagcatgttttcgagaagcccggcggcttctcggtgtactgggccgtcaaggatgactcgcccatcaagacaattgccgacctcaagggtaagacggtcggcatctccgtgatcggcggaggtacgcaaggtccattcaacctgctgctgaagcagaatggcgtcgatccggccaaggacatcaagctggtcgaggtcggctttgccgtctccgaggacgcgctgcgccaggggcgcgtcgatgcagtgaacatgaaccagccctttgccnnnnnnnnnngggacaaggaagctgttctcgctgtccgaggccatgccgaacatcgtgcacatcctggaagcttgccgtgccgatttcgtcgacaagaacccggaactggtcaaagcctatgtccgcgacatcacgtccggcatgaagaaggcgctggcgaaccgcgaggaaaccttgaaagtcgtgtccgaagtgctgaaggcgcccgttccggtgctcgagacctatttgctcaaggacaacgatttcggccgcgacccgggcgcggcgccgaactttccggcgatccagaagatgctggacatctatgcggagacaggaatgctgccgaagctggatgtcgcacagttcaagcatccgtcgatcgtcgctccgttgcaataatggggcagacgatatccgaccacaagatcgcggcgttccggattatccgggacgctgtctgaagaagatgctgatatgaagaaactgcgatcacgcgttaccacggatgggctcgaccgggccccgcatcgtgcattcatgcgtgccatggggctcgacgacgctgcgatcgccaggccgatggtgggcatcgtcagcatgaagggcgagcagacgccctgcaacatgacccacgacttccaggtggctgcagccaagaccggaatcgaggaagccggcggcacaccacgggaattttcgacagtctcggtttccgacggcatcagcatgaatcatgagggcatgaagttctcgctgttctcgcgggagctgattgccgactcgatcgaggccgtggttcatggcctggcctacgatgcgttgatcggatacggcggatgcgacaagacgcctcccggagtgatgatgggcatggttcgctgcaacgtgccgtccattttcatctacggcggcagctcgctgccggggcgcattgacggacgaacgttgacggtgctcgactcttatgaagctgtcgggagcttcatgacgggcgagatcgacggcgccacgctcgagcggatcgagcgcgcctgcctgccgacgatcggcgcgtgtgccggccagttcacggcgaataccatgggcatggtgtcggaggcgatggggctgaccattcccaacgtctcgatggtgccgggcgtctattccgagcgtgcacagatctcgcgacgtgcggggcgcctgatcatggagatgctggagcgcggcgggccgttgccacgcgacatggtgacgcggaaatccctggagaacggcgcggcgatcgtcgccgcgacgggcggctccaccaatgctgccctgcatctgccggcgatcgcgaacgaggccggaattgcgttcacgatcgatgatgtgggtgaggtcttcgccaggacgcccttgatcgggaattttcggcccggaggcaaatatacggcgaaggatgtctacgatatcggcggcgctgcggtcataatccgtgagctgatccagagcgggcatatcgacggcaactgcttgtccattactggccgcacacttgccgaagagtatggtgcggcgaatgcgcccgacggagaggtcgtgcacgcggctggcgcgccgatcatggctgacggcggcgtcgcggtgctgaaaggcaacctctgtcccgacggcgcggtgatcaaggttgcaggtttgaagagcctgttcttcgaaggcgtggcgcgggtttttgaggatgaagaagcctgcgtcgccgccgttcgcgaccgcagctacaaggcgggcgaggttctcgtgatccgcaatgaggggccggtcggcggacccggcatgcgcgagatgctcggcgtcacggcgctgatctacgggcagggcatgggcgaaaaagtggcgctgatcaccgatggccggttctctggcgcgacccgtggcatgtgcatcggctacgtatcgcccgaggcttttgtcggcggtccgctggcgcttgttcgcgacggcgacaacatcaggatcgatgcggcgaaccgacggatggatgtcctgctcgaggagcaggaactcgccgcgcggcgacgcgaatggaagcaacgaccgccccgtcaccgcgcaggtgcgcttgccaaatacgcgcgcctggtcgggcaggcgccgggcggagccgttacgcatgaaggcccggcggaatggccgtggttcgaatgacgcgccgcgcttgtgcgaaaatgacgacctgtctggcaggcttcttgctaagctcgtcccgtgaagggtcgtgcgagtgaggcggaagacgggatgacgatagtgcctgcgagatcgagcgaatgggtgagaccggtggcgcaacaggagccggcttctgcaatcatcgagatcgatcgcgtctcgcaggtcttccagacctcggcgcgcaaagatcatgtggcgctttcagacatctcgctcacgatcgaggagggagccttcgtctccatccttggcccgtccggctgcggcaagtcgacactgctctacattgtcggcggattcgtcagtccgaccagcggtgcggcgaagatgaaggggcaggcgatcacggcgcccggtccggatcgcggaccggtgttccaggaatttgcgctgtttccctggaagaccgtgctcggcaacgtgatgtacgggccacgtcagcaaggcgttcgcgccaccgaggccgaagcgcagagccgggccttgatcgagatggtcggcctcaagggctacgagaacttctaccccaaggaattgtccggcggcatgaagcaacgcgtggcattggcgcggacgcttgcttatcatcccgaagtgctgctgatggacgagccgttcggcgccctcgacgcgcacacgaggacacgcctgcagaacgatcttctgaacatctgggagcgtgaccgcaagacggtgctgttcgtcacgcattccgtcgacgaagcggtcttcctctccgacaaggtcgtcatgatgtcgaaatcgcccggacggatccggcaagtcatcgacatcgacctgccgcggccgcggcgccgcaatgagctgttgctcgacccgcgttaccagaagtacgtcgtcgatatcgagcggatgttcgatgagagcgacgaaggcggcgtgtccgcatgatgtcgccggctgccgtgaccaaatacgctgccccggtgctcgcctgcattggactgctggcggtgtggcaagtcgcgtcactggcgctgaagaacgacagctttccgacggcgatcgaagcgatcagtgcgattcccagcatccttggcgacaaggaatccttgatcaacatcctggcctcgctccggcgcatggcgatgggatttggcgcggccgtgctcgtgtcgattccgcttggtcttttgatgggacgtagtgctgcgatcgcggcctttttcaatccgctcctgatggtgatctatccggtgccgaaggctgccttgatgccgatcatcatgctgtggctgggtgtcggcgacatcacgaagacgctcgtgatcttcctcggggtcagtctgcccgtgatctatcacagcttcgaaggcgccaaagcgatagaggagaagatgctctggtcaggcgtcgcgatggggctctcaccgctgcaacgcctggtgcgcatcgtgctgccggcggcgctcccggaaattctgacggggtgtcgtacgggattggtgctggcgctgatcacgatgatcaccagcgagatgatcgcccgtcagtcgggcgctggaaacatcctgttcaatgcgctcgatatgggccaatacgacaccgtatttgcgatgattatcatcgtgggagcgatgggaatctgcctcgatgcaatcttcgaacgagtccgcgcaagattggtgcgctggtccgaacctcagttcgacatgccgctgagtttctcatgatgtcgcggtttctctcaccaagtgtcgctcttgggatcgccccgatcgtcatggtgatcgcgctgtggcagggcctggtgtctttcggcttcgcgccagcagttctgctgccgccgccaggcttcgtctttggccggttattgcagcagcttgtgacttcaacattccagcaggagatcgcggcgacgctgatcaggctgtttgccggtttcgcgattgctgtcgtggtcggtgtcagcgtcggcatcgccgctgcagcaagtccggcgatcaacgccgtggtccggccgatcgtgcgtgtcttggctcctctgcccaaggtcgcgctctatccggcgttgctgctgctgctcggatttggccacggatcgaagattactttggtggctgccgatgctcttttcccgatcctgctgtccacctattacggtgcatcgacggtcgagcagaagctgatctggtcggccatggcggcgggaacgccgcgccgcgaaatcctcttcaaagtggtgctgccggcggcgatgccgtcgatcctgaccgggtgccggattggccttgtcatttcctgcatcgtggtgtttctggccgaaatgatcacgtcgacggacggattgggacacgccctcgtgacggcggcccgaaccttccaggcggtggacatgttcgtgccgctgatcacgatctcgctgctgggattgatcctgaacgggctgctgggagtcctgcgctcttacctgctccggggcttccccgaagcgtaacaaacaagaattcagaagaccgggagtggaccatgctggctgaccgcatcgaagcaaaatggatcgacgcgttttgcgagattttcgaacgttgcgccgtcaaggcgggcgatacggctgcgatcctctcggaaacccagtcgcgcgccttgaacgtgcatctggcggaattggccctgctgcgcatgggggcccggccgtttcacgtggtgatgccaacaccgcgcaaccggaatatcgttccggttcgctccaccggcgcgagcgaggcgattcagcggctcggcccggtcatcaccgcgcttcagcaggcggggtttgtggtggattgtaccatcgaaggcctcatgcacgcggtggagacgccggagatcctcaaagccggcgcgcgcatcctggtgatctcgaacgagcatcccgaggccctggagcgcatggtgccggattccgcgctcgagaagcgcgttcgtgcagcggccaagatgctgcgtggaacgaagcgcatgcgggtcacctcgaaggcaggcacggcgctcgatgtcgacatggtcggggcgtccacggtgggcgtatggggctggaccgacaagcccggcacgctggcgcattggccgggcggcatcgtcgtcagctttccgaagagcgggaccatcaacggcacgctggtgatggcgcccggcgacatcaatctgaccttcaagcgttacctgacctcgccggtgaagatgacgctgaaggacgattatgtcgtcgaactggaaggcgacggcacggacgcggcgatgatgcgcgcctatctcgccgcctggggcgatcgtgaggcctatgcggtttcccatgtcggcttcggcatgaaccccggcgctcgctacgaggcgctgtccatgtacgaccagcgcgacaccaacggcaccgaaattcgggccgtctccggcaacttcctgttctcgaccggcgcgaatgagttcgcagggcgctatacggcagggcatttcgacctgccgatgatgggaacgacgatcgaactcgacggcgttgccgtggtccgggaggggatgctccaggacgtcttcggctaattgctgccgagcaccggggggcgcgccagcccgaagtggcggagcagatcgaccatggcctggagccgtttcgcgcggtacgcgtcgacgtcgaggcctgagtagtcgagaaagcctgctcctgtgcgcaggccgatccggccttcatgcatgttgcgtgatatgacgtccggcgcccggtaccggtcgctgccgagcgcgccttccagatacctgctcgcgtagtagaggatgtcgccgccgccccagtcgatgaattcgagcaggccgagcacggcatagcggaagccgaagccgtagcggatcgccttgtcgatctcctccgcgctggccacgccctcttcgaccatgcgcgcggcttcgttcatcgccagcgcctggatgcgcgggacgatgaagccgggtgtggcggcgcagaccaccggtaccttgccgatgccttcgagcaatgccttgacctcgtcgatgacagccgggtcggtggccttgcctggcgaaatctcgacgagcgggatcagataggccgggttgagccaatgcacattgaggaagcggcggggattcacgatcgcgccggagagatcatcgacgaggatcgtcgatgtcgtcgatgcaatgatggggtccgggccgacttgtcgcgacgctgccgccagcacctcgcgcttgagctcgaccacctcgggaacgccctcgaagaccatgccggcctcggacagagctgcagcgcttccgccggccgcgacaaccgagacgcgcgcgatcagcagatcgacatccgcctcggccaagagccccagcttcgacagactggcgaaggtcttcctgacttcaccaagcgcgtccgcttcgagcttggcgaactcctcggccgagcgcgccttgatatcgatcatcgtgaccctgtgccccgcataagcgaaggcgacggcgatgccccggcccatgcggccagcgccgagacaggcgatattgatgcgattggtcatcgatcagaatccattgcggagcagcgtctgtagttcagccttgctgagattcccgagcccgagcgtctcgagcgttcggccacctcgggcaaaatcttcgccgcagatcgcgccgccgatcgacaggaacgcgttggccagcggcgttgcaacgccggccaacccggcgacggacaccagcagcgatagcccaagccgcaggtcttcccgcatgtagcggtgctcggtcagcacgatccgctcgcgccagtcgccggaatcggtcagccggtcgtgcgagccgcggccgtacatccagatctcgcctttcttcgcgtagtgatgcgcgagcgggaaatgcggcgcgccgtagccaagcgcctcgcgcaccgcgatgcgctcgtcatcgagcgcgtcggtgacccggcggatcgccgcttgcgtgccttccttgtgaatgtcccagcgctcgaaatgttcgatcggccctgcgttcatcacgatcagcggcggatggatgatcggacctgcgttcatcagcgccccggacagcgcgtctccgcagggctcaataacgcccgggaatgcacgtccgatcacgtcgagggcatgcggcgcctgatcaagcgggaacaccccgaccggaagtcgcttggcgcggatggtgatcgccacctcgaacggtccatgcttgcgcgtcaaccagggcaatgtgccggtttccgcaaagctcgccttggcccggtttccagcatcctgtgcggccttggcgaagatcatcgagccgaatgtcgccggcggcagaaacacgacctggccgtcccgcagatgcggggcaagcagccgagcgatatctgcttgcgcgaaagcaggtgcagggcacaggatcagctccgtgccatcgacggcttcggccatgtcggtcgtgaccagggcgacctccacgtcgtgacggccgttgtgatccttgaccaggatgcgcgtcccggcggcgcgctgcgccgcgacctgatcggcatcgcggcgccaaagccgaacctcgtgccccgatagcgcaaaatcgcccgcggccgcgaaagagccgtttcccccacccagaactgcgatcttcaagatgcttctccttgcccgcgggattgcgcatcaagctgtttcagcaggaaatgctgaaccttgcccagcgccgtccgcggcatgtcggtgacgaagacgatgtcgcgcggaaccttgtagcgcgcgagctgcgcctgaagatgggccctcaaatcgtccgcttcgagccggcagccggatctcgcaatcacataggcgatcggcacctcgtcccagcgcgggtctggccggccgatcaccgcgcattcgcttacatcagggtgttcgagcaggacgcgttcgacctcggccgggtagacattctcgccgccggaaatgatcatgttcttcttgcggtcgcgaacccagaaatagccatcggcatcgcacaggccgatgtcgccggtgcgataccagccgtcgtgcaatgcgtcgcgcgtcgcggcctcgttgccccagtattcgaagaacacattgggcccgcgcaccgcgatctcgcccggtgtgcccgccggcagttcgttgccggcctggtcgatcactttcgcctcacagcacaagccggcaaggccggtcgatccggcgcgcgacagatcgccgccaagccgcgtgtagacggcgatcgggcaggtttccgtcgaaccatagacctgaagcacggggacattgcgcgcgacgaagcgctcgatcaggtgcggcggcacgatcgtcgagccggtggcgacggccttgagtgacgagagatcggtggtcgcccaggcgggatgttcgctcacggcctggatgaccgcgggcaccatgactgtgagtgtcggccgctcctgctcgatggcggcgagtgctgcgtccggcgtgaagcgagcgtgcaccgtgacagtggcgcccaattggagcgcgggcgtggtctggatgttgaggccgccgacatggaagaacggcaatacggtgagtacgtggtcatcggacgtcatgttgtgcatgtgctggctcatgacgccattccagaacagcgcctcctggcgcaacaccgcacctttcggccgtccggtcgttcccgacgtgtagacgatcagcaacgggcaggagaggtcggtgtgtggatttcgaccggtgccgccgctcccagccagcagatcctcgaatgtcatgccgccgggcggcgcgaagtcgaggccgacgacggattttcccggggcggtctgccccagctcggcaagcactccggaaaacgcctgctcgagcaccaggaccttggcgccggcatcgctcagaatgaagagttgctccgccaccgcaagccgccagttcagtggcaccagcatcgcgccgagccgcgcgcaggcgtagagcagaaccaggtaatccggcctgttcaggctcaagatcgcgatgcggtcaccgcggccgacgccgaactcctgtttcaaagccgttgcggtccgttcgatgcgtgcggcgaatgcggcatagctcagccgttcgccttcgaaggcaatggccgtcttgtctggcgcgaacgccgcgttgcggtcgatcaggctgcagaggtccacggtcagtcgtccgtttcgccggcctcgtacagcgcctcgcgcccgatccggtcgaggcaaagctcggcggtccagggcagcatcagcgagccgcaacggctgtcgcgatagatccgctccagcggcagcgagcgcagcatcgcctggccgccacaggtgcggatcgcgagcgcggcgagctcattggctccttccatcaccgaatattgcgcggcataggcccgcaacacctgctccttgctcggattggcgcaggcttcggtgacagcctggaaccagatccccttgatctgctccagcttgatctgcatctgcgcgacggcgatctgcttggtcgggtacatcctgcgcttgaccggcggcatgcccgggacctcgccgcgcaagtagtgcaccgtgaagtcgtaggcggcctgcgcgaggcccatataagtcggcgacagcgtcaggaacatgtgcggccagcgcatcgcagcctggaaatagacgccgcgcggcatcagcgcggaatcctccggcacgaacacgtccttgaacaggagggtccgagagaccgtgccccgcatgccgagtggatcccagtcgccgacaaccgagacgccgtctgatttggccgatatcgcgaggtatagcgtgttgcggcgcgacgccttctcgccttcctcgatctcggtgcagagcacgccgtaatagtcggcgtggcctgagagcgatgcaaagatcttcttgccgttgacgatccagccgcccgcgaccggccttgcttcggtgccgaaagcgacgccgcctgcagcggcagcgccaccttcggagaacggttgcgagtaaatcgcaccgtccgcgacgatgcgcttgtaatggaccgcacgccgccgctcgtgctcggcacgggtctccgcatccatgtcgagatcgtcggcgagtggccccgaccacagggtcgagcagacatgcatgttccaggtcagcgcggtggcgccgcaatagcggccgatctcggccgccgccaaggcataggtctggtagttcgcgccgaggccgccgtgttttttcggcacggcaatgccgagcaggccgacgcgatgcagatcgcgatagttttcggtcgggaaggtcgcctcgcgatcgtaagtggcggcgcggccggcaaacacggtctggccgatctcccttgcgcgggcaatgatgccggcctgctcgtcgctcagacgaaatgcgatgggatcgaagatcggcgcatccagcgcgaccttgttggtcgtgtcgagggtcttactgacttgcatggtcattgcgcagtcaccttacgctttgctcgcgagagagttcagaaacccgcctagggcatcgtcgaaggcatcagggcgctcgagatttgcgagatggcccacaccggcgagctcaacatacttagccccggggatataggtcgccgtctttgccatcatgggcgcaggtgcgttgttgtccttcgagccggacagcagcagcgtcggcacggagatgttcccaagcgtgctgcgttgatcgaagccgatcagagccagcatcatggcgcgatagcttgcttcgggcacgcttcccatgcattcgcgcgccagctccatgccgtccggatcgggatcgtcgccgacaagctctttcaccagtgatggcgccagagacttcattgtctcgccgcgatcgagcggccctagccgtgcagcgatgaatgatttctgccagtcgccatctgccttgccgaaggcagggctggtctgcgccagcacaaccgcacgtgccagtttgggagattccaccagccacctctggacgatcatgccgccgatggaatggccgaccagaacaggcctgctgacatcgagctgttcgatgaatcgttggagtgcctccgccagggcagcgatgctgacgctggcgagcggttccgatccgccgtaccccggcatatcccatgcgatagcgcggaagcggtcgctgaatgtggcaagctgccgccgccaagcccgtgcggcaccgccgataccatgcaggaatatcaaaggtatcgcagccggatcgcccgcggcttcataggcgaagcgtccgtcttttgttatcattggcacaggctgcgacacgcgacatccttttgctggggccctttgatgctaacaggcctgctggcattggaaagcgataattttatacttaaagcaattttcgggccgctctcctgttctacattcgcggggtgcgagcggcggttcgttgcaaaaatttgaaggttaaaatatatcggcagaacgatcacgagatcgagggagcctgcgcatgtccggattgccgcatttgccgcacgcgctggtgaccggtggcggtcgcggcatcggccgcgcaatcgctgcttctctcgtcggcgctggcgcaaccgtaactgtgcttggccgcaacgcggcggttctcgaagaggcagtcaatgcaggtgccgcgcactttgccgccgtcgctgacgtctcgaacgaaacgtcaatgaacgccgccatcgccgcagcgagtgcgcacaagccgatcgatatcctgatagccaacgccggcagcgctgaatcggcgccattttcgaagtcggactcggccctttttgcgcgcatgatggatgtcaatttcatgggcgtggttcacgccgtccgtgccgtgctgccgggcatgaaggatcgtccctacggccgcatcgtcgcggttgcgtccaccgccgggctcaaaggttacgcctatgtcagcgcgtatgctgccgccaagcacgccgtcgtcggtctggtgcgctcccttgctctcgaaatggccggaagcaaggtgaccgtgaatgcggtgtgtcccggtttcaccgacaccgacctggtcgccggcagcatcgaaaacatcatgaagaagaccggcaggacccgcgagcaggcgatcgccgagcttgcgaagcacaatccgcaggggcgtctgatcactccccaggaggtggccgatgcggtgctctggctttgcggcgagggcgccggcgcgatcaccggacaggcgattgcggttgccggcggtgaaatttagcatttgtgtgcaatgcggaacagggaatccaaggagatcgcatgagcaggccagccaatcccgtcaccctcccgcttgcagattattcgcctcagcattttttgctggctgtggtcgacggcgtcgcgacggtcacgctcaatcggcccgagcggaagaatcccctgacattcgagagctatcgggaattgaccgatttcttccgcgcctgcgccttcgacgacgcggtcaagtgcatcgtcgtcaccggtgccggcggtaatttctcgtcgggcggtgacgtgttcgagatcatcggtccgctcgtgaagatggacaccaaggggctgactgccttcacgcgcatgaccggcgacctcgtcaaggcgatgcgggcatgtcctcagccgatcgtggccgcggtcgagggcatctgtgccggggccggggccattatcgccatggcatccgacatgcgccttgcggcgagcggcgccaaggtggcattcctgttcaacaaggtgggcctcgccggctgcgacatgggcgcctgcgcaatcctgccgcggatcatcgggcagtcccgcgcctccgagctgctctacacaggccggttcatgaccgcggacgagggcgagcgctggggcttcttcagccgcatcgtcacgccggagcaggtgttgtcccaggcgcaagttctggcgaaacagattgcggaggggccgaccttcgccaacaccatgaccaagcgaatgctggcgatggaatgggcgatgtcggtggaggaggcgatcgaagcggaggcggttgcccaagcgctgtgcatgaccacggcggatttcgagcgcgccttcgaggctttcgccaacaaggtcaagccggtcttcaggggcgattagtctggtcgcccttatggcggcgcaccaacaacggggacttgcgcgaaattattttaggcttaaaatagtttcatggccgggtgaattggcgaggctcccatgaaagtcgcgatcatcggtggcggacctgcgggtctctatgctgcaatcctgctcaagaagcagcgcccgagcgccgacatcacggtctacgaacgcaaccggcccgacgacaccttcggtttcggcgtagtgttctcggacgcgacactcgacaatttcgagaagcacgatctcccgagctatcgccgtattactcaggaattcgcctattgggacgatatcgccgtgcatttccgcggcacggtgcatcgcgtcggcggcaacggcttctgcggctgctcgcggcagaagttgctcctgatcctccaggaacgagcacgcgagctgggcgtcgcgctgcatttcgaagtggacatcgacgacgagacccgattcgccgacgccgatctcatcctgctcgcggacggcatcaacagccgcttccgcgagaaatatatcgagcatttccagcccgaggtcgacgtccgtgccaacaagttcgcttggatgggctctaccagaccgcttgatgctttcaccttcatcttccaggagacagagtgggggccgttcatcgcccatgcctatcagtatgaggccgggcactcgacctggatcttcgagaccgatcctgaaacgttcgagcgcgcggggctgacgggcctcgacgaggctcagtccgccgcgcggatggcggatatcttcggctggttcctgggtgggcacaagctgctgaccaaccgctcgatgtggcgcaacttcccgatgatccgcagcaagcgctgggtcaaggacaacatggtcctgctcggtgacgccaaggccagcgcgcatttttcgattggatctggcaccaagctcgcgatggaagacgcgattgcgctggccgaagccatggagaaggcgcccagcatcgaggcggcgctggaggtctacgagcacggccgccgcgaggaggtcgaaaagacgcagcatgccgccgacgtctccctggtctggttcgagcatgtcgaccgcttctgggattttgacccggtgcagttcgccttcggcgtcatgacgcgctcgaaggcgatcacctatgacaatctcaagctccgcgcgccggatttcgtggccgaggtcgacaagtcgtttgccagacaggtccggagcagcggcttcgatgtcgacaccgagcggcccttggtgccgctgttccagccattccgtttgcgcgagatgaagctcgccaatcgcgcggttatgtcgccgatgtgcatgtattcggccaaggagggggtgccgacggatttccacctcgtgcactacggctcgcgcgcgattggcggcgccgggctgatcttcaccgagatgacttgtgtcagccgcgacgcccggatcacgcccggctgcgccggtctctggaacgacgagcaggaagccgcatggcgacgcatcgtggacttcgtccacgacaactcggccgcaaagatctgcctgcaactggggcacgccggccgcaagggcgcaaccaaattgatgtgggacggcatggaccggccgctcgagcagggcggctgggacattttctcggcatcgccgttgccctatttccccgatagccaggtgccgcgcgagctcgatcgcgccggcatggacgcggtgagggatactttcgttgcggcggccgagcgcggcgagcgctgcggcttcgacatgttggagctacactgtgcccatggctatctgctcgcgagcttcatctcgccgctgaccaatacccgcacggaccagtatggcggttcgctcgaaaaccgtctgcggttcccgctcgaggggttcgaagcgctgcgcgcggcatggccctcgcacaagccgatgtctgtgcgcatctctgcaaccgactgggtcgacggcggcatcaccggcgatgatgccgtcaccatcgcgcgcgcctttgccgaggccggggtcgatctcatcgacgtttcgaccggccagaccgtgcgtgacgcgcagccgatctacgggcgcatgttccagacaccgttctcggatcaggtccgcaacgaggcgcgcgtcgccaccatgtgcgtcggcaacatcaccacggcggaccaggccaacacgatcctggccgcgggccggtcggatctcgttgcgctgggccgtccgcatctcgtcgaccccttcttcaccatgaaggcggcggcctggtacggggcaaacgacgccttctgtcctccgcaatatctgcccggaaaagaccagattttccgcaacagcgtccgcgaccggcaggacctcgaagagctgaggattaaggctaagcccaagacccgggccgagctcaaggccgaggcgacaaagccgcttgcggcggagtgaccgcccgtgcgacgttaacccgttgcctgtgtttcgagtggagttagggcgatgaaggcgattatcgtcggcggcggtatcggtggtctcaccacggcattgatgttccgctcgcgcggccttgactgcgagatctacgagcaggccgacaccattcgcgagctcggggtcggcatcaacacgctgccgcatgccatgcgcgagctcgccggccttggcctgctccagaagctcgacgatgtcgcgatccgcaccgatcagctttattacctcaatcgccacggccaggaggtctggcgcgaagctcgcggcatcgaggccggccacgacgtgccgcaattctcgatccatcgcggccgccttcagggcgtgatccatcgcgcggtcgaggagcggctcgggcgagaggcgattcacaccggttgccggctcggtgcgttcacgcaggacgagggcggcgtcaccgcttactttttcgatcgcgccggcgcccatgtccacaccgcgcgcggcgatatcctgatcggcgccgacggcatccactcacgcgtccgagagacactgtttccgaacgagggcccgccgtgctggaacggcctcatgctgtggcgcggtgcccgggactggccgctgtttctgaccggcaagtccatgatcgtggccggcggtctcaatgccaaggtggtgatctacccgatcgcggaaggatcgagcccggcaagccgcctcaccaattgggcggtgctggtcaaggtgggtgagggcaacgtgcccccgccccggaaagaagattggtcgcggccgggccgccgcgaggaactgatgccgcacgtcgcccgcttctcggttccctatatcgacgtgaagagcctgatctcggcgacgcccgagttctacgaatatccaacctgcgatcgcgatcccttgccctattggtcatcggggcgcgtcacgttgctcggcgatgccgctcatcccatgtatccggtcggctccaacggcgcctcccaggccatcctcgacgcgcgctgccttgcggatgcgctggtgcgtgccgaacatccgcgccaggccttgctcgaatacgagaagaagcgcctgccgatgacggccgagatcgtccgctccaaccggcgcggcgggcctgaaggcgtcatcgacgccgtcgagcagctcgcgcccgacggcttcgacaacgtcgacaacgtcctgagctattcccagcgcgaggccatcgtgcgcggctatgccaccaaggccggcttcgccgccgtgccgggacttgctgcggtgcgcgcctgacgcgtgccgctagccgcccggaggcggcggcaggaagtggatgttgaactcggcggccagcgcaacgacgtcctcgggcttctgctccttcatgttgtgaaggccccagaacaggtcgaacaacttgcggctcggggagacccagaacagcacctttgcggtctgctccgacttgttgaagatgccgtgaggcacgcccatgccgaggcggatcaggtcgccggcgctggcctgcgactcagaatcgccgagcatgaaatcgagcttgccctccagcatgtagagatactcatcctgatcgggatgaatgtgcggcggcacgaacgtgcctggcggcagtgtcgcatgccaggagaagctgtgttcggcgtagctcttcggcacataggtctggccgaggatgttccaggagatgccctggatgccctcattggcccgcgtgatgccggtgatttcgctcttcattgcagtcctcccttaacgcgacgctcggcttaattcgtcgccttgcaatccttggcatagcggtcgccgtaattctcgaagaccttctgcacgatctcggtctggaatttgccgtcgggacgcttggcgaccttggtcaggtagaaatcctggatcggatagccgttggtgttgaacttgaacgcgccgcgcagcgaggtgaagtcggctttcttgatcgctgcccggacggcgtccttgttcgacagatcgcccttcaccgccctgacggcactgtcgatcagcatcgcggtgtcataggcctggaaagcgtaggttccaggcacgctgttgtaggcggcctcataggcggcgacgaacttcttgttctggggattgtcgagattgggggcccagttcgcgccgccgaacatgccgacggctgcatcctgctgcgcgggcagcgtcgattcatccacggtgaaggccgagagaaccggaatgctgtcggcgagccctgcctgccgatactgcttgacgaggttgacgccgaggccgcccggcatgaacgtgaacagcgcatccggcttctgcgaggagatcttggagagttccggctggaaatccagcgtgttgagcggcatgtaggactcttcgacgatctcgcccttgtagtcgagcttgaagccggccaccgaatccttgccggcctgatagttcggcaccatcaggtacatgcgcttgtagccgcgatcctgcgcgaccttgccgaggatctcgtgaacctgatcgttctgataggacgtcacatagaagaacgggttgcagtccttgccggcaaaggtcgacgggccggcgttggggctgatcaggaacgtcttcgattccgtaatgggccggtgaatcgcctgcagaatgttggagaagatcggtccgaccacgaagtcgaccttctcgcgctcgaggagacccttgaccttggtgaccgccgcatccggcttgagttcatcatcgaccacgacgacctcgacatcgcggcctcccatcttgttgccgagatctttgactgcgagcgcgaacccgtcccgtacctgttggccgagcgcagccgctggcccggacagggtcacgatcacgcccagcttgatcttctcctgggcgagggcaggggtcatcgcggtgccaagcagcagggtggctgcggccaacgtcattttcatcttcatgatctgtccctcgtgactatcggcaagcgctgcgagccgcatactcaatccaagcttatgctgacgatggctgccgcggcaagcaagctcaaggcatcgtcatctcggcaggcggtgtgcatgcaagcagcgcgccaatcatttgaagcctaaaggaactggcgtgcggtcgattgttgcagctttggacttgcggccggcgccgatttacttgaagctcaaaacgttggggaatccgtgccgacgccaatgttggccgtgagtgactgcatcaacatgctcgattccgagaccaaggccgtcgaaacaccggaggaccacgccgaagaacttcggctgtggttgcggctcttgacctgcacgacgctgatcgagggcgaggtgcgcggccggctgcggcagcggttcgacgtcacgctgccccgtttcgacctgatggcgcagctcgacaaggcgcccgacggtatgacgctgtccgatgtctccaagcgcatgatggtgtcgaacggcaacgtgaccggcctggtggaacggctggtcgaatccggccatctcgaccggcggacgtcggagaccgaccgccgcgtccaggtgatccgcctcacaaagctcgggcgctccgagttccgccggatggctgcagagcacgagacctggatcgccgatctcttcgccgatctcacgccgaaggatgtgcgcgaattgatgcggctcttggccaagaccaaggcgtcggcgcagaaatcggccgcgcggcgccggccgtaggcgcaagccggcaggcgcgcccagtcccttctgccgcaggaaaaagcacggcatgcccaaaatccgctattgcgccgaattgttttaagcctaaaatgtttccagatcgtgctgccgggtgcaatccatgctgaaaggagcgtgcgatggccaacgccgccaaggttcaagtgacgggctcgcatgacggcaacgccgcgtcggcccatgtcgatacgttcgcgcggcagcacctgccgccccgcgaactgtggcccgagttcatcttcacacggccggaactgcgctatcccccgcgactgaactgcgtcagctatttcctcgatcgctgggtcgagcagggccatggcgacgcgccttgcgtcatcagccccgccgtcagctacacctatcgcgagttgcaggcgctggtgaatcgcatcgccaacgtgctggtcggcaagctgggcctcgtcaccggcgagcgcgtcctgctgcgctcggccaacagtcccatgatggttgcgacgtatctggcggtgatcaaggccggcgggatctgcgtggcgaccatgccgctcttacgcgccaaggagctgtcctatccgatccagaaggcggagatcacgctggcgctgtgcgatggaaagctcgccgacgagatggagaaggcgaaagcgacggcgcccgatctcaagcgggtcgtttattgggggaacggcgcggcagactcgctcgaggcgctgatcgcggatgccggcgccgagttcgcggccgtcgataccgcatccgacgatatctgcctgatcgctttcacctcgggcacgaccggtgatcccaaggggaccatgcatttccatcgcgacatgctcgcggtctgcgacggctatgcgcgcaacatactgcgtgcggagcagagcgatcgcttcatcggctcggcgccgctcgcgttcaccttcggcttcggcggcgtgctgtttccgatgcatatcggcgcctcctttgtcgtgctggaaaagacgacgccggacgacattctgaacgcgatcgagcagtacaagacgacggtctgctttacggcgccgactgcataccgggcgatgctgggtaagctttcgggccgcgatatctcttcgcttcgcaaatgcgtctccgcgggcgagaccctgcccaagccgacgttcgatgcgtggctcaaggcgaccgggatcaagctgatggacggcatcggctcgaccgagatgctgcacatcttcatcagcgcgaccgaggacgagattcgtccgggcgcaaccggaaagcccgtgccggggtatgaagccaagatcgtcgacgatgagggccgcgacgttccgcccgggacgatgggccgtcttgccgtgcgcgggccgaccggctgccgctatctggcagacgagcggcagcggaagtacgtccagaatggctggaacatcaccggcgatacctacctgatggatagcgacggctatttctggtatcagtcgcgctccgacgacatgatcgtgtcggccggctacaacatcgcgggcacggatgtcgaggcggcgctgctgacgcatccggcggttgccgagtgcggcgtggtcggcgccccggacgaggcacgcggcatgatcgtgaaggcctatgtcatcgccgcgcccggcgtgacgcccgatgctcagctcacggccgagttgcaggagcatgtcaaacgcgagatcgcaccatacaaatatccgcgcgcgatcgagttcgtgacgcaattgccgaagaccgagaccggcaagctgaaacgctttgccctgcgccagttggcgcaagccgcggcgacgtcctcgggcgttgcggcggaatgagagaaggatagagaattgtccgtgacgacgccgaaaggcccgcaactcgcggtgctgccgacagcagccgaggacggaacgcgcaaagcgcaaatcctccagccgtcaggctggccgatgccgaaaggctatgccaacggcatggctgccgaagggcgtatcgtcgtcaccggcggggtgatcggctgggatgcccaagagcgtctcgccgacggcttcgtcgcgcaggtgcgccaaaccctggacaacatctccgcgatcctggccgaggctggtgcccggcccgagcacctcgtacgtctgacctggtacgtcgtcgacatggacgagtacctcgccaatctgaaggagctgggcaggatctaccgcgacgtcttcggcgcgcactatcctgcgatggctctggttcaggtcggccgtctcgtggagaaggcggcgcgcgtcgaaatcgaggccaccgccgtcatccctcgctgagctcctctgcgattggcttgccttgatcagctcgccttggcgagctcgtcgtcctcgggcgagttgaaatagacgccggatatggtgtcgacccagcacagatgatcgtgcaccttcttcacgccctcgacgttctccgcggcgacgatcgcggcctgccgtgcagcctcttcggtgatgacgccgctgaggtgaacgatgccgtcgcacacgatgacgttcagcccgaacgggcaccagtcgctcttctcgatggtgtcgatgatgcggctgcggatgtgatcatcgtccgcggtcggatcgggcacctcgcgggcgagccccgccaccgcctgcagcagattggctcgggatacgatcccgacgactttgtcgccgcgcacgaccggcagtcgcttgatgttgttccgctccatgagctcgacgatctctgcgagcgcggtatcctccgtgatggttaccggcgagtcggtcatcacttccgagactttgcggccgtgctcgtgaacgaactcgctggcggacttgcccggaccaaggatgaaccgcagccaacgcccgcgcttgcgcccggtgccgatttcgctgcggcggatgaagtctccttccgagaccacaccgaccaggttgcccgtctcgtcgaccaccgtgagaccgctgacatgccgcttcagcatgatgtttgccgcttcgacgatgctggtgtcgggggttaccgagatgaccgaccgggtcatgatctggtgggcgcgcatggacaactccgcttggcttgttgaattcgatgcgcgaaaactagctcgggtatcaaggtgcggtttgactcaggtcaagtgacgacacgctcaatgccaattcggcagctgtgacgatccgcacccggatttgatgcagctcaagacgtattcgaggtcgcgccttatcctgctgccgacgtcgaaccgaagcccgcaggaactagagctatgagcgtcgtccagatatttccacgggccgaagagcaagtcacgcaggttgctcccacccatccccttgctcgttctgaagcctcgacggtgagcctcgaacggcacgagcgtatgccagtctccgccgatcctccgcctggatctgagccgtatccttttgaccgtgcctttcacgcgatgctggcgcggttcacgggcgggatttcgccgctggctttgtcgctcgcctggctcgattggagttcgcatctcgccgcggcgccccagcgccagatggaaatttatcgtaacatcgttcgcgacaccggccggctcgtggatgctgctgcacacgcgatgtcgcccgagcaaaagccgtgggctgtgatcgcgccgcagcagcgggatcgccgcttcagcggaccgcaatgggagaccccgtcgttcaatctgctggcgcaggcatttctgctcgcagagcgctggtggcgcgatgccgcgacgggcgtgcgcggcgtgtcgcacgcaaacgaggccatcgtcgagttctcgatgcgccagatgcttgacatgctggcgccgtcgaatttcgcggcgaccaatccgaaagtgctggagaaggcattccagagtggcggggagaatttcgtctttggctggcagaattggtgcagcgacctgttgcgcctgctctccggctcgaagttgaccgacgacggaaagtttgtcgtcggcaagacggtggcggtttcgcctggcaaggtcgtctaccgcaacgatttgattgagctgattcagtaccagccaaccaccgcgcaggtgcgacccgaacccatcctgatcgtgccggcctggatcatgaagtactacattctcgacctgtcgccacagaactcgctggtcaaatatctgacaggccaaggattcaccgtgttcgcgatctcttggcgcaacccggatgccagggatcgggacctcgccttcgacgattatcgcaagctgggcgtcatggccgcgctggacgtgatcggcctgatcatgccgggtcggaagactcatgcgctgggctattgcctgggaggtactttgctgtcgatcgccgccgccgcgatggagcgtgacgccgacaaccgcctcggcaccatcactctccttgccgcccagaccgacttcactgaggccggcgagctgacgctcttcatcagcgagagccaggtagcctttctcgaggacatgatgtggcagcgcggctatctcgatacgacgcagatggccggcgccttccagctgctgcgctccaacgaactgatctggtcgcggctgtcacatgattatctgatgggcgagagcgcgccgccgagcgatctgatggcctggaacgccgacgccacgcggctgccttatcgcatgcactccgagtatttgcgcaagctgtttctcgacaatgatctggcgggcggacgctatctcgtcgaaggcaggagtgtttcgctctccgacattcacgcaccgatgttcgtggtcggcacggttgccgatcacgtggcgccatggcgatctgtctacaagatccactatcaggtcgatgctgacgtgacgttcttgttgaccagcggcggccacaacgccggtatcgtcgcgcctccggaggaccccgaccacttctatcaggtgctgaccaaggctgccgacgcgccctatgtcggtgcggatgagtggctcaagctggcgccgcgagttgaagggtcatggtggccggaatggaccagatggctggcggcacgctcaggcccgccctgcgacccgccgccgatcgggcttggtgacgcgcccgacctgccggatgctccgggagattacgtccacacctaaacctccggctccgagcttggcgcgagatccgaggagcggaagggcgtggcctcgtcgagttgccggtaggcgacagacgccgcccgcaacagcttcttttcccgcttgcggttgtggaagcgctggcctgcattggggccggcgccatgcaacgatgctgccagagcttgtccgcgtgcatcgtcgttcagctgccccagcgaccgctgcgccttgcgcaattgcttgagaatggatttctgcttcgtcgctgccccatcggcgaacagatccgcaagcgactcgatcgaataggtcatccgcttgttgaggagccgcagcttgtgacgtttcccgacatcgagcctcttcagctttcgggccttcttgagcagcgtcgtttcccactccgccagccgctctgtcgcgtggtcggcgagcgtgcggcggcgcaatcgaatggcttccttgcttcggcgggtcgcccagggcccgctatcgatccaggtcgagacctgctcgaccagacggcggtaccgcgcgtattgcagcgcgcgcgccagcagccggtggctctcggcccgtttttcgttccagtgctgaagctcggcgaccaccgcgagttcgtcgccactctcagcgacgacccgctcgattgcgacgtcgaggtcccgcaccatgccgagctgaccgttcagccatttcagttcggcccagacattcggccgctgggtatcgtcaaccatcggcgagaagaagcggatggcagtccgcagatgggtcagtgcgatgcggatctggtgcagcgcgtcaggatcgccgcggcaggtgccgtcgtgctgggcgagcacggcgtcgaggtgacgacgggcgatgatccggaaggcggtatcgcaggccatgccggggctgaggcgagcgggcagggccttgcgccgcgccgacggcttggcctgcgtggtcgccgtcgcctttgtggtgggtcgcaacatccttgcccgcatcaatcagattgcctcgttgctcacagcgatcgcgtggcggcagttatggagcgtttgttcttgcgttcccgatgcatctatcgtcgcccagccgagatggccgatattatagtgctcttgcagcgcggcaacctcttgggtggcgtccgatgcgtctcctcgtcggctgccgatgcgtgcctgccgggtcgcgaggtctgcgaccaggaatagaccgttcagcggcacgttgcactcgcgtgccagcgcggcgatcgcgtcacgttcgtcctcgccggcgaatacgccgtcgatgatcgccgaatggccctgggtcagcacctgccgggcgcgtcgagccagcgtgtcgtagacgcgggtcgtgatctccgccgtataggcagatgatggcaggcggtgggtgtcctcgactccgaacatctgcttgcgcacgagatcgctgcgcagcaccacggcgcccggctccggcgggatgaccggcgcgagcgcgtgcgccaaaaccgtctttccggtgccggatagtcctccaaccgcgatcaggcgcggaccgggaggacggatcagcttcccggcgagatctaggtatttttgcgcctcgtcgagaatgccgcgacggtcggaatgcggccggttgagccgagccagcgtaacctgggcgcggatcgccgcccggacggacatgaacagcggcagggccgaaagcgcttcgagattgtcggccggcgtcgtggcgagatagcgattcaggacgatgttggccgcgccgggttgggcgtgctgcaacaggtccatcagcgtgaacgcaaggtcgtagagcacgtctacggtcgcgatctgcgcatcgaactcgatggcgtcgaaaagcacgggccgatcatcgatcagaacgatgtttgcgagatgcagatcgccgtgacaacggcgcacgaagccgcggcggccacgttcggcgagcagggggcgaatacgcagaaatgcctcatgcgaggtctcgccgagctcttggatctcttcggtgttgaaatggcctccggcccgcagaccgtcgctgttgccgtcgatcagcgcagggatggcggagagccatgcttgtccgtccacgggtgtcgccgccgcatgcgaagccacgatcgcgtccgcggcagccgaggcgagtttcgcgtccagcggcccggcctttgccagatgatccagcgtcctgctttcgtcgaaacgcgacatgtcgaccgcatactcgatcggccggcctggaccgccgacctgcaaagacccatccgggtcttccgtgatcgcaacgacgccctgatagatctgcggcgccagcggccggttgatcctgatctcctcctcgcaggccgccttgcgcttctcgagtgtcgaatagtcgagaaacggaaaccgaacggcacgcttgatcttcagcgcgcgctttccatccaggaacacggaagctccatgcgtgtcgatccgcgtcacgccgggatggtcggtcagcatctgaaagatgcgctcctgggccgccgtttcatccttcatcgacacggacatccggagcaccatcagggcgtcagcacggcggcgccgagaatctggccgttccgcagcatgctcagaacctcgttggcctggtctagcggaaattccgtcgtctcggtgcgtacgcccgcttgcggagcgaccttcagaaaatcgaggccgtcctgccgggtcagattggcgacggagacgagctgccgctcttgccagagcaagtcatacggaaagcttggaatatcggtcatatgaatgccggcgcatacgacgcgaccgcccttgcggacggcacgcaaggcggcgggtacaagctcgccggctggtgcgtagatgatcgcggcgtcgagcggctcgtcgggcacctcgtcagatgcccccgcccagaccgcgccgagacgacgtgcaaggtcttgtgcggcgacgtcgccgcgccgggtgaaggcatggacggctcgtccttgccaaaccgcgacttgcgcaatgatgtggccggccgcgccaaagccatagatgccgagccgctcggcagggccggccaggaccagcgagcgccagccgatcagccctgcgcagagcagaggcgcaatctccacgtcgccggcggtctcgccgagcggaaatgcgtagcgtgcgtcggcgatggtatgcgtcgcgtagccgccatcgcgcgtgtagccggtgaacaacggtgcgtcacacaggttttccatgccgtgccggcagaagcgacactttccgcaggtgaagccgagccatggaatgccgacccgatcgcccagcgcatgtgtggaaacattcaggcctacatggtcgacccggccgacgatttcgtggccgggcacgatcggatagcggatgtcgggcagctcggcatcgacgagatgaagatcggtgcggcacacgccgcaggcgctgatcttcacgcggacttgaccctcaccgggcagcgggtcgggccgctcctccatctggagccgcgctcgtggggcgggcaacaccatggcatgcatgagtctctccggggcgaaccgctccgattgaattattcatagaatgaccgagtgaccagtccttgacgtcagtcaacgcccgtcccgggtgaccagaaccgagttccatggcttgacgaggatcaagtatctcgacgaagcgctggcctattttggaagccaaggagctttccaattcccgccgggctcgtcttcgaacttccatgtcgtcgacaatgtgacaaaggccgtcattggccagccaccgtgctggattatgatctcgcaccaggctccttgtttcggccgcatcgcaatcatcggaaccgccgctgacccggcgcatttgctttcatgtcagtctatcgcctgaaaaacctgctatcgccgcgctcggtcgcgctcgtcggggcgagcgcccgtccagcctcggtgggacgtgccgtcctggagaatattcacaaggccgaattcaagggacagtttggcctcgtcaatccgcgccatgccgagatcggcggcatcgcggcggtgaagagccttgaacgcctggatttcgtgcccgaactcgtggtcatcaccgccccggcgggagagattccgggtattgtcgaacaagccggccgtcgcgggtctgcgggcgcgctgatcgtgtcggccgggctcggtcagggaccgggatcgctgcacgaggctgcgagcgttgctgcccgcaaacacggcatgcggctgatcgggccgaactgcctcggcatcatgatgcccggcgtcagcctgaatgccagttttgccgcacatatgccgggggcaggcagcctcgcactggtctcgcaatcgggcgcaattgccgccggcatggtcgattgggccgcgcagcgcggcgtcggcttctccggcatcgtctcgatcggcgaccagatcgacgtcgatatcgccgatctgctcgactatttcgcgatggatcacaagactcgcgcgatcctgctctacatcgaggctatcaaagacgcgcggaagttcatgtcggctgcgcgcgccgccgcgcgcgtgaaacccgtcgtcgtggtgaaatccggccgcatggcgcagggcgcgaaggcggctgccacgcataccggcgcgctcgccggtgccgacgccgtctacgacgcggctttccgccgcgcgggtgtcctgcgagtttccgatctgcgtgagctgttcgattgtgccgagacgcttgggcgcgtcgagtccccgacggggaagcgtcttgccatcctgaccaatggcggcggcatcggcgtcctcgcgatcgatcgattggtcgagctcgatggaattccggcaaccatttcggcagaggcgcgcaggaagctggatgcggcgctgccgccgacctggtccggcgcaaatcccgtcgacatcgtgggcgatgctgacgcctcgcgctacgcggccgcgctggaggtactgctcggcgatcccgacaacgacgccgtcctcgttctcaatgtgcaaacggcgatcgcctcggccgccgagatcgccacgaccgtgacggagctcgtcggcaaatatcgccagcagcaccgcagctgggcgaagcctgtattggcggcctgggttggagccgatcagcatatcattcagacgctgtcagatgccggggtgccgaactatccgaccgaggacgacgccgtgcgcggcttcatgcatctggtccggcaccgcgaagtggtggaggaactgagccaggttcctcctgcgatgcccgatacgttcgttccggacgcccaaggcgcgcgggagatcgtcaccgctgcgattgcggacggtcgcgaatggctcgagcctgtcgaaatcaagcacctgctcgaagcctacgatatcgccatggtgccgacctacgcggcaaccgatgtcgagcaggcggtggcctatgcggaggatatcttcgcacagggcggcaccgtcgtgctgaagatcatgtcgcgggacatcatccacaaatccgatgtcggcggcgtcgtgctcaacctgaccacgcccgaggccgtccgaggggccgctaccgacattctcgcgcgggcgaagaagctgcgtcccgaggcccgcatcggcggcgtcatcgtccaggcgatggtcgtcaaggcaaaagcgcgggagctgatcctgggtctcgccgacgatccgaccttcggcacggtggtcgttttcggccggggcggcacggcggtggagatcatcaacgataaggctcttgcactgccgccgctcgatctgcaattggcccgtgacctgatcgaacgcacgcgcgtgtcgcggctgctcaaggcctatcgtgatgtgccggcggtcaagccggacgcagtcgccttggtactcgtcaagctcgcgcagatggctgccgatattccggagatccgcgaattcgacatcaacccgctgctggcggacgagacgggcgtgaccgcggtcgatgcccgcgtcgcggtcgggccaccgcagcggaagtttgtcggctccggtccggccaatttcgccgttcgcgcctatccctcgcagtgggagcgccgcctcaagctcaaggacgactggcgaatcttcgtgcggcccatgcgccccgaggacgagccgacgatccacgagttcctgcgtcatgtgacgccgcacgatctgcgcctgcgtttcttcgcaccgatgaaggagttcacccacgagttcatcgcgcgcctgacccagctcgactatgcgcgtgcgatggccttcatcgcattcgacgaggccaccggcgaaatggtcggtgcggtccggctccattcggattcgatctacgagagtggcgagtacgcgatcctgttgcggtccgacctcaagggcagggggctcggctgggcgctcatgcagctgatcatcgactacgcgcgctcggaaggcctgaaagccatttcgggcgacgtgctccaggagaataccgtcatgctcgagatgtgccggcagctcggcttcgaggtcaagccggatccgacagagcccgacatttgcgacgtcaagctgaagctctgagcgcgcgctggaccgtgtcggggtcccacggcctgcgtgaggtaagtgtgcgacgacgattcatccgatctcatcgcgcttctggagcgcggtgactccggatatcaccgcgccccagccgatggcgcgtcggcagacgccttggtcgtcgtccgcaaattcttgatgatggtcgcgatcagcggcatcagcagcggcgcgaccgtgctgagcggatgatgcattgcgcccgacacttgagcctggagcgcgcgggcttcgagctgtagggcctcgatggaggtgtcgtgaatctcgttggcgagttcgatgtcacgacccgacggggcacggccggcgatcacgaagagcactgccgcgatggcgaaattgacggcgccgaggatcgcggccgcggcaattgcgctccagatctgcaccagcgcgaaataggcagacagctccagcatcaggagcccgaaggctgcgatcagcgccgcgaaggcgcgcaggccgaggccgacaagcaaatgacgcagcctgatgtccgcgatgatcctgtcggtgcgccacagcacgcgcagatgtctgacgacgttctccgtattcacctaatgtctcctcagcatgaagccgacgaccacgcccagcgcgaaggcggaggcgagcgacgtgattggacgctgcgcaacgaggccctggagctgttcatgctcctgctcgacggtctcgccgagttcggtgagcgcagccttgatctgatcggcgagtgcctcggcacgctctttcgaactctcgaacatctcctcgccggcggaactcagcaagcgcgtgacgtcgagcttcagagcccgcaattcttcgcccatcctgtcactgtcgaacatggatttggtatcctcactgatttgaagtaagcctaggacccattggcgcggtcccgcttgatttgcgtcaagcggcagggcctgttcgggcttgagacaggtcaagccggccgccacatgccggcctagaaatgccggctgaatggagaccgattgtcccgttgaggtggaagcgtgaaccacgaaccgatgttgctcgcagcgccgtccggcgatgtgctgaacttgcgacccgaggggccctggactgccgcaaatgtggtgacgctcgagaccttgtcccggtcggtcggagccgatgtcgatcgctcgcgcgttgtaacactggacatgtcgggcgtcagtgcgctcgacacgctcggcgcctgggttctggagaagctgtcgcgcagggcgacatcttcaggcagatcggccgaattcgtcggcgtcgccgaccatttcagcgggctgatggacgaggtccggcaggtcaaccgccatacgccggccccgacggctgcgcccaatccggttctggcgaggctgggcgatctcggcaagtcgacggtcggcgcgcgggaagacatcacgatcttcctccagatgctcggtgccttgttcatggccatcataggcgtgctgcgccggccgcgttctctgcggctgacgtcgctcgtctatcagctctaccgcatcggatggcaggcgatcccgatcgtcgcgctgatcaccttcctgatcggcgccatcatcgcgcaacagggtttcttccacttccgcagattcggcgccgagtcctacaccgtcgacatggtcgggatcctggtgctgcgcgagctcggcgtgctgatcgtcgccatcatggtcgcggggcgctcgggaagcgcctacaccgccgagctcggctcgatgaagatgcgtgaggagatcgacgcgctctcgaccatggggctcgatcccgtcgacgtcctgatcctgccgcgcgttgcagccctggtcatcgcgctcccgatcctcaccttcatcggatcgatcgccgcgctctacggcggcggccttgtcgcccagttctacggcgacatgggaccggctatctatatcgcccggctgcacgaggccatttcggtcacccacttcaaggtgggcatcctgaaggcaccgttcatggcgctggtgatcgggatcgtcgcctgcagcgaggggttgcgcgtcaagggcagcgctgagtcgctggggcggcagaccacgacttcggtcgtgaagtcgatcttcctggtgatcgtgctggacggcctgttcgccgtgttctttgcctcgatcggaatgtgacgatggacgcggcgcaagacgagttcgcgatccgcgtccgtgacctcgtggtcggcttcggtcgccagaccgtgctcgaccgtctgtcgctcgacgtccgccggggcgagattctcggcctggtgggggcatccggcggcggcaagtcggtcttgatgcgaaccatcatcggtctcatcccgcgccggagcgggaccatcgaggtcatggggcagcccgccggcggccatggtcgagctgcagccacggcatggggcatcctgttccagcagggcgcgctgttctcctcgctgacgnnnnnnnnnncgccagaatgtccagtttccgctccgtgaaaatctcgtcctgtcgcaggagctgatggacgagatcgcgatcgccaagctcgaaatggtcggcctgcgccccgaggacgccgacaagtatccggcggagctctcgggcggcatgaccaagcgcgtggcgctggcgcgcgcgctcgcgctcgatcctccgatcctgttcctggacgagccgacctccggcctcgatccgatcgccgccggcgatttcgacgcgctgatcaagacactgcaaaggaccctggggctcacggttttcatggtgacccacgaccttgcgagcctgaccacggtctgcgaccgcgttgccgcgctcgcggatggcaagatcgtggcgatcggtccgatgcgcgaactgctgcaatccgagcatccctgggtgcgcgcctatttccacggcaagcgctcgcagatgctgcaacacgagatgagatgagagatggaaacccgcgctccctatgtgctgatcggtagtttcgtgctggccgcgatcctcgcggtgttcggcttcgtctattggctgaacaacaccggtggcatcggcccgcgtacgaattatcacgtgcagttccagggaccggtgccgggcctgctggtcggcgcaggcgtgctgttcaacggcattcgcgttggagaggtgacccagctcgggctcgcgccggacaacccgcgcttcgtcaatgcgacgatcgcggtcgccactgccacgccggtccgtgccgacaccaaggttggactcgaattccagggcctgaccggcgttccggtcgtgacgttggagggcggcgtgatcgtcgccaaatccggcgagcctctgaccttgatcgcggacgccggtgccggccagagcatgacacaggcggcgcgcgacgcgctgcggcgcgtcgacacggtcctccaagacaattccggcccgctgaaggacactatcgcgaatttcaagacgttctctgaggggctcgcgcgcaacaccggcaagatcgacggcattctggcggggctcgagaagatgaccggcggcggcgcgcccgcgcagaagatcacctacgacctgcgtacgccgcagaacatcgggcctgccgacaagacgctgtccgcgtcgctggcgatccccgagccgaccgcggttgcgatgctgcagacccagcgcatgctgttcgcccctagcggggacaggccggactttgccgatttcctctgggccgacagcattccgaaattggtgcaggcccgcctgatcgacagcttcgagaactacgacatcgcccacgccccgctccgcacgagcgacctcggacaggcggactaccagctcctgatcgacatcaggcgctttcggatcgctacggagggtgatgcacgggtcgagatcgccctgtcggcgcggatcgtcgacaagggcggcaaggtggtggcctcgcgcctcgtcgaggccagcgaaaagctcgacaaggtcgaaccggccgcttcagtcgcggccttcgatgcagccttcgcgcgcgtcgtgaaggagctgatcgggtggaccgtgcaggcggtgtgaggccggctattccagcgtcttcaggtaggacagcaggtcgtggatctggcccgggctgagctcgaaggcgggcatatcgtcatgcccggtatagattccctccgccagcgcctcaccaaggctgtcgatcggatagcgccggtgcaggctgcgtagcggaggcgcggtcccgagcggactcttggagacgcggtcgatcgcgtgacagcgtgcgcaattggcccgagcaaaggccttgccgcgttgctcggcggtcggggccgccagcgcaggcgtgatcagaagcagcccaatcaggccgtgacgcagtgcgctttgcagcataaggagtgatcccgtcgaactctggaggcagaataagacggggatgccacccaaatttgatctgagtcaatcggcttgggcgcggtgcagtaaaatgcaaaccgcgcggtggactcggcttggtgtcggggggcagctggtgcgaggagcggtggatgaagccttccgtggtcatgattgagccgaacgggcatttttgcgacgattgcgccgtacgcggagcggcggtctgttcgtcgctgaatgcggccgagctcagggaattcgagcatctcggccgccgcgttcatttcggggcaggcgacaccgtgttctccgaagaggacatcactacctcgttctacaacgtcctcgaaggcgtcatgcggctgtacaagctgctgcccgatggccggcggcagatcgtgggttttgccttgcccggcgacttccttgggatgaatctatccggccggcacaatttttcggccgatgcaatcggcgtggtgaccgtgtgccagttcgcaaaggcgctcttcacgcgtttcatcgaggaccggccgcaactgctcaggcggatcaatgagctggccattcgggagctaagccaggctcgcgaccacatggtcctgctcggtcgacgctcggccgatgagaaggttgcaacctttctgctcggctggcgcgagcggcaggtcgcaatcaagggattgtcggacacggtacccctcccgatgagccgtcaggatatagccgactacctcggtctgaccattgaaacggtgagccgcaccttcaccaaactggagcggcagggcgtgatcgagatcattcacggcggcatcagcctgctcgatccggctcgcgtcgaagcaatggcggccgcctgagatcctgtacggcacggcgtcgggcatttgatctcgatcaatgacgcgtgccgcgcaccgccaataatgctccaaacaaatggggggggagcatgatgcctgctgacgcgctactggtgacctttgtcgtcgtctcgatcttcgtcgcattcgccgcagttctggcttgggcagaccggcaaaccagctcaggccggctcgattcgaattccaagagctgaatttccgtcaggattagtccgcctccagcacgctcatggccgacgctcgccggccctcgctgacgcttggtggcatctcagcgcaatcgtggcttgcgcaacctgcaactctgcatcgacgcagacgcatcggcgcatccttcggatgcgaacttcgggctctcgcacggcctttgatgacatttgcctcaaatcgcgcccgttgctttccggttgaaaagcttggcaacgttgactacgcaggaacccagtacctcgtagccttgggagccccgcggcgtgcctcaggacaagaccggcgacccccgacagccggcgggtaacaaactagcggtcctgcgcaagcacccgatcttcgcggatctggagccggaggcgctggatcagctctgccgttacgccaagcacacgacggtcaagcgcggcgcaacgatcgccgccaagggcgatcccggcaacagcctgttcgcggtgatcgcggggacggtgaagatctcgtcgtcgtcgcccgatggtcggaatgccatcctcaacctgatcggtccgggcgaaatctttggcgagatcgcagtgctcgacggcgcgcccaggtcggcggatgcgaccgccaacacaaattgcgagctctacgtcatcgatcgccgggacttccttccgttcgtgaagagccagccggcgctggcgatgaagttcatcgagctgctttgcgcgcgtctgcgctggaccagtcagcaggtcgagcaggtgatcctgcagaatctgccgggccggcttgcgagcgcgctgctcggtctcaccgaagagcgcaagctcgattccggcagtggcacgctctccatcacgcagcaggagatcagcgagatggtggggatgacgcgagagagcatcaacaagcagttgcgcgcctgggccggccgtaactgggttcgcctcgagcacggcgccatcgtcgtgctggatacggatgcgctacgcgcacttgcggagagcggcgtcgacggtacgtgatcccctgacctagttgtcgaggatggcgaccgcgcgggtccagcccgcggacgccctctcgatcttcacaggaaagcaggcgatcgtgaagccggtcgaaggcagctggtcgagattgtgcagcttctcgagatggcaatagccgatgtgccgtcccgccttgtggccctcccagatcaggccggcatctcttttttcggcatacttcttcgcagtgtagacgaacggcgcgtcccagctccagccgtcggtgcccgtcagccgcacgccgcgttggagcagatacatggttgcttcatagcccatgccgcagccggaactgacgtagtcggcttgcccgaactttgcgccggcactggtgttgacgacgacgatctccagcggtgacagtgtgtgcccgatgcgcttcagttcgttctcgacatcctcggcattcaccacgtagccatcgggcagatgccggaagtcgagcttcacgccgggctggaagcaccattcgagcggcacttcgtcgatggtccacgaccgctcgccgcggttcatggtgggatggaagtgccagggcgcgtcgagatgcgtcccgttgtgcgtcgagagtgagacctgctcgacggcccagccctggccatccggaaggtcttccgccttgaggccgtcgaagaactgcagcatgcgcggcaggccctgctgatgatcgatatactggatggtcgggtgattgcctgggggatcggcggtcacgtcgttcgcgagcgccaccgaaatatcgatcagcttgcgcggcatcggcattccctcaacctggttccggcgttccggcatcttgagcgggcttcatcggcagcgtcaagtcacgtcgccttcatggatgcgccggatcgttcgatgcaactcctgcattgatcgatgccgatctgctcgcattctcgctgtggctgccacgcctcttgatgggctacaagggctggcaacatcagggagacgctatcagtgacggactatcgcaagctcttcgatctcaccggcaagaccgcagtcgttctcggcgccgcgtccggcatcggcaagtcatcggccgaggcgctggccgggctgggcgcccgtgtcatctgcgccgatcgcgcgttcgacgcggcggaagcgaccgccgccggcattcgcgacaagggcggctgggcggaggcagcggcgtgcgacgccgcgagcgcgatggacgtcaatgcgctggcgaagaccgtgatgcaaaaattctcgcggctcgacatcgccgtgacgacgcccggactcaacatccgcaagaccatcctcgactataccgaggaggatctcgaccgcgtcctcaatctcaatgtgaagggcacggtctggttcttccaggcctttggcaggataatggtcgagcagaagggcggcagcatcatcgcctgctcctcggtgcgcgcggtcaccattgagcctggcctcggagtctacggttcgaccaaagcggcgatcggtcttctggtgaagggctttgcatccgaagtcgggcacgcaggcgttcgcgtcaacgcggtcgcgccaagcattgccgagaccgcactgaccggcccgttcaagcagcggcctgacatctacaatctctacgccggtcacaccgtcttcaaccgctggagcagtgccgacgaggtcgccgccgcggtggcctatctcgcttcggatgccgcaagctatgtcagcggcagcacgctgttcgtcgacggcggctggaccgcggtcgacggccccccgaccggtcttacccaattgcacaaatagcgcagggcgcagctcgttaggggggagagtgctgcgcgcgaggctgcgcttcaggcagagcgagccgtcttcgcggttgcagcaaaaactcgcggcgcgtccgctttgagcaaatcacagggggcttgccggataaatgcgctcggctggccggtattttagtgttacgaactggggcatgaaccagcacgccaagatcgaaatccgccattcgacctgtccgcatgattgcccctcggcctgcgccctcgatgtcgaggtaatcgaaggtcgcagcattggccgcgtccgaggttcgaaaaagcagacctatacggccggcgttgtctgcgccaaggtcgcacgctacgccgagcgcatccatcaccccgagcgggtcacctttcccatgcgccgcacaggcgcgaagggctccgggcaatttgcgcggatttcctgggacgaggctttggacgagatcgctgctcggttcaatgcggccgagcgcgaattcggcgcggaatcgatctggccttattactacgccggcacgatgggcctcgtgatgcgcgatggcctcaatcgcctcacccatgtgaagaaatactcgcgcttctatcagaccatctgcgccaacgtcgcgcggatcggctttgcgatcggcaccggcaagatcgccggcgtcgatccgcgcgagatggcgatgtccgacctcgtggtgatctggggcaccaatcccgtcaacacccaagtcaacgtgatgacgcacgcctctcgcgcccgcaaggagcgaggcgcgaagatcgccgccgtcgacatctacgacaacgagaccatgaagcaggcggacatcaagatcatcctgcgtcccggcaccgacggcgccttcgcctgcggcgtgatgcatgtcctgttccgcgacggctatgccgaccgcgcctacatggacaagtacacggactgtcccgccgagctcgaggcgcatctggagacgcgcacgccggaatgggcgtccgccatctgcggcgtgcctgtttcggagatcgaagcctttgccaaggcggtgggcgagaccaggcgggcgttcttccgctttggctacggcttcacccgctcgcgcaacggcgcgacgcagatgcatgcggcgctttgcattcctgcggtgacgggcgcctggcaatatgaaggcggcggcgccttcttcaacaacttcgcgctttggcatttcaacgaatccatcatcgagggccacgacgcgatcgacaagacgacacgtgcactcgaccagtcgcagatcggacgcatcctcaccggtgatgccgaggccctgcacggcaggggcccggtcaaggccatgctgatccagaataccaatccgatgaccgtggcgccggagcaggcgctggtccgccagggctttgcgcgagaggatctgttcgtcgcggtgcacgagcagttcatgaccgagacggcgcaaatggcggatatcgtgctgccggcgaccatgttcatggagcatgatgatctctattacggcggcggccaccagcacatctcggtcgggccgaagctgatcgatccgcccggcgaatgccgttccaatcatgaggtgttgcaggcgctggcgccgcggcttggcgcaaagcatccgggctttgagatgagcccgcgcgaattgatcgacgccacgctgaagctgagcaatcacggcgacatcgcgggcctcgaagccgacatctggcgcgatctgcagccggatttccgcacctcgcattatctcgacggctttgcccatgccgatgggaagttccatttcaaagccgactgggcacatccgcccttcggccagaccatgggcgactacgacaagatgcccgcgctgccggaccattgggccgtgatcgagcacgccgatcaggcccatccgttccggcttgccaccagcccgtcgcgcagctttctcaacacgacgttcaacgagacgccatcctcccaggcgcgcgagggcagggccagcgtgatgatccatccgctggacgcagcgccgctcgacattgcctatggcgatgcggtgacgctcggcaacagccgtggcgagaccacgctgatttcgacgctgttcgagggcgtacgacgcggcgtgctgatcgccgaatccgttcaccccaacaagaaccacatcggcggccgcggcatcaacatgctgaccggtgcggataccatcgcgccgatcggcggagctgcattccacgacaacaaggtctggctcaggaaggccgtcgtggcctgacgcgcgccgtgcttcgaccgctgcaaattgcgtcgacgcgctaaagcggcagccttgctgcagattgcccttgcacctcgtgcccgagctgccgcaaatggccgcaaacggagccaaggaagcgagcgtgccatgagcgacaccacagccgtcattaccgagaagcgcggccaggcattctggatcaccatcaaccggccggagaagcgcaatgcgctgaacggcgacgtgatcgccggcatcagcaagggctatcgcgacgcgcatgacgacaaggacgtccgcgtgatcgtgctgacgggcgcgggcgacaaggcgttctgcgccggcgccgacctgcagaattcaggcgcggctttcgcgatggattactccaagccgaatgtcgactatgcggatctgctgcggctgtcgcagaacgccaccaagccggcgatcgcgcgggtgggcggcgtctgcatggccggcggcatgggcctcctctgcatgaccgacatggcggtcgcggccgatcacgtcgtcttcggtcttccggaggtcaaggtgggcgtgttcccaatgcaggtgctgagcctgttgcagtcgatcgcgccgccgcggctcgtcaacgaatgggcgctcaccggcgagccgttcgacgccaaggccgcgcaggccgcgggcctcctcaactacgtcgtgcccgcagccgagctcgacgccaaggtcgactggctgatcggtcgcatcgtcgacaagtccccgacggcgatccgtcgcggcaaatatgcgatgcgcgcgattgcctcgatgtcgttcgacgagagcatcgcctacaccgagagccagatcgcgctgcttgcaatgaccgaggacgccaaggaaggtttgaaagccttcagcgagaagcgcaaaccgtcctggtcgggaagataaatgcgaacccttcaacttccgtctcgcctggcgagtgtccggaccgcgtattctgcctattggcgctagctgaatatgggacttgggcgatgaagctgaagtagtctcgggagactcagaagttcggatcgacctccaagggaatccatcggcccgcgggaggttgtctgcaccattgatgcctaaggccagcaagttgcgcgcctcggaagatcaggcgaagtggtcaaaaccagcgtcagtggccacgccgatgctagatggtagtcgatgcgcgcctgatgcgacttgctcaagcagtagaacgcgagagaggcgctcgcgcgccttgacggatatatgaaagaaaaaaagagcgcctccggagagacgctcttttgccaccccattgaggggtcaagacatccgattgcacagaaagcacacgctatcgcactttcaaccgcccccacgcctcacatggcataagggttcctacaatcgagggcttgggtagcacacgagattagctcgaacaacgagacctcaatcccaatggttaacaacgccggaaaatctgggagacacgcgagctgagagaacacttccgatgtgaaaggcgggcgctacgttccaaggctcgagcggtcactgtaaggagctccgatctgatgggcagcgtttcacgattaactgccctatgcggatcatcgacacaggcgaagagcaggcggtggtggcgctaaccaggataactggtgagatcaaatcccggtggagtatcgccagattttgctatgatattactagttgggtagccggtaagcgcttgtcttgatccaagaagcggtcgtcgcacagtaccgggcgggtgcccacgtcagagctgtgcaatgttcaggctgactcgttctgatccggagcgaaatgcccagcccgtattcgcgcctcgcacgccggctgttcacgtgccatcttgggcggcagcatttagcgcggggatttttctgtagcgagcgaattatttggagccgtcatgatcgttgctcgatcctgatttacaatcatgctggcagcttgagggcgatgcccacgccaggcgctagagaggtctaacctgccgcctggcatcgatcgtttgaaagccaattgctgcgtgcatctgtcgagacggacgacacatggtctgcgccggcagctggcccctgctagcgacgttctcgaactggctctttctctgtaattcgggaaggtttcagtgttgctcgatttcgccgagccgtggttgaggaaggggcgacgaggcacgccacggaagcgtgccaagccagcttgcctgggcgccagatgcggattgaaaaccagtaggtcgcgcggggtgtccccgcggtgccgatcgtgccggcataatgcgggtataatgccggcattatacggtgcgatcaaaattcgacctttcgattcaaaagcgtacaatggaatcttgcgcgtgttgaaaactctctcgggaatgctggatggccgtcccggcgagacggaattgccgtgccagcggcgctggcgacgcctttggctggcgtgtcacgcagtggtgatggattcgattgctgaactcgtgcgtcgcgcccgtatgggcgaccatcaccaggtgtggcgaccgtgctcggacatgttgtcggtgtctgtcgcgcagggcgcaccacaagctggatcgctaccatgatggaggcggcgcaccaggcttggggtttccccgcgtcgactagggcttgcagcgaatgcgaaaatttttcgcattcggcgcagggatgcgctctgctgaggctgtcgcaagctgccatcattttgatattgttgacaaattcggaaatgtgctctcattattaatgcaaggtttgcaacgagacatgtcaacaggagtacccatcgtgaggggcgcggagcagttcaattacgatcaagttgcgccggacagggcagaggaactgcgcaagcttgccggcgtgatccgcctgggtgtgagactgctgacgcggacggccgtggaaataggtaggtccctgagcgaggcgaaggccggcctccctggccgggtgttcctgaagtggtgccgcctggaagcgggcttcgagccgcgcaccgcccagctctacatgaatctgccggatctgttcggccgttatggagaggatgtgtatctcgtgccgctcagcgctgcgttggatctcgccgcgccatcggttgacgaggcgacctgtgtcgacatcctgacgcgtgcccgccg

SEQ ID NO: 216 - DNA, 1755 bp, Bradyrhizobium colbertium
caagttcctcgccaacgtccgcgcggcgtagttcgcgctcgcttgatttccaagggcggcgctgtcggcgccgcccttttcgtttgaggcaagtgctgaccgcactgacatatttttcacgtgggtagtacggctccggttctttacgagtttcgaactcaggaaactttagctttctccgcagtgtttcggagactccatcgtgaagctattttcttttgccgccattcgctccatccaactgaaaatcgctctgatcgccggcctttgtctcgtggtcacctgtatcgtcctgattggttacggtctcttctccacccagagcatgaaccagtacgtgacccgcgaggtcatgcagctggtcagccagcagaccaaggagagcctgatgaatcgagcctccaacgaatcaaacgctattaaggcagagttggaggtcggatttgacgcggcgcgcactatggcgcatgccttcgagacgctggcagacgagaagaccggtacccccattgcgtcccggcgtgtccagttcaacgcgctgctgcgccacgtgcttgagcgcaaccctgccttcaacggcacctactcggcttgggagcccggcgcgctcgatggcgatgatgccgggttcaagggacgcaaggagatgggatcggacaacaccggccgcttcttgccctattggacacggaacgccagcggcgacatcgcggttcagccactcgtcgaatatgacagcagcgagcggcacgccaacggcctcgtaaaaggggcctggtacatcaatcctaacacgacgggtaaggagaacatcctgggcccgctgccttacatcgtccagggaaagtcggttttcctggcgaccatgtcggttccaatcatggtcggcggcaaattccgcggtgttgccggcgccgactacaacctcgacttcgtgcagaagctcgccgtcaagctcaacgactcgttgttcgagggcaagggcaaggtcgcgatcctcaacgacaccggcctgattgtggcctttagcgccaaccaggacctgatcggaaagaatgccgcggcggccgatccgcattggaaccaaagcctcgccatcgtcaaggcgggcaagagtacggtgcaggacgatcccaagttcgacaatatcgacatctacgcgcccatgcgtttcgggcttaccgaaaatgcgtggtcggtcgtgatctcgatcccgcgcgaggtggtgctggcctcggcgcgacaactggatgcctctcttagcgcccgtgcgacatccagcacgttctggcagctcagtgtcggactcatcatcgtgttggcggcgatcttcctcatctcgttcgccgcacgcaagatcgcgcggccgatccaggattgcgccaatttcgccgatggtatcgccaagggggacttcaatcagcagctcgaggtcgatcaggccgacgaggtcggcaggctcgcaacgtcgctgaactcaatgcaaggtgacctgaagagcagcatcgaacagcgcgcccaggatcaggcgacggccgaccgcgagcgcaagcgtacgatgagcgagttggccgacagtttcgaagcatccgtgggcggcattgtcgagacggtatccgccgcgtccggtgcgctggaaagctcggccacatcgttgagttcaaccgccgagcgggcgcaacagctcgcctccgtcgtcgccgccgcatcggaccaggcgtctggcaacgtgcagtcggtggcttcggcgacgga

SEQ ID NO: 217 - DNA, 2066 bp, Bradyrhizobium colbertium
ccgctcgacctcgatcgcattggtcttgaacacctggaccgcctgggccatctcgccaatctcgtccctgcgctccgttccggacacgactaccgacgtatcgccatttgccagaatgcccatctcgctggtgatacgctgaatgggacgggtgacggccatggcgacgccgaaggcacccaccagtgagagcaacagcgtcaggaagccgccgatcatcatggagatggtcgcgttggcggatgcggcctcggcagatgcagcgcgcaccgacaggagcgatcgttcttctgcatccatctcctgcacgacggcgcgcaatccatccatagacttcttgccggcgccggaggcctctaattcccgcgccttggactgagttgcagggtccttcatcatcgctatctcgcgctgcgcgacgttggtcatccagtcgctggcgaacgccttcacgcgctcaaggcgcttctgctgagccgggttgtcagaggtcagactgcctaccttggccgcagcggcctgaaactgcttctggccggattcgtaaggtccgagaaacgccgggtccgccgaaacgagatagccgcggacgcctgtttccgcattgaccatggccccgacgagctcggagagctgctccaacacctcataggtatgcacggtcattttcgccgtcgagttcatcacgttcagcgaattgtggatcgctgcggtgctgccggcgacgacgagacagatcgccgcaaacactgcggaaaccttgatggagatgcgaacgttgtttatccaagacataaagagcttcccagtgctgacgatcaggagtttctcgtcggatgaccggctccaaccgtgctatgacttccgacacgatcttaccgtcgctggagatcattcaccttaacggcactccgtagtcatactgatgcatcagcatgaaatagcccgggcttttgcgggactatccaagaggatgcgactcaacggatgagcgttccgcagcttgcagctgctgattgccggcctctcatatcgtggccggcatggctcggaacgaagcctttccttccttcagcggaagcttgaaaaaagtgagcggcgcaaggcgccgctcacttcccacgaaagacgcgcgctcgcctctacgccgcgcggacgttggcgaggaacttgctgacctcgttcttcaaccgtccggaatcattcgacagcatctgcgccgccgacagcacctgcgaggaggccgtgccggtctcggtcgcgccgcgctgcacgtcggtgatgttggaagacacctgctgggtgccttgcgcggcctgttgcacgttgcgggcgatctcctgggtcgcggcgccctgctcttccaccgcagcggcaatggccgacgagatctccgacaggcgctcgatggtcgaggagatctccttgatcgcgccgacggaatcgttggtcgcggcctggatgccggagatctgttggccgatctcgccggtagccttcgcggtctgctcggcgagcgctttcacttcggacgccacgacggcaaagccacgaccggcttcaccggcacgtgcggcttcgatggtcgcattcagcgccagcaagttggtctggccggcgatggtgttgatcaactcgacgacgtcgccgatgcgagcggcggccttggagagctcgctgacgcggtcggtggtggcgcgggcctggccgacggcgtcgcccgccatccgtgcggactcttgcacctgacggctgatctcgccgaccgaggacgccatctcttccgtcgccgaagccaccgattgcacgttggtcgaggcttcctccgaagcggcggcgaccgtggtcgccagttgttgcgagcgttcggccgtgccggtaagggtggtggccgacgcctcgagctgcgtcgaggcggacgagaccgttccgatgatctggccgacagcaccttcgaaatcgtctgcaagcctggtcatgtcctgcttgcgttgctccgcattccgtcgctcagcctcgacctgctccgccttgagccgctcgacctcgatcgcattggtcttgaa

SEQ ID NO: 218 - DNA, 1528 bp, Bradyrhizobium colbertium
tcggcagcgtcgacgtcaccggcgatcaccaggatcgcgttgttcggcgcgtagaagcgacgatagaaggcgagcgcatcctcgcgatcgagcttctcgatctcctgatgccagccgatcaccggacgtccatagggatggttgagatagagcgcggccatgatctgctcgttcagccgcgcgtccggattgttggcgacgcgcatgttgtactcttcaagcacgacatcccgctccggcagcacgttctcgtccttgaggacgaggccggtcatgcgatcagcctcgaactccatcatggtcggcagctgctctttcggtacacgctggtagtaattggtgtagtcgaccgaggtcgaggcgttctcgttgccgccgatgcgaagcacggtctgggagaattctcccgccggatgcttcgcggtgcccttgaacatcaggtgctcgaggaagtgggcgaggccggacttgcccggcgtctcgtctgcggagccgaccttgtaccagatcatctctgtgacgacaggcgtgcggcgatcgggaatcaccacgacctgcatgccgttgccgagcgtgaagctggtgggtggggccgatgttaccgtggtctgggccgtggcggcgccggccgagaggacactcgtcgaaagcagcgcggcaaggaggcaggcagccgatcggtaagatgacatcatgatccctagtgaaaggccgagcccggatgtccggctctgaaggcacggcatgttacaccgtgcggccaaggcttcgcgtcacgaagcagagaactcaacgcggaggcaagttactgataggcaatcttaaacggcgtcgggcgcggacatgagccgtcgaccctcgactcgcgtcggtcaaaatgtcgcgacaggacggggaacgctattgttccttctccttgcccgacatgatgtcgtagtacatccgtcgcgacttgtccggcccgccggcgccataggcatagttcggcgagggcgtctggtatcccggcggcggctcgaccagcgattggcgcggcggctccgacgtgaactgcttggtttcggagctgctgccgcccttcatcatattccacaggccaccggtgaaaccgagttcggcggggctcagagaagggttgctgttggtacccggctgaattggatcgttgctggtgcggggcgctgcggcgacctggccagacttcatctcggcaggagtcagaggctgggcggcctgccagctctccgttgccttcgtggccttcttgcgtgcggcgatggcttccttgcggcgcctctcgtcggggtccttgggccagttcggcgcagccttggcttcggtcgcaggcggcggcagatcgagtttgggcggcacgaccagcggcgagcgctcgcggtactcgatgcccttcttctccatgctcttggcaccgatgcccgacatcaggttgtcgatgagcctctcttcgaaggtcatatcgtcttcttcgtcgtcgtccccggcgcgggccgcgccggtcgacatgacg

SEQ ID NO: 219 - DNA, 1187 bp, Bradyrhizobium colbertium
aaaccgccggtccagcaggttcgctggcacgctctcgagttgccgatcgccactgtccttcggcaagcgccggcgccgcggccgcgctcgcaaaccttgcaagcgcatcagccgctcgatgcggtgcaggccacagtcagccccgtcggcgagcacgtcacgccacacccggcgcgcgccataggtgcggtcactcgccaggaaactggccttgaccttaccgccaagctctttgtcactgcgggatctggcgctgggagagcggttcagccaggcatggaagcccgaccgcgacaccccaagcgcttcgcatagccatgccaccggccagatcgcccggtgcttcgcgatgaagacgaacttcatgtcgcttccttcgcgaagaaggctgcggccttctttaggatatcccgctcggccttcaacttggcgacttcaggcgcaaccgctcgatctcctgctgttcgggcttcatttgcccatgaccgggaaggcctgcgcggggtcggagccgaactccttcacccatttgcgcagcacgttctcatgaacgtccaggtcgcggctggcctgcgccaccgagaccccgcgctccctgaccagcttgaccgcctcgatcttgaactcgcgactgaacttccgtctcttcatcgcccacctccgtctcgataaaacacctaatctcggtgtccatcaaaccggcagcagctcagtctgccttgcccgctgacatcgcgctgttcgggtcacctacgggaagcagatctcgccgcgctttcagccgcggtcagacacggggcaaatgatcgtgaggtccgcgagatcctttggcccgaatgccgcgcttgcggccgcataggcgtcgtcggaggcgtgcgtctcgctgacgagcgtgacttcctccgcccacgcgagggcagcgcggtacttgtcgggaaacaggtggggcacctcggcccagaccggaacgagggcgacctgctcgaacggcatcgtgtccagaggtgccgggtgtgcaggtcgatgcagtgtgcgcatccgttgatctgcgaaactcaccagaagacgaggtggatcaattcgcggggcaggtcggtgcccgtggtgatgtagtggtggatgccgaagatagcctttacaccctgcggcgccacctcgctctagcagtctgctgaaaaactatcgtt

SEQ ID NO: 220 - DNA, 3103 bp, Bradyrhizobium colbertium
cccggacgtgggagctcataccggttaccaccgagcgttcatgacgtaaccctccgtcgatggagccacgcctggtgacgggatcgggtgtatggccggggtgtttcgttgaccgacactcggttgtgaacgtgatgccaatagtcgggcgcggcgtcggcaggatcgatgccgagtgcttcgacagcatcgatcaattgcaggacacgttcgaccttgggccagcccgacagccggagcagactttcaccgcccggcgtgatccaggggatggtggaatagcgttggcctggcgtaacagcacgcaagatatcgatgcgggaaagaatggtcccgaagtcgttggacgtccaacggacgaaagcgaagacgctgccaggcgcgaacgaaaggacacgccggttgcggtcgagaatcttctccgaaacgtgtcgcccaaaacggactcggttctcgatgcgcttttcgagccacaagagttcgaccgtcgtaagcgtgcgcgagatctgttccgttgcatggctctgaagggtatgggcttgtctcttcatggatcaacgccgctcttttcccgcatacgggatgggcgcgtagcgctttgctgggagaacggtgccggtacctggatcagaggtcgacttctttttgcccagtttgacccacgcgtccaggtcttcctccttgtagacgacgcggccgccgatcttagaatattccggaccagtgccgtaaatgcgatgcttctctaatgtccggggtgacaaagtgacatggcgtgcggcttcagacgtgcgcaaatatcgctgcggtaactccgcgtttgaatcggacattcggaagagccccgtgatggtctggactgccgacgaaaccgccggcgtagcgtcgaagaccatggcggaagaaaagctcgaagagggatggcgaagattggggggtgcattttcgccacccccctggccttatctttttcgcgggggcggtcttagcaaggcgcggtaaccgccttggaccaatgcgaatccggtcttgacgagacggatgatccgatcccgcgcttcgtgcgtttcccaatcccgctcgggaatgcgcaccgcggacaggagaacttcagcgatttcgcgataagtggcaccgtcgcttcgtgcatccgacgcacgcaaggcaagcgcgattcgccgccggcgatgcgctgagatcgcgtgcggaggcgctccttgggggcggccattgagcccccgccacaaacgtctgcccgcatccgccctgaactcgaagtcgcggtcgagcgggagttcgacggtgtaggtagcggcgacgatcggcgcttctttgaaccagacacgatgctctacgccgcgcaaatataatacggcgtgccaaccatcctgagcttgccggaattggccttcgttcagctcgctcagatccagcctgacatgtgtatgcgagctggcgagcgatgccgggcggattggcacaatcgtcggcacggcctcgggagcccagaagaccgtctgctccgaaaaggatcgatcgggatcggctgcgaggaaccaacccccaatgctgacggaatccgtcgtcgacggttcggcctaacgatgagatggtctgatagtctcgttcgaacgacgcgttgcggcgcaggcattcccacgccattccggtcatttcagcttgttcgatcttgtcgtagtaggtgtcgtctaacgatctccaattgaactttggcatgtactcgttcccaaaactgagctgccgcgctggtggcggcatcattctgagaacctctggttgcaactagcccctgatagcgcatcgcctgatgcgccaaatctatttcgggagtgaggggaaaattcttctgcgaaagcagcctaaaggttgggatttgacgctccgccgcgcagcaaatgacgataaccgtgctcagtcatccatttcgcgcgggtcaggtgggtatcgaacgcacgctttgcgcgatcatgctcgaactccggattgatgtgcagcacgatttgcgcgacctcgcgccaatccgccccctccttgtccgcatcaagcatgcgcaaataagtgatgatgtgctcctcgtcgtagaccgtgagcacggaatccgttggtgcggtgtcggcaacgtccggatctcggggtggcttcttcataaaccttccaaacctgtcatcacgccttaaatcagacaaactctaaaccggcgtggctcttctcggaagagggcgaacgttaaactttattgagcagcgcactgcggtcggcgtcgtggcaggtgcagttgatagcatattcggtgacgaataggaattatcgttcctagaacgatcgttccggttcgggttcccatactgccatggatctcaaggagatcatggcgatgaacctgcgtcgtaagcgccacgatctggatatgacgcaagaagaactagccgagcgcgcggggttaagcctccgttacgtcggtgctatcgagcgtgccgacgtgtcggcaagcgtcactgtgctcggtcaaatcgcagaagcattgggaatcgaaccgggagatttgctcaggcgcgctgcgcgatcggccagatcgtaggccgcttaagggcccaccatagcgcgcccttgaaaagattgcgagactttctccgcgactataggcgcgcatttggcagcattttactggctggcttgcttcactcccggcgcggccgtaagcgtctctcggttgaaacaggaaaaagccccgcccgatttgttcggacggggcgtcgttggagcgagcctcactcgccgttcttgcgcggccgcgaccacagcagggtgtagccttcaccgccctcgtcgtcgaacaggttggcgtagatcggggcgttgaaggagggatcgtcgagcttgagcgaaaggtagtcgcgaccttcttcggagcgcttcgaccaggcggcgccgatctcggcccggcccacgaagattcggtggctcggagccttgtcgttggatgggctggtttccgcgacgatgcggacgcctttggcctgcaggctgagggtgacgatctcgccctggaaatcgttttaggtcagttggcaaccgtctttct

SEQ ID NO: 221 - DNA, 4012 bp, Bradyrhizobium colbertium
ggatatcaaggacaagatgaccggcgcgcatggaccgcgcaagcatcacaaccacatcttcttctgggatatcggcgacaaggacggtaccgacgaagcctttgccaaggccgacgtcgtctccaaggatatgtttacctatcaccgggtccatccgtcgccgctggagacctgccagtgcgtcgcctcgatggacaagatcaagggcgaattgacgctgtggggcaccttccaggcgccgcacgtgattcgcacagtggtgtcgctgatctcggggttgcccgagcacaagatccacgtgatcgcgccggatatcggcggcggtttcggcaacaaggttggcgcctattccggctatgtctgcgcggtggtcgcgtccatcgtgctgggcgtgccggtgaagtgggtcgaggaccggatggagaatctctccaccacctcgtttgcgcgtgattaccacatgacgactgaactcgccgccaccaaggacggcaagatcctcgccatgcgctgccatgtgctcgccgatcacggcgcattcgacgcttgcgccgatccgtcgaaatggccggcaggtttcatgaacatctgcaccggctcctatgacatgccggtggcgtatctctcggtagacggcgtttacaccaacaaggcatcgggtggcgtcgcctatcgttgctcattccgggtgacggaagcggtctatgccatcgaacgcgccatcgagacgctggcgcagcggctcggcatggattcggcggacctgcgcatcaagaacttcatccagccggagcagtttccgtatcatgctccgctcggatgggaatacgacagcggcaactatccgctcgccatgaaaaaggcgatggatgctgtcggctatcgtgcgctgcgcgccgagcagaagcaaaagcaggaagccttcaagcgtggcgaaacccgcgagttgatgggcatcggcatctccttcttcactgagatcgtcggcgccggtccatccaagaattgcgacattctcggcgtcgccatgttcgactccgccgaaatccgcatccatccgaccggctcgatcatcgcccgcatgggcaccaagagccaggggcagggccacgagacgacctacgcccagatcattgccaccgaactcggcattcccgccgacgatatcatgatcgaggaaggcaacactgacactgcgccttacggtcttggtacatatggctcgcgttcaacgccgaccgccggcgcggccacggccgtggccgcgcgcaagatcaaggccaaggcgcagatgatcgcggctcaccttctcgaagtgcatgaaggcgatcttgaatgggacgttgatcgcttccgggtgaagggtctgcctgaaaaattcaagaccatgaaggaaatcgcctgggcgtcgtacaacagtccgccgcccaatctggaaccgggtcttgaggcggtgaattattacgatccgccgaacatgacctatccgttcggcgcgtatttctgcgtcatggacatcgatgtcgataccggcgtcgccaagacccggcgcttctatgcactcgacgattgcggcacgcgcatcaatcccatgattatcgaaggacaggtccacggtggtctcactgaggccttcgccgtcgcgatgggtcaggagatccgttacgacgaacagggcaacgtgataggcgcgtcattcatggatttcttcctgccgactgcggtggagacgccgaagtgggaaacggactacaccgtcacgccgtcgccgcatcacccgatcggcgccaagggcgtgggcgaaagcccccatgtcggcggcgtgccatgtttctctaacgcagtgaacgatgcctttgcgtttctgaatgcaggccacatccagatgccgcacgatgcctggcggctctggaaggtcggcgaaagactgggcctgcatgtttaagacaggtccgggcgaagcaaactctgctccgcccggcatgtccggaacgtgtggtgagatttcgggtgccggctgctcgtcggctctctgatcgcaccggacttgaagcagggactgcaccggcaatgggccgggcgagttggaaatgcttatgcgtcatcatattccacgcgatcgaatcgcagatcggctggccgccgcaggctatattccggatcgtgatcttgcgacggccgtctggctgatggagcacctgtcgcgcccgctattgctggaaggcgaggcgggcgtcgggaagaccgaggttgcgctggctttggctcgggcgaatgacgcgcgcctcattcgcctgcaatgctatgaaggacttgatcagaacgcggcgctctacgagtggaactatcagcgccagttgctggcgatcaaggcgcgcgaaacccatgctgacgctgccgatgtcgtcgaagatcatatcttctcggaaaaattcctgcttgaacgtccgctgctgtcgtccatccgtcagccgaaatcgcctgtgctgctgatcgatgaggtcgatcgcgctgacgaggaattcgaggcgttcctgctggaattgctgtcggatttccaggtgtccatccccgagcttggaaccatccgcgccaccacgatcccgcatgtcgtgctgacgtccaacggaacgcgcgaactctccgacgcgctgcgccgccgctgtctctatcattacgtcgattttcccgacgtcgaacgcgaggcgcgtatcatcaccgcgcgcatgcccgacatcgacgtggatctggcgttgcagatcgcgcgcatggtcgaggccatccgcaaggaggatttgcgaaagagccccggcgttgccgaaacactcgactgggcagccgctctggccgggcttggcatcgacgatctgcgcgcggaaccggaagtcgtgttcgaaaccatgatgtgcctgatcaagacggcagaggacaagtcgcgcatgacgcgtgaggtgtccgaccggctgctgggcaaggtggcctgatatggcaggaagtgcggccattcgcgagacgattgctgctccggcgggcgcaggcgcgcgccgcaagctcggcgatttcgtccgcgtgctgcgcgacaacgcttttattgtcgggctcgccgagacaagtgacgcgctcacggtgcttgccggtccggattcgtcatcgccatcgcggttgcgtccagcgctgcgcgcgctgttgtgcagcaacaaggcggactgggagaaattcgacgagatatttgatgcgttctggctggggcgcggcatgaaatccgccacgcgcatgtccggcgtgctgcagaagaccccgccgggtttcgacagcacgaagagcggcgatcggccgggcaatccggacggcgcaccggatagcgtgcaaaggcgtcccggtggtgatgacgagaccaacgagaacagccccggtctacgcgaaggagcctcgcggtctgattcgcttgccaaagccgatttccgtcatctcgccaatccatccgatcttgcggaggctcatgccgttgcggccaggttggcaaaggcgatgcgcgtgcggctgacccggcgcgagcaggcacgccgcgcgggccggcgcatcgacctgcggcgcacgatccacaagagcatcgcgcatggcggcacgccgatggaactggtctggcgccagcgcaagaacaagccgctgcgcctcgtcgtgctcctcgacgcctcgggttccatgagcatgtattcggcggtgttcctgcgcttcatgcacggcattcttgacacgttccgcgaagcggaagccttcgtatttcatacgcggctgattcacatctcaccggcgctgcgcgagcgcgatgcgacgcgggcggtggagcgcatgtcgatcctggcccagggcgtcggcggcgggacacggatcggcgagtcgcttggcacattcaaccgctggcacgcgaagcgtgcgattcatgcgcgcacctgcgtcatgatcgtgtccgacggttatgacaccggaccggccgagcaactgggccgtgaga

SEQ ID NO: 222 - DNA, 75765 bp, Bradyrhizobium colbertium
gctgaccaagcggatcgtggacgctgccgatgttcgcgagaaggactattttatctgggacgacgaactgcccggtttcggcctccgcgtgttcgcctccggcaagcgcagctacctcatccaatatcgcgctgttggacgcacgcgacgctacaccatcggcctgcatggcgtgtggacgccggagacagcccggcaagaagcgaaggtccaactcgggcgcgtcgcgcgcggcgacaacccttccgaagaacgtcagctcgatcacaaggccatcacggtcaaggagctttgcgccctctataccgctgatctgaacgcgggcctcattctgggtaagggcgggcgaccgaaaaagcccaccaccatcgtcaccgacactggccgtatcgagcggcacatcatcccgctgatcggcgcgcgccgggtcaaggatctcaccaaggccgacatcaacaaggtcttgaaggacatcatggccggcaagacgcgcgtcgccgtcaagacgaaaaagctgcgaggaaaggccattgttcgtggtggcgcgggcaccgccacgcgcaccgtcggcctattgggcggaatcctcacctacgctgtcgatgctgggattatagaggtcaatccggcgcacggcatcaagaagcccaaggacaatgttcggaatcgtaggctgaccgaggcggagtatcgcaccctcgggcaaatgcttcgcgatgccgcggcgaacgaaaaatacgccatgaccgtggacatcatccggcagatcgcgctcaccggctgccgccgctcggaaatgatctcgctaatgtggatcgaagctgacaccgacgcgagctgcatgcgcctggtggacagcaaggaaggtgagtccattcgtccaatcggattgcccgtcgtcgagtatctggaggaacggcgcaagaccgcagcgggcacctatgtcttcccaggtcagggcgaggaccatgcgttcggcagcttcccgaaccattgggaacagattttcagcgacagtccgctcgccggcgtcaccccgcatgtcctgcgtcacagctttgccagcatcgccaacgatctcggtttcaccgaggtgaccatcgcggcgctcgtcggccactccaagggctcggtgacgagcaaatacattcacacgctcgacactgcgctcatcatggccgccgacacgatctccggttacatccaagggctactcgaggggatcgaattcaaacagacggcctacgcattggatcgtgattctcgtcgagctgcgcttgacctcttcctgaccaaagcggttggagagccggggaacgaagccgaggacgaggagcgtcgcttggcagcttgaggcttgcgatcagccactggtcggcgagcaattcatcgccgcccacgatgcagtcgaaaaagctttttgaagaaatcgacgatcttcggtttggcgccatcggcgaccaggtcatttgctccgaaccggcagaccatcctgacactcctgcacaccgagcgcagccgtagcggcgcgttgtctcgttcgaccgcttgatcgcccgctgccgcattggctccgccagcattggagactttctgaggcaggaacgtctcgcagagggggcatctgacgcaatcgcctcacgcccccgttgcgcgcaatttagggcacatatacttcaaggatcggggcggaaggcgccaccgcttcggcccgacgcttggcaacgcgcttcgccgcatcgcggacaagtgcaagcttgcgcctgtccttgtccacgcatgccagaatttggtcatcatttgcggcgtcgatctgttcgggctcacagagctgcgcggcggccaagcggcaatagtcgccccgcagcaaatcggctccagcgaattgggcgaggtcgacggcggcgctgggcacgccatatgtcaaccggatcgccagacgtctcacacggtcaccgagatcgagcgtggggtgcaggatctcggcgacgcgagccgcgaccggcatcagatcgcaagtccgcgctgcgaccgcgcgtatggggccggcggcgccgccaaacgcaccaccgaactgcgtcagcacgcgctcgatctcgctcatggcacgaccggacacgaacaaaagacaagcgaccgccttcttcgcacgcagggtcgcctgatgatcttctgttgtcccgcgctgaagcgcgttcaggacgtgccacggcacattctgcctctgcagctcgttgggccatagctgaggctctttctgcgtgctttttcggttgatcggaaaaaggagttgatcgacctcgaccgtcgtttgagctgcggcaatcaggacgggatcgctgatttcttggggctgaagcgagccgaggcaatctacgagcgcgacgatggacccgacctctgccgcgctttcgccagcgagacggcccagcttggtcaattcatacgcgcctgtagcgttcttctgcaccaggccgtggcgttccaaatccgctagggccgaaagcagatccggccggctccactgccacgcgctatgggcgcgccgggcttggaacgcgccgaagctcgattccagaaattcgacaatctcctcgctcggcacgccttcgccggccgctcgttgtgccgcgactaggacgcggataatcagggagcgtgggtcggttgtaccgtcgaggaagcgggacaccaagtcttccggctccgcggtcacgtatcgcgaccacagatcatgctcggcgcgcggatcgagcgccagcagatacgaagctcccttctcggcgaagccaagccttcccgcgcgaccgactaggttcttgtattcggctaccgaatagggctcgtcgccgggatgattcaagccggcgatgatgaccgatgacgcgggcgtgttcacgcccatcgccagcgtcgtcgtggctgcgatgacgcgcaggcccgagccgctacggcgaaattcttcctcgatgacgcgccgctcttcgcggtcgagatccgagttgtggaaagcgacgccgcgccccagcgcgctccgcaagtcggcgctggcctgcgagggatcgccgccgggcatctgcgtcagcgcctcggcagccggaggcaatccgagcgactctgcgagatagttggcgcagccgcgggcttcgcccttggtttcgcgaaacacgatcacctgctggccttcggcgacaagcttgcgcaccagcgggatgatccaatcctggctggatcctttgccgccgacaagacgccgaacgagcggcccctcaacctgctcattgccattctccgggtcaagaaagcggaaatgcccggtgccgagcaacaagccctcctcaagcggaacgggccgctccgtgcgccgcaagagccgcgcgccgagccattgctcaaggccgttcgtgtccccgatcacagccgaaagcgcgatcagttggggctcgatcccctcacgccggcgcatccggatgagcgtcaaaatgaactccagattcgcgccgcggccacggtcggcgatcatctgcgcttcgtcgatcacgatcgcgccgacctgcgccagcacatgagggaatgtcagcgcgatcgcggcgaacttctcataggtcaggagaccgacatcgtattggccccgcagcagaggcgcgatgtcgtccgtctcgcccgtcgcttccaccgtgcggaccccgaaaccgccatagacgctctcgaagtgccgccgcttgtctgccacaagggccttaagcggcagcagaaacaaagcccgtttgcgatccagcacgttccggagcgccgcgagctcgcccaccatcgtcttgcccgaggatgtcggggccgacaccaccaggttctcgccgtccagcacgccgaagtcggtgatggcggagatctgaagcgcattcaaggacgggatcgctccagcccaggcggtgacaagcgcgtcggggaaaccggccgacgagaggctggcaagatcggacgtcaccttggcaggcagacgcgccgggaaggccgcccgatacttagcgcccggcacgaacacgggccacgcgacatcgccgtcgatgctcccgcgcatggtcgggttctgctctttgccgccctgcagcgcggccgcccggacgcggctcgtgacatgctcgaggaggcggtagagcgagagcttgccgccgctcacgacttcctcggcgccacatagcgcctcaagcagaaagtgggtcagaaagccgtgcccgaaccggcggtgctcataggcgggctcggtcgccgcggaggcggtgaagatgatccgaccagcgccgccaagctgagccaggcgcgcttcggcggacaaaaggctgcgcggcttcgcatcgacgtgcagaaccttcgccccaatgccgccggaaaaacaacagtcgaggaacaggatcaggcgctttgccggtatccgcgagaaccattcctgcaacagctcgagcgggatcgcggagccggcgagatcatctggattcgcgtcgtgggtgacgagctcatgtgtctccgacccatggccggagaacgcgatcaccaccgtatcctcggggccgcagccggccaggtcggcaaatgcgtcctcaatccgctgccgcgtggcctccgcatctgccagcaagactgtgctgccgcccagcgtgtcgaagaacagtgcctccagcgccgtcgcgtcgcgacgcgcgcaggtcagctcatcaatgccggtcgagctataacggtcgatgccgatgaacaggccgcgaaacggcatgaggcaccacgctacgcccgaacgacgccgacggagaacgcggctcgtggcttctcagccttctccagcacgaccggcgcgaacgtgtctttccgcgcgacctgcttgttgcccaccttctcgaaccagacacaccagacggcatcctcctccagcatggccgtcttcccgacctgctcgaccgtcatgatcggcccgcctgacttcacccgcacaagatcgccgggcttgaattcggtagcatccattctccacgctccttctcgatgcctatctgtcctcgccaggcaccggaggaggtcgcaagaagctcgcccacgtccccaccaccatgagtggagacgcgcacgtgctaggagatcgccccatgcctaacatcaatatatggtgtgtcggtcattccttgcacaaggatttcggcgaagaccgtgtaagctcctgatagatgttcttgatttgtctcttagggctgcgctgcgttccgaagcgggatagcccgacggcaacctgccgtcgggcctatcgtcacgatctgccagatagccaacgccaggcgcggcgccagaagccgggagccgccttgacgggagcgggctgaacggcaagttcgatcgctggcgtctgcccgtagaagcgcgctttggcagcgcggtcacgacgacgctcggcttcgacctgctcgtcactccaggggccggcctcgatcaccttgctgcggtcgatcacatagtgtgaccggcatttcagcgtccaattgccgatcgacggccgaagggagacggtctcgccatcgaacgtcatcttccagtccgtcggcgtgaagggggcgacgacctcctcgccgcaaccgcagcagcagctgtgggctgatgtggcatattccatcgaaacatagagaatgcctgcctcaaggcgctcagggatgtgttcgacgaaacgatgttcgagtcgcttgtgccgtatcacgcgagatccccgttgatcagcatgttgccgtcggtggtgtaggtgcagtgatgctcgcgctcgaggtcgcggtagaagccgcgaatcttcttccacttgacgaccgcgaggacagcattcagggcgttgagatccgcgacctggatgttggaggcgtagatgtccttggcgccgccgccgacgaaggaaatgcgctgccgcgcgtgatcgcgcttctccggcgtactggcggtgacgcgcaggatgccgcccagcgacccctcgtcgagctcgagccccatgccaacatcgacgaacgcggcgccgatcgcctcgagcttctctacgatcagccgcttagcgtcacccgcatcgagggacaggaacgcgaaggtgacgccgtcgagaaggtgaatgttgtcgacgccgagcgcgacatcgtgcgccacgatgttccggtgcatccggctgtagatgcgcttcaggtattcgaccttcttgggcgcttcccgcaattcctccaggctcggagcgcccggcgcgcgaaacgcgttatgggtcaggaactcgtcgctgtcgaacagccggatttcccggacaggcgtcttggcgacgaaatccaggatgtagccgccggtccccccgacgccgatgatggcgacccgctcgttgacgagtcgctcggtcaggacgccgatcccgacacggtcggaggcggtctcgacatagttgaagacgctgtcctcctcctcttccggttcgcggaaggtgcgaggcgtcgcgccggacttcagcactgcggccgggcccgcgaggatattcgcgtagctcgtcatcttgtggtggtagtccgagtagccgccgtctggcttgctggagaagctgtgcgtcgccttcaggccgtggccgagatcgaaggcgccggccgcatgcgagatgccctggatgggcctgccgtcggcgtggcacgggaaatcgccgtcccagtggatgacatgggtgtcgggcgggcgcgtctgatctccggccagcgtgaggctggagatgagggtgccgatgcgcacctcccggcgcgcatcgacatacggcacctcgcgcataacgagatacccgccctgctgctggacgaagtagccttcgtcccgcagccgcttgaggtccggattacgactgaacagtgcgcgtgacattgaacaccgtgcccttcttcttgacgtcgacggagccgccaaccccgagctcaccggcgggcggcgtcgacgccgcgtgccgataggtcatcgagaagacgacgttgggttcgtgctggcccgggaaggcgagctggacgatctgttcgaacgtcaccgtgcgggcgttcaccgtgcgcggccgcgaattgacgatgatctcgaacgtcagccgcgcggtgatgaaccgctcgatgccgggctggaccagatcgatcagctcgccatgctcgatcaggcgatcttcaccgccgggaacctcgaggaagacggcctccccctcgccgggcttggcgaggccgtagagcaccgtgccgctgatgaccggcttgccccagagcagctcgtggtcgttgagggtcagcttgaagtcgcggtcggtctggaaggcgatgaaccgctcggcgccgcgctcacgcaggtcgaacggctcgttgagcctcacatcctcgaaatcgcccgagggcaggatcgcgatgaggctgtaaccgtcccgcgggtcgagtgccgcggcttccagcaactggcggccgagcggcacgggatcgctcaccacacgggactggaagttgagatcgccctgcgcgaggagaaagcgatacccccgcgccggacgcaacgcccggccttcgcgcagggcgttgccgagatcgtcgtaatcaagaagttcttcggtgttcataagattgggtccttaggttcggccgaggcagcgccgcggctctaagggtccaatcggagcgagggaggccgaccggtaaggtcagacgaactttttttgcaaggggccgtcgggggtctgcccgcagatgaagaaggccgggcagttcgggcaggtgcgcgacgaaacctcggccggaaaccgtccggcgcggatgtcgccgagaaactttgcgagcttgtccttgcgccccttcagctcccgatcggacaaggcaagcgcatgtgcctcgccgtcggaaagatggacgagctctgcgaccgcgccgggaaaggactgcctgaccgccagcatcagcgccgccgcgccgacatccttgccctcggccgaccgcatgtgacccgtgcgaatgcggcgcacggcgcggatgccgtccggccgcaccagcacctcgtccggccgaacgatgatctcctcgccgccgaaactgaggctgagcgcgaccggcgcttcggggactgcttcggcgcggttcgccaggaagaagcgcagcattgccagcgccagatcgcggaattccgcgcgatagccgtgctcgccgagcccctcgccggcgagcgccgcatcgatgcgatcttgcagcgcctgctcggacacgggtccatccgacgcgatcaccgcctcgaccaccacgcgaaccgcctcatgcagatgcatgaaggcggtcgcggttcgccggccgccgacctgcaggacatgcgtgtagaagaagcgacgcgggcaggattcataaagagcgatctgcggggcgcctaaccgcagccgtccgtcgaccaccaaatcgatatcccgagcttccgcggccacgggaagcggccgtgccggcacgagcgaacggcgtgttaaggtcgccccgagacggtcgaggaatggcgaaagcggtcggttgtggccgttactcttctcggtcggcgcataaaggatcaggcgatcgcgggcgcgcgactgcgccacgtaaaataggcactcctgctcctcggcctgacctgcgcggaatgcctccagcgcactgccctccgcccccgcgatcatcccgtcgggcgccggacagggcggcgccggcggcgtgcgtgggatcgtgtcgctgttaagcccaggaatatggacgccaccgaactctaggcccttggcgccatggatggtcatcagccgcacggcgtcgagatgctgggcggccgccggcaattggcgcaggtcgcggtcgtcgccgagccgcacgagcctgcgcacacgatcgagcaggcgcgtgatgggcagcccgcgtccggccggttgtacccgcacaaagttgaggaattgccagatcgcgatgccccgtgtgcggtcggcgagatcctccgacgcgcccaggcgcgcggcgatgcgtgtgcgatcgagcaacagcgtcgcgagcacggtccagggcgaggccgtctgatcgaaaccatcgagcgcagtcgcgagcttggcaacggtctgccgccccctgtcgctcaaaccggggatcgcctcgccatgccgcagccagcccgccggcgcgtgctcggccgcccgcagatggtcgaagaccgcgaccacatcggcaaaggaggtggcgaagtctcgccagcaggcaatgcgcaccaggcccatggcgcgccgatcgaccaggatcgagaggagagccaggagatccttgacctcaccccgctcgaacagacttcccaggaagaggaccggcacgccgagccgttccaggtcctgcccgatcgtcgacagcttttcgttgccggtgcacaggaccgcctggtcacgataggcgtagccgtcacgccgcagctcctcgatagcgtcggccagggcgacctgctgctgctcggcgcgctggaccgtgcgcaactcgggcctatgtccattggcgtcgcggtccgcgtcgaggccactatccgcatcgccggcgcgcatcgtgatcgcgaaactggagaagctggcgacaatctccggcaccgaacgataattacgcttcaatcgaccgcgattgccaccggcgaagtcctccttgccgaaccgggttatgttgaaggatgaggcaccgcgaaaccggtagatcgactgcttggcgtcgccgaccatccagagattgcggccgtcgggccgcagtgcgctcagcagccgcacgctgctgcggttcacgtcctgatactcatccaccaggacatgatcatattgcgcctgcagcgccgcgcagatggccgcctccttttcgagcagttgcaccggcaaggcgacaagatcgccgaagtcgatgcaatgcgcgttgcgcttgagctgttcgtaggccgcgtagacgcgggcaacctcgccggcgcgttccgccgcctcgcgcgcatccgagtcctgggctttcgcctgcatggcgtcggcgagcgcggcgtaggtttcggcgtcgaccacctcatccttcgcccgcgatacggcggccaacatgtcggcaatgatctgggtcggatcgtaaagattgcggtagtacgcgagcctaagccgcgggaactccccctcgaggagttcgaccgcttcggtccggtccatcatccgcgggtccttcggcaggccgagctccgcatggaaacgacggatgatatcgaggccgaaggcatggaacgtgccgatccacatcgcggccgcagcctcgggccgcttgcgcgcgatccgctcggccatctcgcccgctgccttgttcgaaaaggtcaacagcagtatgcgccgtggatcgacgccctcgcctagaaggccctcgacgcgcgcgatcagcgtctgcgtcttgccggtgccaggccccgcctcaagcagataggcttcgccgcgatgcgccgcagcggccgcttgcagcggattgagcggccgttcgacatgcgccgcagtcgcggcgggaggcacgggcggcagcagcaaagcatcgaacaactgctgcgcgacgacctcgaacggcgcgccgagcttcgcggcgatggcggacgcggcgagcccttggtcgacatggagcgcccgcgcgacggtgcgcggaagcagcagttcgcgcgcgaacaggtccatctggacttcgcggcgttgccggcgtccataatcgacaacccgatccattccgactggtgagggctcggccgggcgtgccggatcaatcatcggcgccgcttcgccaccaggatcgtcgcccagctcgacatggccgatctcatgcgccacgaggaaagcttgctcgaacggagagcccatattctcgtgaagaatcagatcgtcggcggcgacgaaagtcgcgcggccgccattgaggacggctgcgccggcggcagtccgttcgacatcaatcccccgccgcttggcctcggcgacagcaaagtcatagggcgaccagggatcggcgccggatgcaacgaggcgagcgtgaagctcggcggcgacttgcctggcgagctccacactgtccatgtcagtccgcctccgccaacagccgggcgcgcttctcggccgggacgccggcatcgatcagcacttgctcgaaggtgacctgctcgccggccaccggtttgctgtcggccttatagctgcgcgcgacaatcaggtgcgctggcccccaggacgactccaactgtgcgacagagctgcgcatcgcatccgccaatatcgccaggaagcgtcgcgggatactgacgagagagacccgccgttcgcgcagtgcggtcacgacctgccggggcacgtccagacgctgcgcgacggcgcgccagtcatcgaccgtcagcgccgcgaaagggtcggctgctgccgccggcataaccttcgcgtgttgcgaccaggcagcgtcgatcagcgcccgatcggtagcagagaggggtgcggcatcttcataagcctcgcggctgagttcgcgcgagaggtcgatgagctccccggcatattccgggtatagccgcagatagcgttccaaggtcgaccggccaggctcgctctcgaccgcgaacgcgtcgagcacggcctcgcgggatggacgtccgccgccggggctcaccgctcgtctccgtcggccatggcagctcgcagggcggcgaaggccttgtcgcggtaggttcggacggtcttttcggagcggcccaaagccttggcgatggtcatgacgtccggctccttggagtcgatggggaagccctgtctcaacatgtgaatgatcctgctttgttctgtcggtagagcttcaatcgctgcatccaggcgcgaccggtaagacgggtcgtcgaaatccgacacggcgaagggatcgtgggtccctgcggccgcctcgacctccggtgacagttctccgctctcctcgtcatattcgaggggctgggaacggttttcgtcgcgccaggccttttcctgcgcatcgcgccgcaggctcgctagcgcgccatcgaagcgcacctcgaagtagtcgaccttttcgtcgtaggcggcgcggtccgccgaaaagagctcgacgaaccggccgaacaccttgtcgcgcacgaccccgcgcgtcagcgattccgtctttccatcggagctttccgccctgggcaaactgcgcagcacccgttcggtcaagatccgatagaggcgctcgaaccacacctcgttgttgtcgcgacggctcgcgcgaatgaagtaaacgagacattcgctcgggacgtagcccgggtccgagcgcttggtgatttccgccctggcgatcaagccatcacgcggcaggactgccaattcggcgatgagggcttctatcttcgggtcgcgctcgtagagttcgccgctgaggcggcgtttgcgcagcggggttacgatcgcttcgcccgcgccacgcgcgtctgccttttgcccggtgtcgaaagctccctccaactggttcatcgcgcggccccgcctcccgtatcgcccttcttgttgagacgcgtctcgagcgagccgatgctgtcgagcaccgcctcgaaatccggtggatcgccaaagatcatgccctgcatggccctgtagtcgacgcgcagttgctcgatcatcgcgtcatgcggggcgagtgcaaacgagccaggcgcagcgctcgcgagatcgaagtccggtcgattgaagaacatccgggcgtgcgcgacgcaatccgcaccgagcgccggatcagcgatggcggcggcgccgacgcgggccgcggcgagctggtgcaggtcataatagtgacgggaaacgcgttggccgcccccgcgcagctcgccgcgcttgtcgaaccagcgccgcagcccatggaggatgacaaccttgtcccagaaggtacgttccggatcgaccgtgcggacggccggcacggtcaggtcgagcgccggcagatcatcatcgacatagggtttgatcggcacttcgctgttcggatcgagcgcggatttcgcgcccgactcgatcttgatcgctgcccgcacataatccgatcgcggcgtcgccgcgggataccagatcagaagcgtctgcccgtcgggatcagcgtcatcggcttccactcgggccgcgccggcatcgaggccggcagcctgaagccggtcctgcaggatctgcgtcaactcagcccgcagcgggccgttgatgtaggcttggcaggcgtccttgatcgcatcgaggcgcgcccggcgctttttgctactcagcgcttcgagctcctcgatggtcgccggctcgccgatgtcgtcccgaaacaccgtgacatcaatgtcttcggagaagcgattgatcaaaccaaaccctttggacagggaggttccacctttgaagaggaggcggggtccgccctctttcaagccattgaacaaggcatccagcgtccagcagacccagaagtccttctcgatattctgagacgccgtgccgaggcgtagcgccgtcgtatcgaaggcgctcaacatcgcgtccgacccggccgcgagaacctcgtcgaaagccggattcatgtcttcaccgcccgggctgcaccgcgcttggcagtttgtgccttctgcggggagagcggctttcgcttgggccgggcgacggcagcatgacgctgatcatcggcatcgtccgccgttctttgttgatgacgatcatgatcagcatcatcacgatcatcatcgacgtgccgacgacgaacgccggcgtcgctttcaacgagcggcttgagaaacacccacatccatgtcggaagagctgtcataccggcagtgagatccgctttgaggggcggtcccaccgtgggatcttcgaaaagattggcgagcttgcgcctaacctgatcactttctccttcacgaaccaggagatcgcgcagccagtgaagcgcttggacgacgcgcatcgctggtcgtccggcccagaatagcttgctggccgcggttggacggaaggtgatcgttacgttgccgagcttgatcgcgcggcgccgagcgtcgctgtgcaccacgattttggcggggacggcgtcagttaggcccagatcgttcgccgcggtcatgccgtcgacaagcatccgggtttggtcacgtcgcccgacggcgtcgatgactgagcgcggatcaggcggattgggtttctgggtgagtttgttgaagccaggctgatcgtagagcccacgatcaatccgcctaaggatttcgaccttcgtcagccgctgcaacgccttatcgaccgcgtcccgcgaggcgagatcgacgaagtcactgggcgtccagaccttgcgtggcgcatccgcacggatgcgctcgagcatggctttcttcagatcgggcgagtcggtgttcatgtccgaaaattgtagtcctttttcggacgcgaaccaagtggattgtccgaaataaatatacaaatttcggacaatctaaataggtaggccgcccacctgagaatggctccttcggccgtatgcaactttgccgaccgtcctggcgagccagctcggtagctggggcgcgaccgcgacgagttcgccgaacgtggaagacggcaacttgcgcttcaacgtcatcaaggcggcttctgccttttccggccccagccaggcgagcgctcgcaccgcctgtccggcgggccgatcggccagcgccaactgccagcgcggcgcatgccgcagctcgacgacctgctggcccagattcatcgtccggctacggcccgatgtcagatagaccgaccggaccggcacctgtgtcgtgaggccgagcgcgttagcggccgcggcaccgttcgacacgatggtttcgccgcgctggagcgcgagggcttcgacggccttctcgacggagggcgcgcggacgccgaaccgactcgaaaccgggcgcagatagacgccgcgcccggcacgcatcagccggccacgttcagccagtcgcgacaaggcttgatccaccgcggcgcgattgccgagatggagcaggctcttcgccgcgatcggagcgccctcgggcaagccctcggtgtgcgccagaatctgttcggtcagtcgttgcacggcacttctcctgtcagaaatatatgcggttttctgacagttttcaatctcccccaaaccgactggaagggccagcgattgagagggggcctggaggggaaagccttcccctgcggccgagcccagggtctcggccgaccccttctgcggggagaccccgcaacgccctcattagagtgagagtgtggaccggatttccgtgacgggttgagggtcgggagagagtcttccggcgcccgtcatggagtttgatcccatgaacatgcaggttctcgatgcccggcgcgacgtgagtggcggctggaaggtggacatcaaccgcggcgagcgcatcggtcgggtttcctcggagtggttctcgcgacccgacgacgagcgctatctctcgctcgccgaactcggccggaccgtccgcgagcgcaccgagcgcagccgaacgcgcgttgtcgaatccgcgcttatccatgtcgaagccagccgcaccgatcccgaacggcttgccctgatcctaccaggcgccgacaagcccatcgctccgacgcactggagtttcggtcagctcgcgagccaggtcggcgcgccggccgcctatctgcggcagctccccgccgcgctcgccggcatcaacctgcaatatgggctgaccgcccaccgcgccgagcagatcaagaccctcgagaccgacgacggccgcgtcgagctgcgcgccgtgaccggccccgactacggccggatctacgaccacgagctggtcgaagccgtgcagcgcatcgccggcaacggcaccggcgacacccgttggaaagtgcccggtgtcctcgactggtcgaccggcgtctataatccgcgcgtcgacatcaccaaggacaccacgacgctctacgcttccgatcgcgacgtcttccttttcctcgtcgacgatctgaatccgatcgaagccggcaagctcgcggatggatcgcccgatctctatttcaggggcttctatgcctggaacagcgaagtgggcgccaagacccttggtatcgcgtccttctatctcagggccgtgtgccagaatcgcaatttgtggggcgtcgaagatttcgaggagatctccatccgccattccaaatacgccgcttcgcgcttcgcccatgaggcggcgccggccttgctcagcttcgcggactcctcaccgcagccgttcatcaccggcatcaaggcggcgcgcgaacgcatcgtcgcgcacaaggacgaagagcgcaccgaattcctgcgccgccgcggcttctcgaaagccgagacgggcaaaatcatcgacgcggtgctggccgaggaaggccgcccgccggaaagcatcttcgatttcgtccagggcatcaccgccgtcgcgcgcgacaagccccaccaggacgcgcggctcgagctcgaaggcaaggccaagaagctgctcgatcgcgccgcctgatccccgcaatgccggagatgcggttgtccgtgtctccggctttgcgtcccctagccatactgtttccgggctgtcttgtggcccagatccaggtcacctattcagtggtgcggcatggagcacaatcgccaaacgagcgactggatacagaatgctagagcaggcgcctgcggaatattacatcgatgaaagcggcaataccggcgacctgagcacggtcaaaatcgactcctacttcgtcgaacagcgcatgttcgccttggctgcattcggctgcacgctcgaccaggacttcaccgataaattgggcgcactaaaaaaggcgcaccgcatccagtcgtcggagctcaaatcaaaacaggcttatgacaagccgcgcttcatctttgatcttctggacctccttgagacgcgccgcgccccaatctttatcgagcttgtcgacaagcacttcttcgttgtcgtgaacatcatcgagcgaatggtggtgccctatgtgggggaatgcgacactcaacctggcgccctttggatgaagggcgttatggcgaactacatggcgctatatgcacctcccgagctggctcacgcctttgccgcatgttgccaaagcagagaccacgcggaaatacgcgaactttacaagcaaataattcggtgggcgcagggaagcggagttccgcctactgacgtggcggcggggatcatccgttttgcgcgcgacagcttgaaggacttccgcaagctgccgaaagccaaggccgtcgagcgggcattaccgattcccgacaagaatcccgccgggaagctgctctgggttctgccgaacctgacatcgttcaccaacatctacgcccggatcaatcgcttcgcgcgaaagcaggtttccggcgtgacgctgttccacgacgagcaattgcagttcggagacattcttctgcacaacaagaagctcgcagaggacctggcgcagcttggcgtgaaattgcccctgcagacggccgacttcgaattctcgcaggcggccgacctgcaattccagcgatcgcacgattctatcggcattcaggtcgccgacgtcctcgccggtttcatcgcgcgatatgtacaggacgctgtgtggggcggcgcccccatgcatcctgacaaggtagcgattttccgccgcctcgtcgcaacaggcgaccgcagcttgggttcgggtgtcaacttcgtcgcgcccgacaacatgatccgcttcctcggcatcgaaccgcgctcgaatttctagggcggcatcaagccgtcatgggcgaatacgaaggactggcgcgggatcatcgccggttctggcagtgaccttaccgatggcgtttgatggtgtcgctgccctcctagagtgagagggcggtgcttcgcttcgtgacgggtttagggtcgagagagaggctttcggcgcccgtcgcggagtaagtctcatggcaactgccattcagaagatcaccctgtcgtcggcgcaggacatccccttcaacaagctggtgctgagccagtcgaacgtccgccgcgtcaaggctggcgtctcgatcgacgagctggccgagtcgatcacccggcgcggtctcatccagtccctccacgtccggccggtgctcgatgccgacggccaggaaaccggcatgtacgaagtgccggcgggcgggcgtcgcttccgcgcgctgcagctcctcgtcaagcagaagcgcctcaccaagacctccaaggtgccgtgcgtggtgtcggacgccaatgccgacatcctcgtcgacgaggtgtcgctggccgagaatatcgaacgcgccccgctgcatcctctcgaccagttccgcgcgttccaggcgatgcgcgagaagggcatgaccgaggaggcgattgcggctgcattcttcgcgtccgtccaggtcgtgaagcagcggcttcgcctcgcggccgtctcgccgtcattgctcgatatctatgccgaggacggcatcacgctcgaacagctcatggccttcaccgtcaccaacgatcatgcgcgtcaggagcaggtctgggagtcggttcgcaatagctggcagagggaaccctaccagatccggcgcatgctgaccgagaccgccgtccgcgcatccgacaagcgggccgtattcgtcggcatcgatgcctatgaaaccaacggcggctgcgtgctgcgcgatctcttccaggatgacgacggcggctggctgcaggatcctgcgctgctcgatcgcctggtcgccgacaagctgaaagcctccgccgaagcgatcgccggcgaaggctggaaatggatcgaggtggcgatgagcttcccctatggcgccacccacggcctgcgcgagatcgtgggcacgccgctcgacctgacggctgacgaacaggcgaccatcgaggcgctcaacgccgagtgcgccaagctggaggccgaatatgagaacgccgacgagttgccggacgagatcgatcagcgccttggcgaaatcgaaaccgcgctcgccagcttcgacgagcggccggtccactacgaacccgccgacatcgcgatcgccggggtcttcgtcagcctggacgccgacggcacgctgtcgatcgaccgcggctatgtccgacccgaggacgagatcgccaaccaggcgggcgatggcgagggtgaagagcaggatggcggcgacgatgacgctgactatccggcgtcgccttcggtccagcgcgcggtcatcaccatctgcggcaaacctgccgagcccgaggaggaggacgaggacgacacgatcaagccgctccccgatcgactgatcacggagctgaccgccgatcgcaccctcgcgctccgcgacaagctcgccaccgatccctcggtcgccttcgtcgccgtcctgcacaagttctgccaggacgtgttctacggcggcagccagtacggcttcgcgatggaggtcagcgtgcggggcacgaccttccattcgcagcccgaagggcttcgtgacagcgtctatgccaaggcgatcgaggcccggcacgatagctggcgcaaacggctcccggccaaagtcgctgatctctgggatgggctggccgcactgactggccccgaacaggccgaactcttcgcccattgcgcttcgttcggcgtcaatgcgctttatgagcgggccgatcgctacggtggccgtgtctcggcgcatagtgtcgaacagcgcatcgccgaagccgatcgcctgtcgctggcggtcgggctcgacatggccgaagccgggtggcggccgaccgtcgccaactatctcggccgcgtcaccaagccccgcatcctcgaagcggtgcgtgaaggcgccggcgagcgcgccgcccaactcatcgcacatctgaagaagggcgacatggcgaccgaagccgaacgtctcctcgccgagacgggctggctgcccgaaccgctgcgcaattccggcgccgatgccgaaagcaccgaggcggactctggcgagggcgacgaggcgttgccggacttcctcgacggcgatgacgaggagaccaacaccgatgatgaggaggaacggcacctcgccgccgcggagtgacggcggtcctcatctgacttgacgagcccggcgtcccttcgggggcgtcgggcttttttcatgcgcgccgatcgagagggagagtttggcccggacgtggcgagccggacatggaggagagagcgcctgccggctctcccgttccctgctctccgggagtggcctcatggccgactatttcacccatttctcatgcctgctcgatgtcggcacgcccgagaccgcagcccgcgcgctcgatctctacaaccaactgtccgaggacggagcatccgaggaaccgccgtccgatggcttcctcctgtccatccagcccgagcatggcggctccaaactctggatgcgcgacgatgtcaccggcgatcccgaacggctgatccagttcgtcatacgctgcgccgccgaattccacctcaccggccgatggggctttcagtacgccaacacctgctcccggccgcgtctcgatggcttcggtggcggcgcgcatgtcctcgatctcgcgaccggcgaaactgtggcgtggatctataccaacggttggctcgccgaggtgatcgatggcggcgatggtgcctgacatcatcgagaccattgtctgtcgcttgatggcgcggccgggccgcgccccttgagagcgagaggaaggccgggacgggtttgagcccgtccggtccgagagagagcgccggcgggctttcccgctccgctctcccgaggacgtctcccatgaatgctcacacccttgcggcggcgctgccgaccgccgccgatcagccgaccgacgctgccgccatccatgccgcggcacttctcctccttcctcacatcgagcgcggcgagcgcatcgacgccgcggtcttgcgcaccgccatggagaccgccttcggcgcgtccgatactgccggcgcctgggactggaaggacgcctatgacgcctgcgaagccgcaaccgtcctcatgctccgcaaatacggaaaggcgcttttgcgcaaagccgggtctccggctgcggcggttcctctgttcggcaagatcgcgggacttctgcccacccacacgcgccgctccgaggaggcgcaggccttccagcaattctcgacgccgatcccgctcggcctggccgcgatcactgcggccgccatcacacccgccgatcgcgtgctcgaaccatcggccggcaccggcctgctcgccatcctcgccgagatcgccggcggcacgcttgtcctcaacgaactcgccgaaacccgggccgcactcatctcctccctctttccggccattcccgtgacccgcttcgacgcagcccagatcgacgatcatctcgacccggcgaccgtcccaacaatcgtggtgatgaacccgccattctcggtcctcgccaatgtcgaggggcgtgtcgccgacgcagcctatcgccatctcgcatccgcgctcgcgcggctcgccgatggcgggcgcctggtcgcgatcaccggcgcgaatttcggccccgacataccggcctggcgcgacgccttcgtccgcctgcaggagaggggccgcgtcgtgttcaccgccgccgtccatggctcagtctatgccaagcacggcacgaccgtcgaaacccggctgaccgtgatcgacaagatcccggccgacgagccatccgcatttccggcgtcccccggcaccgctcccgacatcgccacgctgatgacgtggatcgccgagcatgtgccgccgcgcctggctgtcgcgcctgctgttcaggtcatgccgaccggcgccacgccgcgcaccgttcgcggctatctcgcgcgcaccgcggcgacatcggcgacccgcgtgggcctcgccgatcccgagggcgtgccgctcgcctatgagcccgtcgactggcccccggccgagggcgcccgcctcagcgacgcgatctacgagcaatacggattgcagacgatccgtattcccggctctcaggcccatcccaccaagctcgtgcaatccgccgccatggcctcggtcgccccgcccaagccgagctatcggccgacgctgccagcgaccatcatggactcgctctcagactcccagctcgaaaccctgatcttcgcgggcgaagcccattccgattttctcgcaggttcctggaccatcgacgacactttcgatgtcgtggcggccgccgccgatgatgcaaacggcgtcgtccgcttccgccgcggcttcttcatcggcgacggcaccggcgtcggaaaggggcgcgagtcggccagcatcgtgctcgacaactggatgcagggccggcgcaaggcggtctggatctccaaatccgacaagctgattgaggatgcgcagcgcgactggtccgcactcggcatggagcgcctgctggtcacgccgctctcgcgcttcccgcggggcaagccgatcgctctgccggaaggcgtcctatttacaacctatgccacgctgcgttccgacgaccgcggcgagaaggtttcgcgggtcaagcagatcgtcgaatggttgggctccgatttcgacggagtgatcattttcgacgaggcgcacgcgatgcagaacgctggcggcggcaagggagaacggggcgatgtcacgccctcgcagcaagggcgcgcggggcttcgcctgcagcacgccttgcccaatgcccgcgtcgtctatgtctccgccaccggcgccaccacggtccagaaccttgcctacgcgcagcgcctcggtctgtggggtggcgacgattttcccttctcgacccgcgccgagtttgtcgaggcgatcgaggccggcggcgtcgcggcgatggaggtgcttgcccgcgaccttcgcgcgctcggcctctacaccgcccgatcgctgtcgttcgacggcgtcgaatatgagctggtcgagcacgagctgaccgccgagcagcggcgcatctacgatgcttatgccggcgccttcgccatcatccacaaccatctcgatgcggccatgcaggcggccaacatcaccggctcgaccgggacgttgaaccgccaggccaaatccgccgcgcgctccgccttcgaaagcgccaagcagcgtttcttcggtcatctgctaacatcgatgaagacgccgacgttgatccgctcgatcgcggcggacctggaggccgggcattccgcggtcatccagatcgtctcgaccggcgaggcgctgatggaacggcgcttggccgaagttccgaccgaggagtggaatgacattcgcgtcgacatcacgccccgcgaatatgtcctcgattatctcgcccattccttcccggtgcagctctacgagcccttcagcgacggcgagggcaatatgtcctcgcgtccggtctttcgcgacggccagccggtcgagagccgcgaggcggtcgcccgccgcaccgagctgatcgagaaactcgcgagccttccgccggtgccgggcgcgctcgaccagatcgtccagcatttcggcgcggacgtggtggccgaagtcaccggccgctcgcgtcgtatcgtgcgcaagggacagcgccttgtggtcgagacccgcgcggcgtccgccaatctcgccgagacccaggccttcatggacgacatgaagcgcgtgctcgtgttcagcgatgccggcggtacgggccgcagctaccatgcggagctgtcggcacggaacacgcggcttcgcgtccactatctgcttgagccgggctggaaagccgacgccgcgatccaaggcctcggccgcacccaccgcaccaaccaggcgcagccgccgctcttccgtccgatcgcgaccaatgtgaaggcggagaagcgcttcctatcgaccatcgcgcgccggctcgacacgctgggcgcgatcacgcgcggacagcgccagaccggcggccagggcctgttccgacccgaggacaatctggagagccactatgcgcgcgatgcgcttcgccagctctacatcctgatcgtccgcggcaagatcgaagggtgctcgctccagcggttcgaggacacgaccggcctgaagctgatggacgacaacggcatcaaggacgagctcccgccgatcacaacctttctcaaccgcctgctcgcgctcaccatcgacctgcaggacgtcctgttcgccgccttcgagcagcttctgaccgccaaggtcgagggcgcgatcgccgccggcatctacgacatcggactggagacgctgcgcgcggagagcttcgtcgtcaccgatcgccagaccatctacacccatcccggcaccggcgcggaaaccagcctgctgaccatccaacagcgcgagcgcaaccggccgatgaccgccgaggaggcgatggcttggctcgacgatccggtcgccaagttgctggtcaacgagcgctcccaccgcgccgcggttcagcttccagcgccttcgctgatgctcgacgacggggagatcgaacgccgcgtgcggctgatccggccgatggagcagcatcacgcctccatccgcatgatggacgaaagccattggatcgccgccagtcgcgccgagttcaccgccgcctggaacgccgagatcgcggaggtgccagcctattccgattccacgatccacatcgtcgctggcctgctgctgccgatctggaagcggctgcccaacgagtcgagccgtgtctatcggctccagaccgatgacggggaacggatcatcggccgccgcgtgtcgcccgcatgggtcgccaacgccacgacagtcggaacgacgaacctgtccgccgaccatgcctatgccgcgctcatcgagggcaagacaatcctcgatctcgccgaaggcctccaactccgtcgcgtgcgcgtcatgggcgccgatcgcatcgaactctccggcttcaccgacgcgatgcgcgagcgcctgcgcgcctttggcctcttcagcgagatcatctcgtggaagctccgcttcttcgtgcccgtcggcgcggacggcgcgaccatcatcggcaagctgatcggcacctacccgatccagcgcgtcggcgagcgggaggcagcgtgatggcccgtctcgacgcatccgatctcgcgcaacgtctcggccgacaggccgaggcggtgtgccgccattatctcagcaatggccaccgtcagggcaactactggcaggtgggcgacgcccgtaacactaagggccgctcgatgtacgtccggctcaaggactcgcccaaaggccccgccgggaaatggactgacgccgctaccggcgagcatggagacctcctcgacgtcatccgcgagagctgcggcctcatcgacttcaaggatgtcgccgacgaggctcggctcttcctcagcatgccaccaccagcgccggaaccctccgccttccagccgctggcgcccgcaccacatggatcgcccgaagccgcacggcgcctcatccgcatgtcgcagccgattgcgggcacaatcgtcgcggcgtatctccggcaacgcggcattacggatctccgtggagccggaaatctgtatttccacccgcactgctattatcgcccggacgagcatgcgccgaccgagacttggccggccatgatcgccgctgtcactgacctcgacggcatgatcaccggggcgcatcgcacctggctcgactcacgacgccacgacaaggcgccattcgaaaccccgcgccgggcgatgggcgatctcctcggcaacgcggtccgctttggcgctggtggcgaagtgatggcagccggcgaaggcatcgagacggtcctttcaatccgccaggtcgtgcccaacatgccgatggtggcggcgctctccgcggcacatctcgccgccatcctgttcccggacacgctgcggcggctctacatcctgcgcgatgacgatccggcaggcgatggtgcgcgtgacagcctgatcgaacgggcgaacgcggccgggatcgaggcgatcgtgatctctccacagctcggggacttcaacgaggatctccgcaccctcggcatcgcgacattgcgcagtcagactcgggtacagctcgggccgcaggacgtcgcacgcttcatggcgctggcggcatagccggtaaggaagcggcagcggccccgccgccgtactcgctcagacgcagcggatcggagaggaccgcgcctcggccttcgagagggcgatcggcccacaggcaggccggcccggcaatggctgcggccgactattttccggcgcggccccaaggggccgctttccatcgcgaaacaaaatagccggcctccgccatcctccgctgacgctccggccctcgctcgcgctccgggtgcagggccgccccgccggtgtgcttcgtcgccatgaaggccgcgacggtcgcggtccatccgacggagcatccgatgcgcgatctcgacgactacgaaccgcaccacgaatcctcaccgactgaccacgtcctcaacgaattgcagctccacggctaccggcctttcgccgacgaacccgatcagcggcttctgccggacggcaacgcggtcgcgggcgcggtcgccgacatcttcgacgccctgatcgtgaccctggaggacacgcgcctcgaacccgacctcgacgatctcctctggtcgaccgtgaacgtctttcatcgcgccgccgaacggatcaaccgcgagctcgacgacaacgagcaggcccaaaagcgctcccaacgcgaacaggacggcagcgaggtgaagtcggtcgatctcgagcgcctgatcgccgagggcaagacacaggtcgaacgccagaccgccttcgaactgatgcgcgaccaggccgccgagcactacgaacgccaggtcggcaaagcctggctcccgcggtcaggatcgaaggtcaatcatcgcaacctcacctcggcgatgatcgacagccgcgacttcatcatggcgaagaagcgtgccgagcaggaagtgctcctgccgcctggaccgaagatcgccgtcaccggcgggctcgatttcgacaaccatcacctcatctgggccaagctcgaccaggttcacgagaagcaccccgacatggtgctgatccacggcaagtcgccgaagggtgccgagaagatcgcttctctctgggccaggaatcgcaatgtcccacagatcggctttgcacccgactggacgaagcacggccgggcagcacccttcaaacgcaatgacgagatgctgcaaatcctgccgaagggcgtgctgcacttccccggcaccggcatcaatgacaacctcgccgacaaagccaagaagctcggcatcccggtgtggaaattcggcggcgcgtaagcgccgccgcatcgggcacctgctaaacggccaagcctatggcataacgcaacgaatgcagcgactgaagccactcccgaaaccggcacgttcggacgccgttctcgctgcggttttcctggagaatgccaccgtgaaggctgcagccgccgaatgggcggcggatcaaggattcgacaatcaagcccttcatgcgattgcaattgccatcgaactcctcctcaaatcctatctgcttaacgtcgcgaccgatgatgtttggaaccgcgcgaacatcgggcacgatctcgccaaggcactccattattcggctcaagccggcttggtgcctccttcacgcatcgagtggattatcagccacctccatccgcattttcagcgtggcgggtttcagcgcgagccgtcgaggaaatggccaccaggctttgcggatgacgcaggtgaggtcgcacggcagctcgcgcagacagtacggcttcaccaacgtcacggccacatcgactcggcttccagcccggagaagaccactccccgctgaatggcgctggtccttggtccagccgatggcctgacgccatcaacccgtaaagggtcggactacgcatagcgtgccgccgcgccggcgttgcctgcgcggtgattgcggccatcggccgaacacatcgggcgcctgtcagcggggggatggtcctccgctcgaaacaggagccggatcgatgtccttccccgacgcacacgccttcgccttcagcctcgccaccacgctgatggccgtcatcgtcatcttccgcgcgggcgacggcactctctcggtgacacccgcaaacgaatacgacggcgacgtctcggagatcgtccacgaggtcgatcccttcgcgccatgacggcgcgccacccttccaggcgacgcggagacccctgcggtttccgctcccgacggagcacagcttttgctatgctcccgaatgcgccgtggtggtggtggaaggcgcgaccgtcagaatttgctctttcggagacaccaccatgattatcctcggcattgtcctatccttcgcagccatcggcatcttgtgctggttgctgttcacgctcgcggtgttcgcactgccattcttcgcgggcgtgaccgccggcacctgggcctatgacactggcgcgggctggctcggcgccatccttatcggcatgctcggcgccggcctgacgttgggcgtggggcagctcttgcttggaattgtccgcccgctctgggcacgcctgctgatcgcgctggcatttgtcgcacccgcggcgatcgccggcttccacgccacgcatggcatcgtgaaacacaccatgccgtcggagacctggcagctcgtgttctccgtcatcggtgcggtcgcggtcggcgtcaccgcgttcgcgcgcgtcgctgggatggcaagcaccggcccgtccagccagggcattgcaccagcctgacaccacgacggaaccgtcgccgggacgaccagtcgggggtttcagccctcagcgttgtgcagttggagagggagccgcgtcaccggaacctgactgaagcccatcgtgcggccgcctcaacagcgcccggatttctgctcggcgcctctgtgcgcgggaacggtgcaacacgaagtcgagggcgtcatctccactggccgacttcgaaacgaaagctcgaccctcgcctgtacaaggggaggacgggtcgcagatgatcttcagcttgcgccgtctgctggttgcgaccgggtcgccatgatcttccgttcctgattgtctccagaccgctccgaacggcctctccaatggcctgatctgaccgaaggacggctgcgcctcgaccgcctatgccgcaacggcgcgtcccgactttcttcccctgccggccaaggccgtcattcctcgcgaaacaacaaagtcgttcctgccatcctccgcgttgctccggtcgcaagcgatgcggcgtcggtcgcctccggcctgtcgatcgccatcgaggccgcaatggagcggtcccgaaaacgaaacggagacttacaatggcgaccatcggcaccttcaagaagaccggctcgaacgagttcaccggcgaaatcgtaaccctcagcgtccaagccaagggcgtgcgcatcgtccccgacacccgcgccaccggcgagaacgcccccagccaccgggttctggtcggccgcgcggaaatcggcgccgcctggtccaagcgctccaacgagggccgcgactatctgggcctcaagctcgacgatccgagcttcaacgcccccatctacgccaacctcttcgacgacgaggacggcgacacccactcgctgatctggtcccgcccgacccgccgcggcgactgagccccgagcaaggccccggccgaacaggccggggcctttccactgctagcgcgaatcacttcggccgcccggcgagggcaccgccagccctgagacgccgattaccctcgcaatgggcgcaaagaacgactattatagtcgtagttctggcaagcgtgtgtccgtcggtgggaggtgatcatgcatgatcaccgcccgacaatcgcgggccgcacgcgcgttgctggggtggacacaggagacgctcgctgacaaggcccggacatcgctaaccgcgctcaagcgccttgagtccgaaagtggattagaggtgtacgagtcgacgcgcgatcaggtgcgaagggcgcttgaaacagccggtatcgtcctgctttccaccgacaagggcgaaggagtgctgctgctccatgagcgggacgaccggccgacgaggcgttagcagcgccgtgatcgcgtggcgcacaccatccatcgcacgttgtcacagtaatgccgggcacgagtgttaacgaatgctttccgcgcgaatatagtcgcctgatggaatccgcgatgccgccgtttctcgatgcgcctccgatcagccagaccctcacggcctatgaccgcgagcatatggttctctatctgcgcctgctcgattcctcgcgcgacggagctgattggcgcgaagccgtccagattctctttggcctcgatacggcacgtgagccgcagcggtgccgccaggtccatgacacgcatctcgcccgcgcgcagtggatgaccgagcacggctatcgagacttggtccgctccgcacagtgatcgccgcgatgccgtttcggcaccaccctttgccggccctctgacttccactgaacaacccagccgggaatcctgactctcccacaaattcaaagactagggaggatcgcgatgacaccagatgcttccggctggcgttcatcggaacgctatgcgcacgtcgccgacatgaccgcgtccgacgtcgcgtgggaatggctgcgccgcaacgaaacctacgacagggattttcaagcgctcggcgacagcgaaagtgatctgcgcacgctgaccgacgggatcgggcagcggtgggggttgcgatttccccgtagacccgatgcaggcacctcccgaagcgcaggtgatctggcttccccaggaagacacaagcgccatcgttcttggcccacctccggatattccgtccgcaagcgctgatccccaaccgacgatcgacgccgccgtaagcgtcgatgtcggcagcgagacccatctggttctcgatctcggaaacggtcagcgcgtagcgcttgttcatccgtccgagacacgacccgccaaatctcttggcgccttcatcccgctcggcctggaaggcttcgaccggctccaatcggtcgcccgcttgctctccgccctccatggccgcgccataccgcccgacacccgactgacacggcagcaacgtgctcggctgtgccggatgctgcaggccttcgacggtcatcgcgcgggcgcgacccagcaagaaattgcgcaggtcatatttcggatcggcgctctcggtcgcgacgactggcaggcatcttccgcccgccacgccaccaaagccctgcttcgagatgcccgcgcgatgatggtgggtgggtatcgcacgttgcttcgtcatcggcggcaactttagccgatctccatccgactcttggtgggcgaatttaggcccccctgaattcgccctgcatctcgccggccctgcttcgccaacgtggccttcgttacccgccgcttcccggcggccccaacgaacccacggaggccctcccatgcgacctgatctcgccgttctcccgccgcgctacctgcgcaccaaggaagccgccgaattcctcagcctatcggcccgcaccctcgaaaagcatcggacttacggaacgggtccggcctatcgcaagctcggcggtcgcgtcgtttatgcggtcgacgatcttgaggcctgggccgagcgcggcgccgtcacctccacctccgatccgcgcggcagcgtgcttccggccaagcgccatacgcctgcgccgccggcacatgccggacgatacgcgcgctgatcgcccccggattcccgaatggcggcgcgacaccagtccctctcggagcgcgggcagctcgatctgttccgtgcgctccccggcgagttcgcagcacgagacgcacaggatctcatggcctatccgtttttctccctctccaaatcgcaccgcgtcgcgccgatcgacttcgccgccggcaatgtgtcgatccgcgtcgaggccgtgcccgatcacggcatggcgaccatttgggacgccgacatcctgatctgggcggcgagccagatcgtcgaggcgcgtgacgccggcctgcgcacgtcgcgcctgatggtcgccacgccctatgaaattctcaaattcatcggccgcggcacgtccttacgcgactatcagcgcttgaaggccgcgctcgatcgtctgcaatccacgacggtctgcacctcgatccgccaatccgccgagggccggcgtcatcgcttctcgtggatcaacgagtggaaggagcgcaccaaccgcaacggcaagccggacgggatcgagatgatcgtcccggactggttttatcaggccgttctcgacgatgcgctcgtgctgacgatcgaccgggcctatttcgatctcacaggcgggctcgatcgctggctctatcgcctggtgcgcaagcacggcgggcgccagcgcaatggctggcgattcgactttcgccacctccaccagaaatccggcgcgttgtcaccgtacaaacgcttcgccttcgagctgcgcgacatcatccgtcgccagccgcttcccggctacacgctgttcctcgagatcgaggccggcggccgaacgttgctcgctttcgagcggacgccgccctgtggaaaagctgtgaaaggcttcgtgccatcgggaacccgaaagcgcgtgccatcaggaaccggcccctcgtgccaacgggaaccgaaacacggcctaacccacgacagcagaaccgaaaatcgcctcgctaacttagaatctaacagagaatctaactttgaagagcgcgcgcgagaggtggaaaacctcgtccggcaggccgcgaacgcgctaagcgccgctggcaagcggcgcaccagcagcgccgctcttaccaacgctggcgcggcgagaaacgggacctccggccctccgcagcttcccttcggtccacgcccgggaggccgccgatgatcgtggccttcctcaaccagaagggcggcgtcggcaagacgacgctggcgctgcacctagccggcgaatgggccggtaggggaaagcgggtcacgctcgtcgatgcggacccccagggttcggcgctcgactggtcgcagcaacgcgcccgcgagcacgcgccgcgcctgttcggcgtcgtcggcctggcgcgcgacacgctccaccgtgaggcgcccgagctggcgcgcgatgtcgatcatgtggtgatcgacgggccgccgcgcgtcgccgggctgatgcgatccgcgctgctcgccgccgacctcgtgctgatccccgtgcagccgtcgccgctcgatggttgggcctcggccgagatgctggcgctcctgtcggaggcgcgcatctatcggccggagcttcgcgctcgcttcgtcctcaatcgctgcggcgcgcgcaccgtgatcgcccgcgagacggccgagacgctcgccgaccacgatccgccagtgctgcgcacggcgatcggacagcgcgtcatctacgccgacgccgcgcaatcgggccggctcgctttcgagatcgacgacgacggacccgccgcgcgcgagatcgcggcgctcgtcaccgagctcgaaaggatctcaccatgagcgagcgatccgaacggcgcggctttgcggcacgtccgaccaatcaagaggcctggatcaaggccgcagatgccaccgcgccgcgcgcgccggacgatgaagccttcaccgcccgcatgacgatcgacgtcacgcccgccttacgtggacggatcaagatcgctgccttccggcgcggcgttaccgttgccgacatgctgcgcgagatgctcgcgcgcgaattcccacacatcgaaggagaccccacatgaccggcgccgcggccccccgcgcgcgcggcggcccgacgccgaccgcacgccaccaagacaatctcacccatgtcgaactgacctgggttgagaagaagatcgagaactggatccgcttcggcacgcacgcccacgaacagattctcgatcgccgtcggcgtgtcctgtcttttcgccccggcgcggtcttcgccttcgtgcgctgggcctcgaatgacttcggaacgatcatctcgcgcatcgacgtcgtgcgctcggttgcgcgcggcgagacgtaccagacgctgcctttcgttcgtcctggcggcgaaatcctgctgaaggtcgagagctggcccagggtcgagcgcgtgctgcaggcgatcgacgccatcgagcgcatcggcatcgatcccgaagcggtttcgcccgatcattggcgtcacgtccacaaccggctcgctgctggacacgagccgcgcacctacacgctcgaccatcatcgcgcattcctgctgcgccgaaaggccgagtcgtgagccgcgccggacttctcctggcgacgacgctcgccgcgctcagcgtcggctatcccggcctcacgccgatgcccatcaagctgatctggaacgcatcggcgagcgcgcccatcgggttctattcgatcgacttcgacgggccgctcgacgttaccgatctcgttgcggtcgatgcgcccgagccgctcgcgacattcctcgccgagcgcggctacctgcccaagggcgtgccgctgatgaagcgcatcctcgccgtctccgggcagaccgtttgccgttcgaacctcactatcaccgtcgatggtgtggaggtcggtgcggcactggagcgcgatcgcgcaggccgcgatcttcccgtctggcaaggctgccgccgggtccagactggcgaagtcttcctcatgaactggcaggtccgcgacagcctcgacggccgctacttcggcctgatctcgaccgaccagatcatcggccgtgccgtcccactgtggaccgatgaagacggcaccggccgcttcgaatggcgtgcgccgacacgctgaccgccttcccattcggcgggagcggtgctcgccgatggctgtcccaatccccaccgcgaaggagactgacatgccccagattggcgaattcacgcgcgacgagaccggcttcgtcgggcatctgacgacgctggttttgaaccaggacgtcataatcatcgcagccgaaccgaccgaggttgagaacgcaccgcagtatcgcgtgcatgtcttcgacggcatgaacaatgagccgggcgcggagatcggcgccggatggaaacgctccggagagaaggccggcgaatacgtcgcgctgctgatcgacgatccgacattcccgcacccgatccgcgccaacatgttccgcgacgacgatggcggctcggcctggtcgctgcattggtcgcgtccgcgcgatcgcggcgagaaggactgagcgatgcttggctctcgtcaaccgaggagccgttcgattgcgtccgggccgcgctgcgctgcccggcgcatggctctcctcctcctttccggccttagcctcgcgagcatcatgccggcgatcacgatggcgcaggacttgggcgccgatcgaccgtcgccacgcgatccctatggcgatcatatcgccgaggcttcgcggcgcttcggcgttccgatcgcatggatcagggcggtgatgcgtgccgaaagtgcaggcgatccacgcgccctttcgccgaagggcgcgatgggcctgatgcagatcatgccgcccacttgggcaggcttgcgccttcgccaccgtctcggcgctgatccttatgatccgcatgacaacatcatcgccggcgccggctacatccgcgagctgttcgatcgctacggatcgcccggctggatcgcggcctacaatgccggtcctggtcgttacgaggactcgctgaagggccgggcgctgcccgcggaaacgcgcgcctatgtcgccatcgtcgcgccgtcggtgaccagcggcgatgcgacttggccgatcgtggccgccgcggccgatgcactcgcctggacacgcgcgccgctgttcatcgcgcaagctgagcgcatatcgatacccgttcccgtaccggccgagcgcgcttccgatgccgcgatgacgacatcgtccgtgcgcgatgtttccgccatcgagccgcagtcgggcgggctgtttgtcccgcgttcgggccaaaggaatgcgccatgagcagcccggttcctgatcgcacgatagcgtgctcaagcgcgtcatggtgtgcgttgagggtagaggcaggcaacacgaccggacgatggcaggataaaaggccgcgaggtgcggcttgggtcggttgtggtttttcaataggttatgaggcgatttcgcgatgtgcgggatttccccgcacctcacgactacgccgattttcctgcgatttcctgtgcttggcgcgatgtgcgaggcatcagccatgaccggcgacagtgatttccgcatccggccgggccgcatccgctcgacccgtgcgcagcaggctcgtcccttcatcgcgcaggctctcgccgcggcgaagaaggccggggccggcgtctcacgctccggccggatcgtgtccggcaaccgctcgcgcttcgggcggggccagcgtgcgagcatccaggcgaaccggctgctcaccgcgcgaacgcgcggcgctgtcatcaaggcgcgcgtcgtgcgccagacatcgcgctcggcgccgctcgcgacccacctcaattatctgcgccgcgaaggcgtgacccgcgatggggagaaggcccatctcttcggtcccgggggcgacgacgccgatccgaaggcctttgcggaacggtgccaggacgaccgccaccatttccggttcatcgtctcgcccgacgatgcgcccgacatggccgacctgcggtccttcacccgcgatctcgtcacgcagatggaaaaggatctcgacacccgcctcgattgggtggcggtcgaccactggaacaccgagcatccccatgtccacctgatcgtgcgcggggtccgtgacgacgggcaggacctcgtcatctcacgcgactacatcaaggaaggaatgcgcgaccgcgcgcgtgacctcatcacgcaggaattagggccgcgcaccgacctcgacatccagcgcagcctgaaacgccaggtcgatgccgagcgcttcacgcagcttgaccgccagcttatccgcgatggccatgccacgggcgtcatcgagacggcgatcgatccgaacgtccggctcgacgaatttcatgcgctgaaggtcggacggctccgcaagctggaaacactcggcctcgccgagcaggtcggccccggtcaatgggcgatcgacacgaaggccgaggcgactctgcgtgaactcggcgagcgcggcgacatcatcaaacgcatgcaccgggctttgacggatcgcggcatcgaacgcggctcggcgggctatgtgctcgcggccgaaagcctcgatgcgcccgtgatcggccgattggtcgatcgcggtcttgatgacgagctgaagggctccgcctacgccgtggtcgacggcgtcgacggccgcacccatcacatcaagctgcccgatctcgaagccgccggtgacagcgcggcgggttcgatcgtcgagttgcgtgcgttcgatgatgcacagggacagcgccgggtcgcaatcgccgtccgctccgatctcgatatcgatcgtcaggtcacggcaaccggcgcgacttggctcgatcggcagaacatcgcgcgcgaacctgccgccctgtccgaggccggcttcggcgccgaggtacggcaggcgctggatcgacgcgcggatcatctggtcggacagggcttcggcgagcgacacggccagcgtgtcaccttcaatcgcgggctgatcgacacgctgcgccgtcgcgagctggaagcggccggcgaaaaactctccgccgaaacaggccagccgttcaatcgcgcgggaagcggcgagtatgttgccggcacctaccgccagcgtttggcactcgcctccggccgctttgccatgctggacgacggcctcggcttccaactcgtgccctggtcaccctctctggaaaagcacctcggcaagcatgtttccggcgtcgcccgcgatgatggcggcatcgactggagctttggccgcaaacgagggctcggcctctaacctctctccgaaaggaccgttccaatgtccgccacgaagatcctatggggccagatcctcaccgttttcctgatcgtcctcgccaccacttggggcgcaacggaatgggtggcttggcgattggcgttccagccggagttgggcgcgccgtggttcacgctgttcggctttcctttctatctgccaccctccttcttctggtggtggtacggcttcgacgcctacgcacccgcgatcttcgtcgaaggcgctttcatcgcggcgtccggtggcttcatctcgatcgccgtcgccatcggcatgtcggtctggcgtgcacgcgaggccaagaaggtcgagacctatggctcggcgcgttgggccgagaagaaggaggtggagacggccggccttctcggtcccgatggtgtcgtgctgggacgctacgagcacgcttatctgcgccatgatgggcctgaacatgttctgtgcttcgcgcccacccgaagcggcaagggtgttggcctcgttgtgccctcgctgttgacctggccgggctcggcgattgttcacgacatcaagggcgagaactggcagctcaccgccggcttccgcgccaggcacggccgcgtgctgctctttgacccgaccaacacaaaatccgctgcctacaatcctctgctcgaggtgcgccgcggcgaatgggaggttcgcgacgtccagaacatcgccgacatcctggtcgacccagaagggtcgttggacaagcggaaccattgggaaaagacgagccatgcgctgctagtcggcgcgatcctccacgtcctctatgcggaaaaggacaagactctggccggcgtcgcggcgttcctctctgatccgaagcgaccaattgaatccaccctcgatgcgatgatgaagacggcgcatctcggcgacgccggaccgcatcccgtgatcgccagcgccgcacgcgagctcctcaacaaatccgacaacgaacgctcaggcgtgctctctaccgccatgtcgttcctgggactctatcgcgatcccgtcgtcgccgaagtgacgcggcgctgtgactggcggatctccgatatcgtgggcggaaaatacccggcaacactctatctcgtcgtgccaccatccgacatcaaccgcaccaaaccgcttatccgactgatcctcaatcaaatcggccgacgcctgaccgaggatctgcaagcaaagggcgaacgccatcgtctcctgctgatgttggacgagtttccggcgctggggaggctcgacttctttgagtcagcactggccttcatggccggctacggtctgaagagcttcctgatcgcgcaatccctaaaccagatcgaaaaggcctacggggcgaacaattcgatcctcgacaattgccatgtgcgcgtcagcttcgcgaccaacgacgagcgtaccgccaagcgcgtttcggacgccctcggcaccgccaccgagatgaaggccatgaagaactatgccggccaccggctgtccccctggcttggccatctgatggtttcgcgctcggaaacagctcggccactgctcacacctggcgaaatcatgcagctccctcccaccgacgagatcgtcatggcggcgggcacgccgccgattcgtgcgaagaaggcgcgctattacgaggatgctcggttcaaggaacgcctgctgccgccgcccgcgctcacaacgtcgcagcaaggacagcccgacgattggaccacgcaccagttgccagcccgaccacagattgccgaggccaccttgctagcgcagcccgccgatgaagatccaaccgagtcggaacgccgccagcaaccggaactcaatcgggtgaaccccgtcgagaagaaagtgccaatcgacaacccgttcgagatcgataccgatcgggacgagtctgacgacgatgccgtgcgcaccagccgtatgaaccggctcatgcagggcgtcgcgcgccaggtctcgctcgaccccggtgacggcatggagctgtgagacgcccgtgacgaaaccaccccgcaagcaacgcctctccgtctatctcgacccctctgtcatgaaccggctcgcagatcacgccgcgcgccgcgaccattcgcgatcgttggtcgcggaggcggcgatcgagtcattcctctcacccgatgccgccgaacgccaggaggccgtcatcacgaaacgcctcgaccagctcgaccgacgcatgtcgcggatggagcgcgatatcggaatatcggtcgagatgctcgcagtcttcgtgcgcttctgggtgaccaccacaccgagtttgccagaacctgctgcgcaggccgcgcgcgccaaagctggcgaacgctatgatcagtttgtcacagctctcggccgccgtctcgcgaagggcccgaagcttcatcaggagatttctgaggacgttgatggcgaggcagaatagctcgtcagatcgcgcacgctcctgcgtgagcccaagctgctctccaaggccgcattgaagtcagcaataatcgactgcctctcaatcccttattctttccaatctctcggacatccgcccgagttcaagcaaggatgccgcctccatcttccgcatgatctgcgcccgacacaccttcaccgtgatttcgctgagtgcaaacttcgcagcaatttgctttgtgagttttccatcaagtatcatgtccataacttggcgctcgcgaacagaaagcgaatcgtaccgcgcgcgaagatcagctgtcattgtcttctcgtttcgtcggatttgcgaagtctggagaccgagatagatcgcatcaagtaggtcttggtccctaaacggcttggtcagaaattcgatcgcgccaaacttcatagcccggaccgacatcgggatatccccgtgcgccgtaatgaacacgaccgggatctccacacgcgttctgaaaagctcttgttggaaatccaagccgttctgacccggcattctaacgtccaataccaagcaaatcggcgtatcaggaatcgaccacgccaaaaactcgtgcgtagacgcaaaggtgtgaatatcaagtccgacagaactcaggagatttctgagcgcttcacgcacggaaagatcatcgtcgacgacggctaccgtgccgcccacaacgacgggctgtttcgactgtctcatagtattttctccctgtcgccaggcagagtaaaacaaaaggtagcgccgcgcggattggtcggctcagcccaaatattaccgccgtgagattcaataattgatcggcatattgaaagtccaattcccatgccatcgctcttggtggagtgaaaggcatcgaaaagatgccttacgaagccaggatcgataccgcctcccgtatcttctatcgtgatcatcacgccggacgcgcttgatttagcggagtttattcgaatctcacgaacactgctctgcagcgtacccatcgcatctatcgcgttcacgagaaggttgagtgcaacctgttgaagttgaatacgatcaccgaagatcatgggcagatcactcgacaggttcgtataaacggaaactcggctttctcggaaacggctttgcaaaagccccagcacctctctgattacgacgttgatctcaatccaggacctctttggttctgcacgcatagacagcgcttggacgcgcttgatgatttcacttgctcggtttgcgtcgctgacgatgctatctatcgaagacgcggctttttctaggttcgcgggatctccgtgaatccagcgtgtacatgcattggcgttggtcacgattgcggcgagcggctgattgacctcatgggcgattgaggcagcgatctcgccgagagtcgtgatccgagcgacgtgcgcaaggcgggtctgcgcctgttcggccgccacacgagcggtctccatcttgacagcgagataggtcgttgccgcgatcgccagcaggctgatcgaggtgttgacgactccggttccgaagcttccactcggcgtcaggatgtagctcgcgatcgtcaacgcgatgcatattccagagaccgtgcccatgccccgcgtgtggctgaagcgagccgacaatagaacgacaatcacataaaacgtcgcagcggatatctcgtaaggggttatggtgtcgatgatgaagatgccgatagtgaggatgccgatcagcaagggaagcgttccagacctaacgaggcgccatagcccatcgatgaacgtcagtagttcccttgaacgggtgccgagcgggtatcgatgcgtcaagtttgcctcgtgatctataggatcgacgtgggcaggctgattgactggtgttttttgtggagccatcgcagttcacttgatgtaggtgtgcaaaacgtcgactaattcgagcgcggcattacgttcagcttctgtgggcgtgcggttcgcatcgaccatatgcgcttgaatgtgcccattgacgacttcggccatgattccgttgatcgcaccgcgcgtggccgtgactatccgcatcacgtcgccgcaactctcatccgcgatgagggcccgttcaatcgcatcgacctgacctcgaaggcgtcggaccctattcagcagcttctgcttctcagccaccgcatgcgccatcgcgtccctccgctatacccgggtatagttgtaatataccccccagagtatatatgaatgtcgcgcgaagtgaagaccggcagggttgttcgcgtcgtggtccagttcgtcgtgaattggatccggattggcacagcagaggatcatatgaacccgcgatctagcaacgacccctcggagggagatagtaggcgtcagtcacctgctatcgacgctccgctgggttgcatcatcgctcgggtcggttctgccgacgtaactgcgccagcacttcgacgctgagcaccgtccgtccaggccacccgggttcgagcaactgcttgaacagacggaggtggccatggccgctcatctcaacatcgacacacgtcgggcgccaccggtggtcgcccatgatgatattcaattcgccggggtgtttcccggcttgaaattgggcgctcgcaacttggcgagaccaaagcttcttgcccattggcatcaggaatccgatggccggctgattgggggctggcaattggagacatccgccactctgaagaatcctgacgattgatcatagcgacacacggcaatgccgtgcgcagcgtagcgctgctgttggcagcaaagttcaaacgaagggattaactaatgaatgcagtggtggctttgctgcctgcgcgccccgcaggcactaatacgacttgcgcgaatactatcttcgccaacgatttagagcagctctacaacgcgctgaatgatgtgacattgacggagcatgctcgcacggcagagctgatgaatgccggattgcggaagatctcgcagaaggttgtcgaggaggctgccgaggtcgctctcgaggcggtgagaagcggacccaaaagacggtcagcgaaagtgccgatcttctctatcacttggtcgttctgtggcacgcactcaatattgaacccagcgaagtctgggccgagatgcggcgccgcgtggaaagcatgggcattgccgaaaagcttcctaagccgcgtcggggaacgactgatcccgccccggtcaacgacagctcggaaggaaatcgcgtacctgcgccctgcatcaccgccaactcgcgcgcaccagcaccgtgtcccgaagagcagcccgaaaggacacggccatgcgcctcctagtctgtggaggacgtcacttcgaggacgccgagatggtgcatcacgaactaactgcactgcattggcgaaagccaatcagcgttgtggtccacggcagcattgcaggcgtcggcatcatcgctgaggcgtgggcgcgtcgccatgggatcgctgtggtgcgttacccgccaaattgggagttttacggcaagaaggccgaagggctgcgctgcgatttcatgctgacagacagccgacccgactttgtcgtggctttcccaggggggcgccacaccgccgatctcgtccaacgggcaatcaacgtcgggctcgccgtgctcgccattccgcccaacacggctggagcttgcccagtcgcaaagcatccgccgcagcggggccagccaacaaccgcttcgctctgatccagtgaattcacccaaaaacgagcaaaactcaacggagtttgaaatgtccgatacctctgcgacatcgcttgaacaaatcgaattggcctcaagcgcgcccgctgtcctggatagcgcgcatattggcgacatccacggcgcgttcggcaccatccggcagcacgacaccggtgtacgaaagacttggcgggctaggctggcgaccttgatggcaatcgtcggcccgggactgattgtcatggtcggcgacaatgatgccggcgcttttggaacctatacgcaggcaggtcagaactacggcacctctctgctgtggacgttgatgctcttgatcccggtgatttacgtgaatcaggagatggtgtcacggctaggtgctgtgacgggcgttggccatgcacgactgatattcgaacgtttcggaaagttctggggtgccttcagccttatagacctagttcttctcaacggactaaccattgtaaccgagttcatcggcatcgtattcgcactccaatattttggtttgccaagagttccgggactgattgtcgcggcggtgctcatagtggccgccgtcagcaccggaagtttcaagcggtttgaacgcttcgcgatggttttggtctttggcagtctgttgctaatacctgtgctcctcgccatccatccaccaatcggtgagatcgcccatggactgctcgtgccgcaatggcccgctcactccgacatggcggcagtcatgctgcttgtcattggcatcgttggcacgaccgtcgcaccttggcagctctttttccaacaaagctatgttgtcgataagcggatcacgcccgccttcaacggctacgagaaagtcgatctttgcctcgggatcctcctggtagtaatcggcgccgttgccatgatggcgttctgtgccgcattgtttgccggacggccggaattcggcaatttcacggatacaggtgcggtgcttacggcgctggacaaatatgtgggtccatattcggcgacgatttttgcaatcgctcttttggatgcttgcctcatcggcgcagcagccgtctcgctctcgacgtcttatgcgatcgccgacgtcctcagggtgaggcactcattgcatcgcaaagtcacggatgccatcggattctacgttgcttacgggattctcatattcattgccgcaggccttgttgccttcgcaagtgatgcgctgctgggcctctttgtcagtgccgtgcaggctctcgctggcgtgctgctaccaagtgccacggtcttcctgctcctcctttgcaacgacaaggcggttgtcggcccctggtccaacggtcctaagctcaatgtattcaccggagcaataatctggtcccttgtgttgctctcgatcatcctcaccgtggcgaccgtcttcccagatgtggctgacagcacaattctgaaaatactgattggcggctctttgctggggctttgcgggttcgtcttttcgttcgcagcacgcaagcgtagttatgacgtgcccgctgccgcatatggcaacgatcaagatcaccgcttcgccaagatgacgatgctcgagcgccggaactggcgcatgccgccgcttaatcggctgcctgccctgcatatgacgttgatgacgaaggtctggatgggcgtgctacgcggctatcttctgattgctgtcgcgctgatcggcttcaaggtcttcgtcgccgcgaccggcgtcgaggtcagcatcccccagatcggcggaacgccaaccagcaacgacgctgctacaagcaataccggctcgaagtagcacgcaagaaggcgggtgacgacgttgacgcacgggcgcgagcaccgacatgtccgcaatagcctcgcggacgttgctataccccgcgtcgtcgcctgccaaccaaaacgaaaaggaaacaatctgaatagacaaaactcttttgttctaactagctgatgggggcgcctcatgtctgaacaattcaagactcttcccgaacgcatccaggcgctttccgatgcaacttcttgtagttctttttcgctgacctcagtcgagcagaccaagggctttcagattatcgcttttgtcgacagctgtttcggcgattctcaatgcgagatcgatgcttgcggattgatcgccgctatgctgatcgcttttgccaaagcgcgcagcgatccgttcacgtttcattattttgcaacgcgtgctctccatgacggactagaacgttgcatcgctatccttgtccaacgcggcgaaaggctgcccgttgtcgcctatgcgctcatcgcaaattatatccgctggacggctcgacgccgagagatggctttagccgcggcgtttgagcgtctgcgcctttatccgacacttccaaacatgttgatctggccgccgaagcgcacgccaggatagcgtgccagcgcctgagattcatcgaacaaaaaaaagccgtggcagattttctcaaaggagacgcaaaacaatgagtaatcaactatcgcattggcctccgccacttcggatccgccttctgctttttgtggtgtctcgcatcgaacactttctcctcttaaggtgtccgaaaggtcgcatcaggcgattgggattggcttgggtcgaccagattcatgcgcgcgtgcgcaaaaagctcagccgtgcagagctacccgaaacgcgttgatgtttcttccgcgttcgatcgcgcgtcaaatagccttgaatcagcgctgaatggtgaggaagcctacaaatctctttccgcgccgatcggtccgtcaccgtgatctataatcgacgagggcttcattgcgccgcgccggtgttaaactgtcaaggagggcgttggccttctcaattaccttgctgccgatctcgcgctgttgcccttgattggcttttcgggcgccctcggcgaacaccgattccgcggggagtaccgccgcagcaaatgcggcggcggccaaaaccgatctaagaaacataggctactctactcggctggggttcatggctgcaaagatgctatcgtacgtaccgtcccgttcagcctaacgccgtgcatgatcccgattaagaaggatctcaccccccggatgatctccgcgatcgaggatgtccatcacctccacaacaaatgcattgagcggtcattgtgcgaggatcagacgcttgcgcagagccggtcaagctccgcgagcgtattggcgtatcgtgcgtccgacaccgccgttctcctgtatttgcacgctacactactacgtcgatgaatctttgttgaatcgccccgaaatctggcccctttaatcatccccgtctggggaaggactgtatcggccccgatagaaacggggcactatgacagcatcacaccacaattcggaaggcctcgcgcgcggcgcaaggatgctgcgcactgcgctcggtcctgcaatcgcgcgctatcttgatgacgccagcatcgtcgaggtgatgctcaatcccgatgggcgcctctggatcgaccgactctccgaaggactttccgataccggtgagcggctgtcaccagcggacggcgaacgtatcgttcgcttggttgcgcaccatgtcggagccgaggttcatgctggtgctcctcgggtatccgcagagttgcctgaaaccggcgagcggttcgaaggcctgctgccacccgtcgtcgctgcccccgcattcgcgatccgtaagcccgctgtcgcggtgttcacgctcgacgactacgtcgcggccggcatcatgtcagcgacgcaggccgagatactccgccggagtgtctcctcacgcgccaacatcctcgtcgccggcgggacatccaccggcaagacgacgctgacaaacgcgttgctcgccgaagttgcgaagaccgccgatcgcgtcgtcctcatcgaagacacccgcgaactgcaatgcgccgcgccgaacctcgtggcgatgcgaacaaaagatggcgttgcctcactttccgatctcgttcgctcttcgctgcgtctgcggcccgatcgcatacccgttggcgaagtgcgcggcgccgaagcgctcgaactgctcaaggcctggggcaccggccatcctggcggggtcggcaccatccacgccggcagcgcgatcggcgcactgcgccgcatggagcagctcattcaggaggcagtcgtcacggtcccgcgcgcattgatcgcggaaacgatcgacctcgttgccgtcctctccggtcgcgggtccgcgcggcgactctccgaactctcgcgcgtcgaaggcctcggtctcgacggcgactaccgcatcgcgccggccaccacggatggcgacggcagctcgagcttgttcgtcccagcacctgaaggagaaagcctgtgatccaacgcctgcggcgcgcgcgccatcatctcgtcttgaccgtttccatcgccactctgtcggcggtgatggcagcccccgctcacgcttccggttcgtcgatgccgtgggaacagcctctccaacagatcctgcagtcgattgaaggtcccgtggcgaaaatcatggcggtgatcatcatcatcgttaccggcctgacgctggccttcggcgatacctccggcggcttccgcaggttgatccagatcgtgtttggtctctcgattgccttcgccgcgtcgagcttcttcctgtcgttcttctcgttcggcggcggggcgctggtctgatgacgggcgctgtcgatcagggcggcgacgtcccaggctataccgtccccgttcaccgggcactgaccgagccgatcctgctcggcggcgccccacgggctatcgccatcatgaacgggacgctcgctggcgcggtcggcctagggcttcgcctctggctggtggggatcgcgatctgggcgatcggccacgtcaccgcggtgtgggctgccaagcgcgatccgctcttcgtcgacgttgtgcgccgccatctgcgcgtccccgcacacctttcggtctgaggggagcgcggccatgatgaaccttgccgaatatcgcaatcgcaacagccgcctggccgacttcctcccctgggtcgcgctggtgggctccggcatcgtcctcaacaaggacggcagctttcagcgcaccgcgcggtttcgcggccccgatctcgacagcgccgtacaggctgagctagtcgccatcgccggccgcctcaacaatgcgttccgtcgccttggatcaggctgggcaatcttcgtcgaggcgcagcggcaagcttcgaacctctatcccgacagccgctttcccgatcccgcctcggcgctggtcgacgccgagcgcaaagcggatttcgaggaagctggcgcacatttcgagtcgagctatttcctgaccttcacctatctgccgccggccgaggacgccgcgcgcgcggaatcctggctctatgaaggccgggaaaagtcgggcctcgaccccaacgaggtgatgaccgggttcgccgatcgcaccgatcgcatcctgcgcctggtcgaagccttcatgcccgaatgccgctggcttgatgacgcggagacgctcacctatctccacggctgcgtctcgaccaaacggcaccgtgtccgcgtccccgaaacgccgatctatctcgacgcgctgctcgccgaccagccgctcaccggcgggctcgagccgcgccttggcgcgtcgcatctgcgcatcctcaccgtcacaggctttccaacggcgacgacacctggcctgctcgacgagctgaaccgtctcgcatttccgtatcgttggtcgacgcgggcgatcctgctcgacaagaccgacgcgaccaagctgctgaccaagatccgccggcaatggttcgccaagcgcaagtcgatcgccgcgatcctcaaggaggtaatgaccaacgaggcgtccgtcctcgtggacaccgacgccgcgaacaaggccgccgatgccgacatggcgctccaggaactcggcgccgactatgccgggatggcctacgtcaccgcgacggtgacggtgtgggacgaggatccgcgcgctgccgacgagaagctgcgcctcgtcgagaaggtcattcagggccgcgacttcactgccatggccgagacgatcaacgcggtggacgcctggctcggatcattgcccggccacgtctatgcgaacgtccgccagccgccgatctccacgctcaatctcgcccacatgatcccgctgtcggcggtgtgggcggggccggaacgggacgagcattttgcagcgcccccactgctcttcggcaagaccgaaggctccaccccgttccggctttcgcttcacgtcggcgacgtcggccacacgctgatcgttggcccgaccggcgcgggcaagtcggtcctgctggcgctgatggcgctgcagttccgacgctatgctcgcgcccaagtcttcgccttcgacttcggcggctcgatccgcgcggcggcgctcggcatgggcggcgctcggcatgggcggcgattggcatgacctcggcggcgatctcagtgacggcgcgaccgataacgtcagccttcaaccgctcgcccgcgttcacgacgtgcccgagcgcgcctgggcgggcgactggatcgtatcgatcctgacccgcgagggcgtggcgatcacgcccgaggtgaaggagcatatctggacggcgctgacctcgctggcatcggcgcccgtcgaggagcgcacgatcaccggcctggtcgtgctgctccagtcgaacgatctcaaacaggcgctcaggccctattgcgtcggcggtccctacggccggctgctcgacgctgaacgcgagtatcttggctcggcgttcgttcaagcgttcgagactgaggggctgatcggcaccggcgcggcgccggcggttctctcctatctcttccatcggatcgaagatcggctcgacggttcgccgactcttctcattatcgacgaaggctggctggcgctggacgatgacggtttcgccggccagctccgcgaatggctgaagacgctgcgcaagaagaacgccagcgtcatcttcgccacgcaatcgctcagcgacatcgacggctcggccatcgcgcctgccatcatcgaaagctgccagacccggcttctgctgccgaacgagcgcgcgatcgagccgcagatcacggcgatctatcggcgcttcggcctcaacgaccgccagatcgagatcatcgcgcgggcaatgcccaagcgcgactattactgccagtcgcggcgcggcaaccgcctcttcgagctcggtctgtccgatgtcgcgctcgctctgtgcgccgcgtcatcgaagaccgaccaggcggccattgcccgcatcgtcgccgaacacggccgcgacggcttcctcgccgcatggctcgatcaccgtgaggtcggttgggccgccgatctcatccccacgctcaccaacaaggagacgtcccaatgaaactgcgcaattcccgcgcagcgcgttttgctgccgcgctgctgaccgctcccgtcgcgctcgcgcccatgctggcgacgcccgctcacgccatcatcgtattcgatccctcgaactatgcgcagaacgtgctcacggcggcgcgatcgcttcagcagatcaccaaccagatcacctcgcttcagaacgaagcgcaaatgctgatcaaccaggcacgcaaccttgcgagcctgccgttctcgtcgctgcaacagcttcagcagtccgtccagcgcacgcagcagcttctcaaccaggcgcagaatatcgcctacgacgtccagcagatcgaccggatgttccagcagaagtacgggaacgtctcgctgtccgcttcggatcagcaactcgtcaccgatgcccgctcgcgctggcagaacacggtcggcggcctgcaggacgcaatgcgggtgcaggcgggcgtcgtcggcaacatcgacaccaatcgcacgcagatgtcggcgctgatcggccagagccagggcgcgaccggcgcgctgcaggcgacgcaggccggcaaccaactccttgcgctccaggcgcagcaactcgcggatctcaccgccgtcgtggcggccaacggccgggcgcaggccttgcagtcggccgagcaggccgccgccgccgaacagggccgcgagcagcgccggcgtttcctgacgccgggctcgggctaccagcccggcaatgcccgcatgttcccgaacagcggcaactgaggctggcacgatggacggcaagaccctcgctcgcgtcggcgccatcgtcttcgtcgcggtcgccatcacggcgaccgcgatcgagatgaaccgcaaggacgtttcgacggacgtcctcgcgacgcagggccgtccggtcacaacatcggatcctctcgccgccgaattgcttcgttgttccgagatcggcgaggccggcacgcgcgatcccaattgcctgaaggcatgggcagagaaccggcgccgcttcctcggccagccggcccccgtttcatcaccatcgccggttgcgccgaccacgctgtttccaagcgcgcccgcgtcggccgctcccatccacaaagacagtgcgccagcggacgtgaccgggcctgcgatgcaggccgagcccgctcagccagaggttcgctgacatgggcggcaccggtgtcatcgaccatttcctcgaggtcttcactcgctacatcgacggaggattcgggctgctcggcggcgaagtcggtttcatcgccaccaccttgatcgtcatcgacgtcacgctcgccgcgcttttctggtcatggggcgccgacgacgacatcatggcgaggctggtcaagaagacgctcttcgtcggtgtcttcgcctacctgatctccaactggaacaatctcgcccgcatcgtcttcgagagcttcgcgggcctcggcctgaaggcttcgggaacgggctttgccgtgagcgatctcatgcgccccggcaaggtggcgcagactggtctcgatgccggccggccgctgctcgactccatctccagcctgatgggctactggtcgttcttcgagaacttcatccagatcgcctgcatgtttttcgcctgggcgctggtgctgctggcgttcttcatcctggcgatccagctcttcgtcaccctgatcgagttcaagctgaccacgctcgccggcttcgtcctcattcccttcggcctgttcggcaaatcggcgttcatggccgagcgcgtgctcggcaacgtcatctcctccggcatcaaggtgctggtgctcgccgtcatcatcggcatcggctcgacgctgttctccgagttcacctcgggcttcaacggcgcaacgccatcgatcgacgatgccatggcgatcgtgcttgccgcgctgtcgctgcttggtctcggcatcttcggtcccggcatcgctaacggcctcatctccggtggcccgcagctcggcgccggcgcggccattggcactggtcttgccgccggcggcgttgtcgcagcaggcgcggccgctgccggcgccgtcgtgacaggcggcgctgcacttgctggcggcgctgccgccgccgcgcgtggcggtgcagccctcgccggtggcgcctccaccgcctacagcctcggcgcggccggccaggccggcgcatccggcgtcgcgtcgggtcttggcagtgttgccagcaccggcgcgaaggcggccgtctcaccgctgaagcgcgcagccggtcgtgccgccgacagcctgaagcagagctatcaggccggtggccaggccgcgacggagatcgccaccggcgcatccggtgctgcgacgaccgccaccgcggaggccgcatctcccggagctgcgtcttccaccagcgacgggccgccggcctgggcgaaacgcatgaagcgctcgcagcagatgtcccatggcgttcaggccgccgcccacgccgtgcgtagcggcgacagccatggcggcggctcctccgtcaacctctccgaaagcgactgaccatgttcaagcgaccatccacccactacggcaaagcccctcagcccgagactccctatcagcgcgccgctcaggtctgggacgatcgcatcggctccgcccgcgtgcaggcccgtaactggcgctacatggccttcggatcattggccctcgcgggcggcctttcggccgcgctggtctggcagtccgccaacggctcgatcgtgccttgggtagtgcaggtcgaccggctcggccaggcgcaggcgatcgcgccggcgaccgccgactatcagccaaacgatccgcaaatcgccttctacctcgcgcgcttcatcgagcaggtccgctcgatcccgtccgacgccatcatcgtgcggcagaactggctgcgcgcctacgacttcacgacacagggtggcgcgctcgcgctgaacgattatgcgcgcgccaacgaccccttcaccaaggtcggcaagcagcagatcgcgatcgaagtgtcgtcggtgatccgcgcctcgccgtcgagcttccgcatcgcctggatcgagcgacgctatcaggacggctcactggcctccaccgaacgctggtccgcgatcctcaccgtcgtcgtgcagcccccacgcgacgccgacacgctgcggaagaacccactcggaatctacatcaacgccatcaactggtcgaaggagcttggacaatgacgcccgcactccgcaaagccgccccttggagtgcagggctcccggctttgctcatccacgtagttccggttttccgcaaatccgctttgccgggaatcttgctcgccggttcggcgctggcagggtgcgccactcacaccccgccgccggagatttcctacgacaatgcggtgccggctgtgcagacctccgatccgccagcgcccgtccgggtggtggagcttcccaaaccgctcccgctgcctggtcagttgaagcccatcggcaaggacggcaagcccgagccggaaccgtccgatcccgccgcgcgcgtcaaccaggccaatgccgcagcgcgcgtccagcccgtccgcaacggcttcatcaactcgatgcaggtctatcccttcgtcgatggcgcgctctatcaggtctacgcctcgccggggcagatcaccgacatcgcgcttcagcccggcgagcagctcgtcggctccggtcctgtcgccgctggcgacacagtgcgctggatcatcggcgataccgagagcggcgttggcgcggccaagcaggtccatatcctcgtgaagccaacgcgggccgagctgatgaccaatctcgtcatcaacaccgaccggcgcacctatcacatggagctgcgcgcgacgccatcgacctatatggcatcggtgtcttggcaatatccgcaggaccagctcatcgcgctgcgccgccagaacagccaagccgaggccgcgcagccggtgtcgggcggcatcgatctcgcccgtgtcaatttccgctacgaggtgaccggcgaccgcgcaccgtggcggccgctgcgcgccttcgatgacggcaagcaggtgttcatcgaattcccccgcggcatcggacagggcgagatgccgcccttgttcgtggtcggaccggagggcgacacctccgagctggtgaactatcgcgtgcgcggcaactacatgatcgtcgatcgactgttcgccgccgccgaactgcggttcggcgcgggcaagaaccagaagcgtgtccgcatctcccgcaccgacgggaggccggcatcgtgagcgacgaacgcgatcccgaaaaggaggaaggccggacgcccggttcggcgccccagcctcagccgaccgacgacgacgctcggccgctgaccggcgagccggccgcgaccatgcggctgcgcgccgagccgccgcgtgtgacccgcctgtcccgcaaggtgctggccggtctgggtcttgcggcaagcctcggtgtcggtggggcgctgatctatgcgctccagactcgtcacagcggccagggtcaggagctttactctacggacaaccgctcgacaccggacggtctggctggattgccgaaggattattccggcgtcccgaagctcggcccgccgctgcccggcgacctcggtcgcccgatcctcaacgcgcagaacggtggcacagtgccgccgatcggcgcaccggcatcaggtccgacgggaccgagccccgaggaacagcgccgggcgcaggaactggaggcggctcggaccgcacggctgttcgcatccaccgagactcggcccgctacggctggagcttcgacacagccgactgcgaccgccacgccgtcggccgatctcgccagcctcggccttgcgccgcagccagcgacaccctccgcgcaggatcgtcagctcgcattcctcaatcagacgcccgacaagcgcactgtctcgccggatcgcgttgccgcgccagcgtcgaagaacgtcctgcaggccggcgccgtcatcgcggccgcgctcatcaccggcatccgctccgacctgccgggtcagatcaccgcacaggtgacggagaacatctatgacagcccgaccggcaagatcctgcttgtgccacagggcacgcgcgttatcggccagtatgacagtggcgtcggcttcggtcagaggcgcatacttctcgtctggaaccggctgatcttccccaatggccgctccatcgttctggagcgtcagcctggtgcggacgccgagggctatgcgggccttgaggatggcgtcgactatcactggggcgaactgttcaaggccgctgcactttccacgattctgagcatcggtgcggaggcgggctcgtctggccaggacagcgatattgtgcgggcgctgcgacagggtgcctccaatagcgtcagtcaaaccggccagcagatcgtccagcgccagctcaacatcgcaccgaccctcaccatccggccaggcttgcccgtccgcgtcatcgtcacccgcgatctcgttctcgaaccctacggaggctgacatgaccaagctgaaattgggagcgatcgtcgacgacaaaccggtgaaggtcacggtggagttaccggcaagcctgcatcgcgacctaacggcctacgcagaaattctcggccgcgaagcgaggcaaccgccggccgatcccgttcgcctcatcgctccgatgctggagcggttcatagccacggatcggggatttgcgaaagcgaggaagtcaaaagaactgccgaaaccgtctgaatgattgtggcggcagccgagcgcgacattgaacgcgcaagactgaggaggcggcgccaggccgggttatcattccgcggcgaccacaccgcgcagaacggcagaacctcgccggcaagctgccgataggcagttcccggaaactgagccgccgtcccggcctcgctcatgaccgtgacgccttggccgatcgccacaagcgacaggagattgtccctcccgacgtattgggtatcgatttctgggtgacgcccaagatcggcgaggcgttgaaccaaatagtcgtgaatttccgatccaggggcaccgtcacttacaatgaatctctcgtccacaagatcacgccagccaagctccgatttctcagagagaggatgatcgctgggaagtacggcgaatactcgctcggaccaaagttgctctgtttcacagtccgaccactgtgtggttcccgtgataaaagccacatcgagttgaagtcgccggatcgaggcaacgtgatccgcaggatcgccgtcaaaaaattcgacccgtacacttgcatgctccttgccgtaggctcccagcagatcggacaggaatccagacgcgagcgacgaaaagatgccgaccttgatatgcccccgctcggagcgacctatggcggccacatccttcgcgccgcagtcgatctgttgaagtgctttgcgtgctcgacgcacaaactgctgtcctgccaacgtcaggcagacgccgccgttgtgcctctgaaatagggaagcgccgagttcgtcttcgagatcgcgaacgcgacggctgatcgccgattcctgtattcccaaggccaaggccgcctttcggaagctgccatattcggccgccgcaagaaaataccagatctggcggaattcaagcatcggtcaattgcgaccgagatctattcgaaatgattcctggcctcgcgacggtccatcgtccgctcgttgcgagcatcgctctgtaagcaccatctaccacgaccatcgcgccccgaccgcagctaaggcaagacctcccgattctcaccctagaatagacggctacagacgctcattggccgatgatcttatatagattcgatataccaacgtatcttcgaaatataccgtgttctgaaaggggggggggtggcacgcccgcgcagatcgcgcaccagttcgcggtgcaggggctctcctctcagtcgagattcaaacgctcaaactgtccgacattctaacaaggtcaataatcgtcttggcctgcatcttctgcatgagatggctacggcgaaccttcaccgtgatctcgctaacattcaggtcggcggcgatttgtttattgaggaggccctttacaacgagcttgaaaacgtctcgttcgccgggcgtcaatgtctcccaacgcgcattcaaatccagcgaacgcgcttcgctctcgcgccttcgccggtctttttcgatcgcttgttggatagcatccagcaggtcttggtcgcgaaacggcttggtcaagaactcgaaggcgccattcttgatggcgttcacgcccatcgtgatgtccccatgtcccgtgatgaatatcgtcggcagatgaatgccgtattcaggcatttgccgatgaaaatcgatcccgctttgtccgggcattctcacatcgagcagcaggcagccgggcgcgtccggcatggagctttccagaaattcggcaaccgagctatacgagcgcacctgtagcccaacggatgcgagcaaatcttcgagcgcggcgcgaacggaccgatcgtcatcgatgacatagacgatgggctgcggccgcgaatccgccgtcggttcatttttcatcaggctgcctccatgtggcgcggcaggcgcacctcaaatacggtcccgcctccagggactggagccgcggaaatctgtccgccattcgcttcaacgatcgtctgactgatggtaaggccaagacccatgcctccctctttcgtcgtccagaaggcgtcaaagaggtgctcacgagctcccggcgccagaccggtgccggaatcggccaccgcgagaacgatcgcatcccgtccatcctgcgaggcggcaattcgcagacgacgctcgggcaatgcgcggtccgacatcgcctcggtcgcattgaggacgagattgctgatgacctgctggatctggacccgatcggcaaaaacgcgaggtaggccgtcatgcaggtccagttgcaaggcgacgccgccacgctcgatctcgccgcgcgacaaggtcgcgatttccatgacagcttccctgaggtcgaatggttgtcggcgcggcgcctcgcccttcgaaagggcgcgaatgcgcgcgatgacctggcttgcccggttggcatcgctgacgatgcggtcgagcgcgaggcgggccttgtcgagatttggcggctcctgggcaagccatcgggtgcacgcgccgccgctggcgacgacggcagccaggggctggttgacttcgtgcgcgatcgacgccgacagttgaccgagcgtcgtgacccgcgcaattcgcaaaagccgatcgcgcgcctccagcgcctcggccttcgcagccaccatccttaaactgagataggttgtaacgccgatcgcaacgatactaatcccggtattgacgatgccgacctcatacgcaccggagtgggtcaagaaaaaactgatcagggtcagcgcgacacaaatgcaagcgagggccactacagccgtgccagacaagatgcgtgtcgcaacgagaatgaccgctgtgtagaatacggccgctgcgatggcgtagtccgtgaccgtatcggcgataaaaatgccggccatcgcaacgcccatcgcgatcaacgtcagcgccgatccgggacgtatatcattggcgatcttgagcattgttcaccttctcgatcaacttacctactttcaatattcttccctggagaatctactccgccgtgtacctagataactattgcttctcggtcactcgcctggctcgaaccgccaccgagcagatgttaccagcggctccagactgagacgaccgataatctgttccaaaaggcgatcctgccgagtgtcggctcgcactgtcgcgctcacctggactcggtttgtgtcctcgatattcgtgctttcgaggtcgcggatgtgcagcgcaccggcgagatcgcgaagaagaagcgcccgaacatgcgcctcagcctctccatggcagatgatgctgatcgcatatgcgctgtccaacgggcttgcggcgaatgactggcgctcaacgaggcgcacgagcgggcgcagaactgcgttgacggcgatgacgaacgtcgtcgcaatcaatgcatgaaagaaaaatccggccccacacagcgcgccgatcgcggcggagcaccacagcgtcgcggcggtgttgagcccgcgcacattcaacccttccttgaagatgatgccggcgcccataaagccgatgccggaaacaatctgggccgcaacgcgcgtcgggctcgcctcgccggggaacagcccggcaaagaggacgaagatggccgcgccgagcgcgacgagggtattggttcgcagcccggccaggcgctggcgccattgccgttcgaagccgatcaagccgccaagaaggaatgcgcccccgagcgtgagtgcggtgtggccaaggctttgccaatccatctgaatgtgttcccatctcgttgcgtcggtcgcgccctcccgaggcgcaagcccgcgctattgctggaattgccactccactcgctgtcagaattcggcgtgggcgcgaagcgacagaatcgaggctggtccgcggtcggcgttgtaggcggggtttgcaacaaactgatagtcgaaggtgacggtgctccagccgttgacccgcaaggcgtaatacgcctcgacgatcgactcgtggccgtagcgcagtctcccatcaccgatcagcaaccccgtgcctccggcggcgaggaagttacgatgtgcactcgagaggccgttgaccgcagcaccgactccgatcgtgtccgcaggccgtccccatgcagaaccctttagggagaaaccaccggaaatgctgcggtcgatgtccgtgaaggagaggatttcggtgcggccgtcgttccagcttgcacgggcgaaaagcccgaggtcagctgtcaaagcctgttcgatatttccataaaagccatacttattctgattgcggcgcagggccgtcatcgcatcgttgatatctgtttgagggctcgcttgcgcgaggttgatagcgtcgcgatacgcgccggtgtaaccacggttgatgaaagcgccgatccgaaccttacccggctgcccgaacaggctgtgccgttcctcgaactcgacggcgccaccgccgcccccattgaagaccaaaacatcactgttcggctccctgggcacttggaaggccccggctcgcacagcccaatccttacgattcagctcgatgaccgcaccgcgcgtcatgccgggaaggtcggcggggaagtcataggcccccgacgaccagattgcccaattcatgaaatccgcgcgcggatccttggcataggcattcgcgtcgaagaaatcgccaaccgcgaaacgaccaaccgtgacagtgacgcgatcgatatcgcgtcgccccgccagttgcagggggccgtctgcgacatcctcctgctcgccaccaagaccgaatgtctgctgaagatagtagcgctgtggccgaaatttcggaaattcagcgccgcctttttgcgcttctccatttggaaagcctgcgagtccgagcgtcccgttcagcccgaagccttgggctagctcgggattgaaatagaacgcaccaccgtcccaaagcctcacgccaagaaatgcgtccgcggtccacgtctcacgaacttgcccaccaccgggcaggctggcgctggaagcgtagggggaacgaatcgcgggatagccttgggcgatgaatgtggtctggccatgaatattccagtccggcgacatttcgacagttgccggtggtcttgggagtgtcgaggccacatcgcccagtcggtagttcaggccaagcgtgaacctctgggttcgggggcggacggacacatcgcgcagtccggcaccatcgagtcgataggtcgaggaagccagatcgaggtagtcgtactggacgcgtgccgtccatggtccgcccaaggccatttcgacacctgcgcctgccgtccacccagcgtgccagcgccccagttttgacaaaacgctgccgtcatcgccattgatgtcgacgttcgttcgtgtccaagcgaggcctcccgttgcataggggaggaatgggccaaaagcatagccgatcctgccacgcaccgtccccacgacatccagggatgtgttgaagggagccggtatccgtcgcgtctcatcgggcgggctcacaaaagtgacatcggcttccgcgccgagcacccaacgatcgctggcctgaaagttgtagcctccctgaaagccgccgatcattcctgtcaccgtaggcggcaggccaacggactgattcaagacggggttcgttcccgggccaaggctgccagccccgaaaccggtgtgtccgccaaaatagacgcccgaccagtcgggcccgcccgattccaccttattgtcacgcgaggcccccggtgccttcgttggcatcgccaggatgggttgcggtccactagtgttgagccgtgccgcatccggatggccgggagtcgtttgaagttcttgcgcgtgcgctttggttacctgaagaaccgctacaagaccgagcgccagcaagtagaaagcgatcaccatcagtcggcaaaaaagaacccgacgacgcctgaaaaccttcagtccggtggtgatagtgaaattgggaagtccgtgggtcgtaaaataagtcatgggctactcctggcgtcgggttgcgagagcgcccggcgccaatagccgcgagctgccctcctagttttctcgtgaattcaagcggcgcgagttgttggtcgcgccgcgactagatgggtcgtccatttgaagctccttgctgatcgaagtccggttcaggtccgggcctcgtgctttggttccatgcaagcgatcgttttgcgcttgtgtggctcaccagcggcaacgccgcattcgcgatatcgccgctctgttcaaccgtgcgccgcaacgcagcaggaatctgagcttgaaaccgtccagcagacggcgacgagcaaggtgaacggccgcatgcgtcacgaacatcgccaaaaccgccaaagcccaacacaaacgtctgtccaaccgattccgaagcgacgacctggcatcgcccggctcgcgattgtggggcggacgcggcgcttgtcgcctcggcggtggcggcccttgtcgcgggcagtctccagcctgcggcggcgcaaatctcaggatcaacggtgatgtggacatgatcaggacctctcatgcgcttggccgtcagaaccattgtccgaaccggcggatgtagacggtcttcatcagttgagcgacgaggcagtagcagagcagcgttccggccagccacgggaagtaggcgataggcaggggctgcaatccgatggctgctcccagcggagagaacggcaaatagatccccagtacgcagatgacgctcgacatcagcaagaccggcaaagccgctgtgctgttgacgaagggaatcttctgggtacgcagcatatggaccacgagcgtttgagaaagcaggccctcgatgaaccagcccgactgaaagagcgattgatgctccgggctattggcggcaaagacgaaccacatcagagcgaacgtcgtgatgtcgaagatcgaggacgtcggcccgatccagatcatgaaacgaccgatattcttggcatcccacttccgcggtttgctgagaaactccttgtccatgtgatcccaaggcagcgccaattgggaaatgtcgtacatcaggttttgcacgagcaaatggatcgacagcatcggcaggaacggaatgaatgcgctcgccaccagcactgaaaacacgtttccgaagttcgagctggcggtcatgttgaggtatttcatgatgttgccgaaggtttcgcgccccttcagcacaccctcctcaagaaccatcaggctcttctcgagcaggatgatatcggccgactccttcgcaatatcggcgccgctatcgacggaaatgccgacatcggcatcgcgcagcgccggggcgtcattgatgccgtcaccgagaaatccgacggtatgaccgttagcctgaagcgcctgcaatacacgcgacttctggagcggagtgagcttcgcgaagatcgtccgctcctcgaccaaaacgcgaagcgcggtgtcgtccaatttttctatgtcgcgcccgagtacggcttggcccggttcaagtcctacttcacggcagatcttggcactcacgaccgcattgtcgcccgtaagaaccttgaccttgacgccatgctccgcgagcgcagcgattgctggtccagccgtctcctttggcgggtcgagaaaagtaaggaacccctgaatcgtgagatcggcttcgtccgcgatggcataatgcgtcttggcctcggacgccacaaaccctcgggtggcgacgaccagcacacggaatccgtcctcgttgtacgcccgagccatcgcagccagattcttgcgctcaacgtcaccaaggcggatcagatctttgcctcttctgacgtgcgtagagatcgacagcatctcctcaaccgcgcccttgcagatgagcaagtgatctccgtcctcgccctcgacgaccactgagagtcggcggcgcacgaagtcgaacggaagttcatcgacttttcggtagctcgcggccgtgttcgtgatggctggctccgccccggcgaatcgcacgacggcctgatccatcaggttcttcacgccgctctggtggtagctgttcaaccagcccaaccggagaacgtcagcgttgggttgcccggtaacgtcgacgtggtgctccagaatgatcttgtcctgagtcagcgtgccggtcttgtccgtgcagagaacatccatcgcgccgaagttctgaatggcgttgagtcgcttcacgacgactttgcgccgcgccatcgctacggcgcccttcgcgaggttcgaggaaacgatcatcggcagcatttcgggggtaagtccgacggcgacggcaaggccgaacaacagcgcttccacccagtcgcctttggtcaggccgttgatgacaaagacgacaggaaccatgacgagcatgaagcggatgagcagccagctcacactgttgatgccgcgatcgaacgccgtttgagcgcgcgatccgacgatcgccttggctaacgatccgaaataggtgcgagcacccgtggcaacgacaagcgcggtcgccgtgccgctcacgacgttggtgcccatgaagcagacgttgggcatgtcgagcgcgttcatttcgctggacgctacgctcgccgcggacttctcggcgacagacccgagcgtgtcatacttctcaacagggatggcctcaccggtgagcactgcctggctcacaaacagatcgcgggattcgatcagcctcacgtctgccgggatcatatcccctgctgaaagacgcacgatgtcgccggcgacgatctctcgcatcgggatttcgaatgcttcgggatttgacgttgccgatcctcgacgaagaaccgtcgccgtcgtgcggaccatcgccttcagagcttcggccgcagcgctcgatcggtactcctgaacgaagcgcatcaaggcgctggcaagcaccatcacgatgatgatggtgacttttgtcggatccgcatcctcgccatgttgaagccgaagccagatgtccgttacagcgctgatcccagccaggatcagcagcactgcaatgaacggattcttgaaagcgccaaaaaactgaacaaccgctggcaggcgtcgctcttgcgcaacctcattggggccgtcttttgccagccgttcgatcgcatctcgggcaatcaggccgttgcggtcgcctttgacgttttcgaaggtgtcatccaacccattctgggcttcacggaccgccttcatcgacagcttgcgttcgtcttttccgcgcggcttgagagccgccttgaggatgggggcattcattggatgaatctcctgccgcaagcgccgagaccatgcgcctctcggcacggtcttcggcgcttggggtcttggtcggctgaggggataatgaaaccgatgcatcttcacgacgctcggcattcggaccgcgcttgagcagcgcagccgctcttcaccagggagggtccgcaccttcgcgcgaccgtgcgattctgcgcgagtacggattgccgccccggcgggggtgaagcccgtccaggccggcggacaccagaaccatcgccgtgctggccttatgcagcgtgagggaatgcatcacacgcctcacgccgcaaagcgaccatgctggtaaactgcaagaaggagtccggcgcgctcgatcaatcggcgcaacccgccgcccgtgtctggttcggcgtcaagcatccagatgcattcgagccgaccggtctcgccattgacacgccacgccgcgaccagtcgagtccggttcgtgcggggagacttcgtgaaaggacggtcacgctcgcatcgcgggtcggcgaatgcgggattgcgtttcggcgaggcgatccgcgaaacgcggagcgaagccggcagagtaaaaaattggagagtcatgtctcacctccgtgacgagccgctcggccgtcacaggcgagactgatgattcagactcgcgagaacgacctgagcggcacgcttgctcgactactgtcgcttggcattgctcgttgatcctcatgcgtcggcagcgggttggagccgctagatgacattggctggatatcaccgtcattccttgagtgacagtgtcttgcggggttgatccgatatacaaaacaatatccgggatataccatcgtatattgtaaggtcttcggcgataactacctgcgcaatatcaagccgcttagactcaccggacacgggcgcgtcgacttcactagcgatgtgatcgctctgatttatttcgatccgaggtctagtgtgggtatcgatatggttcttgtcgagcgcatcgtcgcgcgaagccctcgtcttcggcgattgctttattcgttgtccttaacctttctgaaagcggcgtttcggtttcgccgcacgggcttggatgcctttgcccgaccgacattgcgtttatcgcagtgtctctttcgtactgcctcttcgcggatacgacgtcgttatgcagccgagccgaaaatgacgtcggactcgcgctttgtgctccgtcgcctttctctcaaacttttgatcgtgctgatctttgccggtgctcaaagcccgctgccctggggattcgggaaagcgcttacgatgatgctgtttatgagcgcggctatcagctgtgccttggccctcatgaaccaccaacgattcagattgggagtcttgagctactgggacgaatctttggcctttgtcctgctcggccaaaccgcgcggatggtgtttctacgttgaagtattgcgagtgcgctatgccgggggctctcgtcttcaaaatactcgccaataacctgccacgcgatacgggaatcgcgaaggtggccgtcgaggcgagacgcggggcagcgacaaccgcctgcggcgtcgtttggtattggttatgacggagcgtcgcaccactcgccgtcgccgcacgctgttgacggggaagatcattctcaatcagcgatcgtccgtgataagttgcgtcgtccgaaacttgtcggacacaggcgcctgcctcgaagttcctgctgccctgaacattccggatgccttcgagctgaaaatagaacctggcggcgcttgctcacagtgtcgaatagtctggcggagcgctacgcgcatcggcgtggcgttcgattgacacaaagctagaacgcgccttcactttcaagggcgagtgtaaaggcgctggcccgagatactggccgcgcgcacggcgctgcaggcgtgacggctgatatggccggacggcaggctacagaaataacaaggacaatgtgtgggggaaagagccaatctcacaaggagaatggcgcgccgtactggataaaagtgcgaacgcatatgtgattgaatctgcgattaatttattttggggcatcgtgatcctctcatctttcagcgttcgccggctgccgccaatagccccacccaaacgggtgcgccgaaccgaacgcggagctgatatcggaccaagtacaaggtatccggtattttgcttctcccgggtctatgaggaaatgactagctctttccaaatctgggccgcgtacgcagtggctctctcctagtcctgaagtccgcggcatgtgtgattgggtaccgctggaatacatcgcagaaaatcccattctgcagcgatgcaaatatcgagtgcaaaatcgattaaaaaatagagagctccgcgaactagacggctcgaccgatgagggcaccaatggtcgcagttgaggccatggcgactgctccccaaaacacgacccgaagagtgggtttccatatgctggcgccgccagcgcgagcgccgatcgctccgagaacgccaagtccgatgaggcaggcaatggagacggtccaggtggcggtccaggccggcgacaggagagcgacggccagcggcaaagtcgcgccagatgcgaaggtgaccgccgaagtgaaagccgcttgaactggcttcgccatcacatgactggtcagtccgagttcatcccgcgcatgggccccgaaggcgtcctttgccatcatctgctcggcgacctgtcgcgccagttcgggcgttacaccacgctgctcgtagatcgcggcgagttcggccagctccgcttcaggttgcgtggcaagttcgcggcgctcacgcgccatgtcggcttcttccgtatcggcctgggaactgaccgacacatattcgcctgcagccatcgacattgctccggcgacgagccccgctacgccagcaaccagaatttcgtgggaagcggcggtcgcggcggcaacaccgacgatcagactcgatgttgaaatcagcccgtcattggcgcctagcaccgctgcgcgaagccaacctattcgttcgatcagatggttctctttatgaagggctcgcatggaacatggtcctgaattacatttctaaggctttgtaacgcggcgctgagcacataggaaaaggcgccttgccttcgagatcgatctggaaacttggccggtcaggctgatcaatgatgctatcttccgatgaaacgcctaccgttccatcgccacatacgctgtagtccaaagccgcattcaacttcaatcgccggagtgttgtccaggcctctcaacgtgacttcatttgccctgacactcatcaccagatgatatcgtccgtggtgcgacatgtagacctgatggaggcattttccgctgctacaaaacgtaaggcggtcgccacatctgagttcatgaagatgaagagcgatgagacgaacgttcccaacgtcaatgaagcggctgaagccacgcgttgttgtcaattcatcgccacataccttcctgtatttttgaaggcctgcccgcacttccgccggcaggttttgcacgtagaaaggactgggttgattgtcatggacaggagaacttgcgagcgagagggccggcgagacaaagaaaagtgacgtcatagcggctaagattgccacgtcacggagccgattcgatcttttcatgctgaaacctccacttccaacggctgtttctctcgttcgacgacggctgcggagcggcgctccatccatcggtagatcgccggcaacagcagcagcgtcagaacggtggacgacaggacgccgccgatgacgacagtggcgagcggtcgttgcacctccgctcccgcgccctgtgaaatcgccatcggtacgaagccgattcccgcgaccatggcggtcgacaataccggacggagccgatccgtggcggcttgccggactgcctcgataacaggcagcttccgccgcaacgcattgatatgatcgatcagaacgagaccattcagcatcgcgatgccggagaccgcgataaagccgatcgcggcggtgatcgagaatggcatgtcacgtagccagagtgccagcacgccaccggtgatcgcaaacggaataccggtatagacgacggcggcatgacggacgctccccaacgccgaataaacgagcaagaagatcatcagcagcgccgccggcacgacgatcatcagacgggctcgggccgcttctagctgacggaactggcctccgaactcgatgcgataggattcaggcagcgcaagcttgccgtcgaggcgtgcacgcgctgcggtcacataaccttcgatgtcgctggtgttgagattgaccatcaaggcggcgcggcgcttaccattgtcgtgcaggatcggttcgaccgttctcatctcgcgcagacttgcaacgcggtccagcggcacaaggccggacgcgccgacgcgcaatggaagggagaggatcgattttgtgtccgcgcgtaaggactcgggcatacgaacgacgatcgcgtgtcgatgctctccgtccgcgatgaagccgacctcgtccccaccgatcgctgacgcaatggcacggttgacctcggcggttcccagccccaaccgcaccatcgcgtcgtgattgatctcgaccaccacactgtgggtgcggctggccgcttcgaatgcggcattggcggtgccgggcacgccttgcaattcctctcgcgcctgcgcggcgagccgctcaagcacgtcgtagtcgtctccgaatatcttgaccgacagatccgcccgcgtgccctccaacatttcgttgaagcgcatctcgataggctgcgcgaaaaggaatgactgctccggcgccagcgcagtggcagccttttcgatcgccgcaaccagctcgctcttgttgcgcggcatgtccggaccttgcggccattggtcgagcggcttgtagaagatgtagaggtcgttctcattcggcggcatcgggtcggtcgcaaccgcgctggtgccgatgcgggagaaggttcgggtcacttgcggaaagcgacgcaaaatttcacgctcggtttgctgctcgatctcaaggctacggtcgagcgacatccccacgggcttgtagaccatcgccgtgatggagccctcatcgaggcgtggcgtaaactgcgagccaagggtcaggaatatcctcaatgccacggccaacaggactgccgatggaacgagaagggcagcgggatgacggagggcgaagtccaggacgggacggtagccccggatcacgaggccggcgaagccaccgttatgcgtgatgtggttgtcggcggttatctccgggagagaatcttccttttcactgacgctcggctgacgcaccttctcgcctcgtagcagccgggcgcacagcgccggcactagcgtaaaggtaacgatcagcgccgctgccagcgccagcatcacggcttgcgccatcggctgaaacagcttcccctcgacgccgcccaggctgagtaccggcacataaaccagcgcgatgatggccatgccgaagaacacgggccgcgccacgccccccgcagcgttgatgacgatgcgacggcgttcatcggccgtcagctcgcgccccttgaggcgctgtgcctcgcccatcagacgcaatgtgttttccacgacgacgatcgcgccatctacgaccaggccgaagtcgagcgcgccgaggctcatcagattgcccgatataccgagcgcatgcatgcccgagatcatcatgagaaaggccagcgggatgaccgacgcgacgataaatgccgcgcgccagttgccgaccacgatcagcaatacgacggcgaccagcaacgctccctcgccaaggttgcgctcgaccgtcgcgatggtgcgatccaccaattctgaacgatcgtactgaacctgaaggatcatgcctttgggcagcgcggcgcgcaggttcggcaattgcgcatcgacgcgccgggcaacgtcccggctgttctgcccgaccagcatcatcactgtgccgagcacggtttccttgccgttggtggtcgcggcgccatcgcgtggagcatggccgatggtcacggtcgccagatccgctacagtcagcggccgcacgccacctgcgaatttcacgggtaatgcgcggatcatctccgccgtcgtgacacgcgcttcggttcggacggtgaagcgttggccgttcttggtgatggtcccgccgccggcattggcgacgttggcgccaacagcctgggcaagctcgctcggcgtgatgcccgctgtcgtgagcttcttcagatcaggctcgatgacaaactgacgttcgaggccgccgttggaattgacgtcggcgaccccctcgatcgcgcgcagcatcgggcgcacgatatattcctgagcctcgaacaactccatcagttgttgccgctcgtccaaatcggacggcggttgcgcccattcgagtgtgtagtaccagatttcgccaagcccggtggtgatcggagcgaggcgcggcgatgatccggctggcagcatgtcgcgcactgcggaaagccgctcgttgacgaattggcgtgcgcgaagctggtccgtgccgtcctgatagatgagcgtgacctgtgacagtccggtcttggtgagcgatcgcatttcccgcaggcccggctgaccacccatgctgcgctcgatgggcagcgtcacaagacgctcgatttcctctggcgccagggcaggaacagtcgtgttgatctgcacctgcacgcctgtgatgtcgggaatgacatcgatttgcagattcacgaaagaccagattccaagaccagcgatcagcaaagcgatgatcatcaccgtggctggtcgaccggttgtccattccagaatccgccgcgtcatcgggacacgccgtcgaagctgcggccgccattgagcgcccgaagttgaagcatcgcttccatagcctcacgtcgcgtgtcgagcagagccgacagcgcgtccagatactggcgctgcatctcgacgtaagttgcgatcgggatcgctccctggcgataactatcggcggcggcggtagctgcggccgcaaatttctcggtggccccggctggccagcccgcaagggctcgacgcttcgcctcgtagtaggctgcctgttcgtaaacctgcctcgcgatccgtcggttggcggcgagcagggccgcatcgccctgggattgacggctcaactcctgtgcgaggccagcagcctggctattccaaagcggcaacgtcgtcgtcagccgtatgccgaaattggtctcgcggctgtctgacttcgcgcgattgaagtagggaccgactgagacgttcggcacacgcgctgcttgtgcgaggtcaacgcgcaacccttgctgctgcaattgcgcgcgcagcgactgaatctcgaaattgttgatgccagcttgttgcgccatgcgctcgaccgacggaaggccgggcagcgtgatatcgggcggagcaatgcggagccgcgctttgagcggcgcgccgcgaagttgattcagttcgtagacgatcgtgctggtctcggaatcagccatcgcggcatttcgctccgccgtgatggcacccgcatccagaatggccgtgtccagcgtggtggcgatgcccgccggatcccgctgctccacaacgcgtgcaagctcgcgcatccgcgcggcaacgtcgcgtgccgcggcggctttccgctcggccgcgaacaaggcatatcccaaagagcgtgcccggcttgcgagcgttgcgtcgaattgcgcaagaccgagccgcgccagcgcgatctgatgctcggcgatggcgcgacggagcgccccgcgtccggcaaagtcgagcggctgcataatcgacaagccatatgtcggcccggcgcctttcggtgcacctgtcaggccgtcggccatccggcgttcgcctaactcgaatgcagcttcagggtccggcaggcgatcagccgcgtcgcgctcaacacctgcaagcccgatctgctggaaataaaagcgtcgttcggggttacttgccacgacggaattggcaagtgcatcaatcgacagcacggcggcctgctgagcgaaggctggggtcaccaagataattgttgatatgcgaacgattatcaggagcaattttaacattggcacgagtctcaacactgacttctagacgcctgattgccacgctagtctgaacacaagctgtcagcgtaaatgcaggttgatccagtatcggactgcagcaatcaggagacatgaccattcgcattcttcttgtcgaagacgatcaggacattggcgcccgcctgaaggaagggttggccagctttggctttgtcgttgagcatgtggaagatggtgagcacgccctttccttcgcgctgcaagaagaattcgacgcgatcgttctcgatctcggtttacccggcctgtcaggcatcgaggtcttacggaggttgcgacgtaccggggccgccacaccggtcctgatcctgacggcgcgcagcagctggactgagaaggtggaaggtctcaatgcaggggctgatgactatgtggcgaagccgtttcacgtcgacgaagtcgcagctcgcctgcgcgcgctgatgcggcgcgtcgcgggccaagccacctccgaattgcgccacggagatatcgtgcttgaccccgttgccggcaccgccaatgttgcgggccagccgatcgaattgacggcacaggaatttcgcctgctccacctcttcctgcatcgcgtcggccgcgtcgtgacgcaagccgagttgctcgacc

SEQ ID NO: 223 - DNA, 2537 bp, Bradyrhizobium colbertium
tgacttatcactcgaatgcaaaaccgcgcaggaattctgcgcccgcctcatgagagaggtcgaatctcgtgaccctagagacgactattcggccatatgtatcgacattctatgatgcgattcgataaagcaatcttttttctatgtgagctttttccgccccggtttcctgcgcgctgtagcgaggctcttatctccgacagtgtgctccttgaatacgtcacttaatgacgcaatcgcttcttcgcatacgcgaagctgttctccacgatcaatgcttcgcaggccagcgatcacgcgaatatggataacctcaatctgctgagcgaatatcgtcgcacgaaacaacctatcataaggtcgccagataagagttccgatcacggacgacactcccagcgagccaaatattccgccccacgcgaagctgcccgttgtgatcgacataaccaccgcaattacgatcatcaatatgatcaacgagaaacagatgactgtcattgccatcccaatgcgccaagccgacttcactctttcgcgagcgcttgtaaacacctccgaaacctgatcgaggattgctgcctcgggctctgcagcggaaatggaaacctgccgatttccctctgcaaataatactagcgtttcctgttcgagattggctcgaatatctcgtagtgcaaccaccgccgttgctgtgccagcatcctgatcgtgttttgcgcgaagctgccgttgctcaattgtcgtaaacgatacatcagatggtatatctgataaaattgatctcgctattgaagcagcagtacgagcttcaataacttcgcgatcggggctaacggatagcagttgagctacgaagtttgctatgcgcgccttcagaccgcctggaagacgcgtgaatgcctcattatgctttgcgatgagatccgaaacggaacgatcggttagaggccgatcgtaacttgtctggctggtgagcaattcgagggagataatccccaaagcataaacatcgacgtaggtatcaacaggcgtgccagccaacatccctcgactaacggtgatgcgatcggtatgaacccgctcgctgtgggctgaagctccctctctaaacacgggatgcaagtaccgccacgtcgaaacaagctccacagcattatcaagtctacggatcatcccgaagtcgataaggcggacctcttcatgatctgatcgaacgaggatatttgaaggcttgagatcggcatgaacgacctgcgcggcatgcaactcggccagagcttcggcaacttccgcaataaaatggaagtttgttcgtagcccctccgtaccgttccttataatatcagctaagctattgtaatcattaaaaaatggcagtatctgataatcaaattggtcaagttctcctacagctatcggagccgcccatctcgctaaggggatgccagacaggagactatgcagtgcgatcaagtggcgctggtagtcgccttgagcggaggtgcgcttgggaaaaaatttaactacgacatcagagcttgccagggtatctctcgcaagccaagttgccccagacaaccctagacctaattgcctgaccagcgagtatcgcccatcgatcgataggccaggtttaatctgatcattattcaagatattcgcagcccatcgagttgaaacgacccacattcaactacagcgagctttgtggcacaacaagcgattgaataattcaaatgcgggggcaagatgacttcagtcttgctggcttccgaaatgggctaacccgccctgcccccctcgcacgaatgatttccgcagcccatagcccgtccagtttgcgcagtgaataagctaaggagcgaagcccaccgcctccccgatctcctccgccccaacctccgcctcgtcttcgtcggcaccgccgcctcgacgcgctcggcggagctcgggcactactacgcccatcccggcaaccgcttctggcgtgcgctccacgaggccggcatcacgccgcggcgctatcagccaagcgagttcgcttcgctgatcaaactcgggattggcttcaccgatctctccaagaccggcgccgggatggatcaccagatcgcgccggagacgatcgacatagccggcttcagggcgaagatggagaagcaccagccgcgcgcgattgcgttcacgagcaagaaggcggcgagcttgttttacggccggccgtcggcagcgattgcgctggggcggcagacgcgcgatgcgagcctgccggagatcttcgtgctgccctcgccgtcgggcgcggcgtccgggagctggacgctggagccttggcgggagcttgcggcgtggctttgttcatagggtcagcaaacaatagcgcctcatgctccgctgtcgtcccggcgaaggccgggtacgaccaattgaagggcgggcattgtcggaagccggcgcgcccgttcgtccttggaagcagagtgccaggacgcaaaaacccgtcgttgcgaggagcccttgcgacgaagcaatcc

SEQ ID NO: 224 - DNA, 1305 bp, Bradyrhizobium colbertium
gcgagagcacccgcctgcgcgccgagctcgaccgcttcatggcgacgatcagggccgcgtaagctcgcggcctcctccccggcctccgccctctcgcctccagcggagatggggcagcaatcgatttgtaacggcgcgataaggcgcgccttaacgattgtccgcatcacctaaccggtagttgaggcgccacaaatttaccacagcttatcctttgcccgataacgtgcagaggagccgggaagcgggctgcttccgggctgcgcctggttttccgcgaatggaatggggtgggggaatgtcggtgaagtccacgtcgagcaaatcgaagctgccaacgctgcgttttcgcgcaaaaatcatcctcgggttcgtggcggtgctcgccatcctcgccgtcagcatggcgtttgcctatttcggcttcgagcgaatcgcaggcgccgtggcgtcctaccgcatcagcgtagcggaagccgatctggcgcggacggtcgatcgtgagctgatcgcttatcaagggctggcacgggcctataccctgaccggcgcggcggatgacgagaccgcagccaaggccgctgaaggcaatctgaagagcgcgatcgccaagtcgatggccgccacgaccggcgccgcccgacgcgagcaggtcggcaagctcgagaccgaattccagagcttcacgaaagtcttcagcgagatcatcaagctgacgcgcgagaacaacaagatcgcgaccgacgagctcaacagtgtcggcaacaagatccgcttcaaattcgacgatctcgccgataccgcagcactggcgggcctaaactcggtccagagcacggccaaggacgtgacctcgcaatatctggcagtctcaacttcggtcagcgccttcgtggccaagccggagccgaagacggccgacggcgtgatcgcccgcatcaagttcctggaaacgctgctggtttccatctacgcgaatgaccagaagatcacggaccgcgtcaaggagatcggcgatctcttgaaacagtaccgggcctcgttcgcaaagctgaccgaaaatgtgaaagtcatcgtcaagctgaacggcgagatgaccaagaccgcggcgacgatcctcaagctctcggccgatctgcgttcggatctgactgccgaccagcaacgcatcgagacgagcgccaatagcaccatccttgaaacccagcagctgatgctgatgatggcgttgggcgggctggccgtgggcatcgtgctggccttgtggctcggcaacggcatctcgcgtccgatgatcgcgatgtg

SEQ ID NO: 225 - DNA, 19390 bp, Bradyrhizobium colbertium
atgcggcgatggagcacgaccgagacgagccaggcgatcgcgaacagcgcgatgaccacgaagccgacatcggcaagcgactcgttgaggctctcgaccagcgtccacatgccgccggagaggccgaggcggtcgctgatcagcccaaacgcctcgaccccgccgatgaacagcgccactgcgacggaggccccggtgatcgtgaggttgtaccagagcttgcgcatcggatcgacgaaggcccagcgataggcgctgaccatcaacgcggaatcggcagtgtcgaccagcgccatgcctgatgcgaacagcgccgggaagacgaggatatcggcaagcgaagcaccgcgcgcagcttcgctggcggagatgctgagcaggccgatctcggtcgctgtgtcgaagccgaggccgaacaggaagccgagcggatacatgtgccaaggcttggtcaccaggcggaacatcgggccgagcaagcgcgcgagaaggccgcgatgggcgagcagcctgtcgagacctgcggcatcgtgaaggccctgctcgcgcgccgtgcgaaacgtccgccacaggccggcgaagatggcgagattgatggctgcgattacgagcaggaacagcgccgacaccgatgtcccgatcaggccgccgatctccttgagcaggctgtcgccgccaaggctgacgacgccgaatgccagcagcatggtcgcgacgacgacgacggtggaatggccgagggcgaaatagaggccgacgctgcgcggcgtctcacctgcctgcatcagcttgcgcacgacgttgtcgatggcggcgatgtgatcggcatcgacggcgtggcgaaggccgaacacccaggccagcagcgcggtcgccatgatggtcggccggtcgccgaacgccgcgaaggcccaggcccatgcagcgacgttggcggcgataagcccgccgaacagcaacgccattccgggctcgaccgcccgcaaagacaatttcgtcacgccaaacattccgtccgttacacgccccgtcccgccatcagtatgatcttttcataggatggtcatactgaccagtgcaattccaacgcacccggaccgggcgcgcgcagagctggccgcgcttcaaggcccagcacgggtgtcgggacctggcgctatcgcctcggcgctgtgacgacttacaatgacatgatgctcatcccggcgagcccgccagcgccccgtcggatgccgccgtcccggtccagcccagcgccggcgcgaccttttctgccacgaggtcgatcgagcgcagcacgtaaggatgcggcgcatcgaccgaatgcgcctggaacaccagatccgtcacccgctccagcgtggcatccgagcggagcgaagcgatgacctcgtcggcggtaccgacatgggtatcaaacgccgcgatcatttcctgcagggtctcgcccggcctggcgtggccgcccttgaggaactgcggcaacgcgcggcgcagtccgatctctgcgaagcgcatcgcctcgccatggtcgtcggccacgaagacgctgcgcgatgccatgatgcgcggctcgcagccgtgtggcagcgccccgagataggcatcgatgatcgggttctggatctcggcgagcgtggccttgggcgcctccttggatcgcggctgcgtccgcgacagcatgaggccatcgccggccttgccggcgcgggcgccgcccgcgaccgagaatgtcgcctgccagatgcgcttgtccaattgcggccgctgcggatagagcgtatcgccaccggcgagcggcttgcctagcaaggccgtgcggacgatctcgagattgcgcgcaaagatctcgttgcgttgggcgctatcgaggccgaaggcggcaaaggcggacgggttgccgccggtgccgacgccgagttcgaagcgcccgttgcagaggagatcgagcaccgcggcgtcctctgcaaccctgaccgcattctccagcggcagagtgacgatgccggtgccgaggcggatacgcgaggtctgggcggcggcgtaaccgagaaacgcgaaaggcgacggcaggccaccctcctgctcgtggaagtgatgctgcgcgatccacgcggaatccaggcccgctctttcggcgtgcacgatctgctcggccgcgaagcgatatcgctcggcggccggagcctcgtcgagcagccgcgtaaagaagcccaggcgtttcaggcttgcaaggcgtatcatacgacccctgtcggcgaggttggccacgtcccgatgatgtcgattgccgcagttccaggcaagcggccatggcgcaaggctgcccgcgggatcgggccggcgccgcgcaatccggctacggcggctcgggcccgccgcacctctttgactccgccgagcccgacgtgctgaactggcgagcacacagccggtgacgacgttgcttcgagggtggaggtcatctgatgaacgagaacgaaatccgcaaatgcatcgcagaggtaaagcaaggcacgctgtcgcggcgctctttcattaagacactggccgcgctcggaatcgccgcgccggtcgcgagccagatcctcgcctggcacgacgtcgccatggcggacgccacgcttgcctacaagccgaccaaggctggcggcggcggcacgctcaaaatcctgctctggcaggcgcccaccctgctcaatccccatttcgcgctcggcaccaaggaccagatcgccgcgcgcatcttcttcgagccgctcgccggctgggacaaggagggcaacctcattccctgccttgccgccgaggctccgaccaaggcgaacggcggccttgctgcggacggcatgagcgtggtgtggaagctcaagcagggcgtcaagtggcatgacggcaagccgttcaccgccgacgatgtcgtcttcacctggcagtatgccgccgacctcgccaccgcggcatacacgacgggctcctacaaggacatcaaggtcgagaagatcgacgaccataccgtgaaggtgaacttcagggccccgacgccgttctgggccgatccgttcgtcggctcggtcgggatggtcctgccgaagcatcatttcggcgactatgtcggcgccaagtcgcgcgaagcgccaggcaatctgaagccggtcggcaccggcccgtacaagttcgtcgagttcaagccgggcgacatgatccgtgccgagcgcaatcccgactatcacatcaagaaccagccgcatttcgacacgctcgaggtcaagggcggcggtgatgctgtatcggcggcacgtgccgtgctgcagactggcgaatacgactttgcctggaacatgcaggtggaggaggaggtgctcaagcgcatggaggccggcggcaagggcaagctcgacatcacgccgtccggcaatgtcgagttcatcatcctcaacacgacggacccgtggaccgaggtcgacggcgagcgctccagcgtcaagaccaagcacccgaccctgtccgatcctgccgtgcgccgcgcgatcaacctcctgatcgaccgcgactcgatccagaagttcatctatgggcgcggcgccatagccaccgcgagcttcgtcaacgcgcccaagcagttcaagtcgcccaagctgaaatacgagttcgatatcgacaaggccaacaagatcctcgacgaggccggctggaccaggggcgcggacggcatccgagagaaggacggcaagaagctcaaatacgtgttccagacctcgaccaacgcgccgcggcagaagacgcaggctatcatcaagcaggcctgccagaaggccggcatcgagatcgagatcaaggcggtcaccgcctcggtgttcttctcctccgacgtcggcaatcccgacacatattcgaaattctatgccgatatggagatgtacaacacgacgcagccgcagcccgatccggaacgcctactgaaccagtgcgtgtcctgggagatcgccaccaaggacaacaagtggctcggccgcaacaactcgcgctattccgaccccgaggccgacaaggcctacaaggccgcgcagaacgagctcgatccggtcaagcgcgccgcgctgctgatgaaggtcgacgagatcttttgcggggcgaacgtgttcctgccgctgctctcgcgccacgtcgtcaacgccagcgtcaacaacttgatgatcgacatctccggctgggacaccatcacgtggaatgtggccgcgtggcatcggagctgaggggcggtgagcgcctatttttgcggcgcagcgcgagcctcggaacgctgcaccgaatcccctccactgtgtgctccagatcacagcagaatcacgcgccttcccctacaaggattgtgcatggccgcaaacaaggtaacggcggtacgcacgaggctgggaagacgatcaacagctacggacttcgcaaagccgtcagggtgaagaacccggcggctttttccttgctttcgaacggcatcggctacggcgtgcagcggacgcggacaccacgcgcctacgaggcgcccgagccctttcgctcctcgcgttcatcctcgatctggcgttcggcttcgagccaaaagtccagctcccgattgctcggccggccggcctgttcccagagctcataggcgcgagtgcgcaccttgccacgacgcatcatgcgaaggagccttcttttcagctcatcggcgaagcttctgaagcgttgcccggtgctttcgtccctgacgagcgaggccgctcgcgtggcgaggtcgatctggtgctctagttttctctgctcatccaccgcgaaactgccgtgggaacgatcgttgtcggagccgtgcggacactcaattctcttcctggatggtccgttccccctggatggagcgcgcgggaagtgatcacctttgcacttgaatcgaagcagccaacgccgctagtgccatgtggtatcggcttcgacgatcaccactctgacttcagggtcctcggccgtgttgcaggtgcagggcatgccctcgccgcagcggcagccgccgagcttctcgctccagacccggagcggatggttttcgcagacccatccaataccctggcagaatgggcaggccttgtcggtcacagcgtatccggggtccgcaacgtgttcgacttgtcctcgttgcgcagatcctgctcggctgcgtgccagaattcctcctcgcggccttcgggcttgccggcctgctcccacaattgatgcgcgcgttctctgatctcttgctcggtcggctcggacaattgcacctcctgcttgggaagcacggccccacccttggggggtatggggggcttggaggcggggccgtgcagaccagcgatcggcggcgatgctggcccacggagtcaagcttcgaccacgggcaagagttccttcgcctgaccgcgaccgggcggaatccattccgaccagcgaatttcgctcgattgtcgtgcaggggcacggcacggcggctcgcaaaaacctcgggccacggtcggttccggggcaaatgtgaagatcaaggatcgattctgtttcgcggcctcctctaacacccctatccagaactgttcgcgcaagcgcgaaaaagctctcgtaccgaacggaaaaccgcgccgaccgcatccgcgacgaggtgattgcgaaacggcgcaatccccgtctgcgccgcaaggcttccgcggtagaaaacaggcctcttccgtccaaccttggccgctacttggacgatccacgcgaagacatcggcagcctccaacaattgtctaccacggccgcttctgacccgtccgtttccacacaaccaagatcatagcgaacattcgaggccgtctctagagttggtctttcgtcttgtttcaccggcatcgacgccggcgcgtttgcgaagaaccacggaacgctcttgcgttccgtggttcggttcagtcggcgatggatcagacgaagcggaaatcgtctgccgcgagcgaggccatctgcatattggccagggtcacggtgttgtcggcatcgagcgtcacgacgacgttgttgccgacctgcgtggtgtgcgacatcacttcggcgaagtcggcgaacaggctgctcgagaattgcagcacgtcggccgagccaccggtggcggcgaagtcggtgacggtgtccttgccgaagccggcggcgaacgtgaacacgtcggcgcccgaaccaccggacaggatgtcgttgccggcatcgcccgcgaggatgtcggcacccgagccacccttgatggtgtcgttgccggcaccgccattcagcatgtcgttctcggagccgccatcgatgttgtcgtcgccgtcgccgccggagacgacgtcgacccccgaaccgcccttcaacgtgtccttgccgacgccaccctcgatcacgtcgttgccggagccaccgtcgacgctatcgtcgccttggccgccacgcagcgtgtcattgccggcaccaccggcgatgacatcgttaccggctccgccatcgaacatatcggcgccgttgccgcctgtgacatggtccgcaccggcaccgagcacgaagccctcgatgccgctgaagtggtcggtgccaatgcctgcgccggtcgcggtgccggacaccaggttgatggtgaccgcaccggtggcgtcggacagatccaacagatcctgaccgaagccgccgtcgatggtgtcgtcaccagcaccgccacggagcacgtcgtcgccgaagccgccgagcagcacgtcgtcaccggcgccgccgatcagcaggtcattgccaaggccgccattcagggtgttggctccggccgagccgatcagcgtgtcgtcatacgccgtgcctaccgcgttctcgatcccggcgagatggtcggcgcccgggatgtagccgggatagtaggccagcccggagtcgagatcgatcgtcagcttgaacgagatgttgctgtagtcgatggtgtcgacgccgtcgccgccatcgtagcgatccagaccatagccgccgatgaaggtgtcgtcgccggcgccgccgaacaccagatcgttgccaaggccgccgacgatcgtatcgctgccgccggttccggtgcgcagcgtccaggtgccgtcggcgaagccgagttcctcgatgttgctgagcgtgtcggtgccgtcggtgccggcctgatcagcgatgttcaccgagtcatcggcgttcagcgtcatcgcgtaaccggcaatcgcgccggagaaggtcgcggtgtcggtcccggcgccgccgtcgatgatgtcgtcaccggcaccaccaatgatcagatcgtcgccgtcgttgccgtagatctcgtcgttgcctgcatcgccgtagacggtgtcgttgccctggttggcatagatccgatcgttgccttcgccgccgtggatggtgtcgttaccgaacgaggtgtagatctcgtcattcccggcaccgccgtcgatctccatcttggtcgagatccagtcgttggagatcaagatatcgttgccgtcgccgagcaggatatggccctggatatcggacccgatccagatgttgacgaagtcgtcgccggcgccgagatcgaccttgccgacgatcttgccggtgttgccgagcctgtcgttgccgtcgccgaagctgacgtcgccggtgatgacgccggagctctggttgatcagctcgtcggcaccggcgccgagcaggacgtcgccggtgatgatggcgcggttgacgatcagatcgtcaccctcgcccatgttcaccgctgatccgccggtggcggtgatcgagccgtcattgctcagcgtgtcgctgccgccgcccatcgagacgccgccgacgatctgaccggtggcgctgttggtgaggctgtcggcatatgtgccgaccaggttgatcgcctcgttgccgcgcaggtcgaaccgcgccgcatcctcgggggtgaccccttccggaccgtggccgtcacccttgatcaggccgtggttgacgatggtcgtcacccccagcgcgttggcgttgctggagttgtcgacctggatcgcacggccgtagccgtagatctcgccgccggcattgttgacgatgctgccgccgccgatcgcgatcgcttcggagacgttcggctcgccgtcgtgatagccctcggcgccgaggcccgagatcttgccgtagttcacgatctgcaccagaccgtcgacatcgatggcgtcgccgtcgctgtcggacagttcggccgagcggccctccatcacgccgtggttggtgatgaacgccttctgcgcttcggtcccgtcggtgtccaggttcacggcggacccgttgcggccgatcatcgtgccactgttgatgacggtgacggcattgtcaccggttacagcgtgacgcgaaccttccatccagccaccagcatagttggtgaccttgccgccggtgtcgctctggaagtcgatcagatcgcctccgcccacgaacgtcggatccgtcgtgatcgtcccccagttgttgacgacgccgtcagtgcccgggcggatcacgtcggtgtcgctgccatgctggcggatgacgcccccggcaaggttgttgatcaccgccgaggcgccgttgttgtcgaaggtgcggaagtcgatgacgcggccgttcgcttcgatcacgccggcgttgttgacgatgatggtcgcgtcggcgtgaccggcccgttccggggtcagcgcgccgcggacgacgccgccggcctggttgtcgagggtcaccgagccggtcgcccccgccgtggtggtgagcgcacgggtcgagcccgagatctcgccggcattgtcgatgaccgcgttgccaccgccctgccagacgatcgcgttgccggacacagagagcgcgccgccggcctcgatggcgacgtgatcgttgttgtccacgacgaggctcgaagccagcatcgcgccgccctggatcgtcacatcgtcgtacgatgccgatccggccaccgaccaagtgcctgcggccaccagcaggttctcgacattgagcgtggcgatcaattccgccgtgccgccgccgatcagcttgacggtgtcgttgccggcgccgccgtcgatcgagcccggcgcggggtcgtcggtggagacgatgatgagatcgtcgccgtcaccggcttccgcggtgtcgccggcgccagccatcagttcgtcgttgccgtcgccgccttgcaaggtgtcatagccttcgccgccgatcaggacgtcgtcgccatcgccgccggtcagggtgtcgtcaccgtcgccgcccaccagccggtcgtcgccagcgccaccgtcgagcgtgtcgtcgcctgcaccgccaagcagcgtgtcgtcgccatcgccgccggacagggtatcatcgccctcgccgccatcgagttgatcgtcgccgccgagcccggcgaggacgtcgtcgcccccgaggccggtgaggacgtcgtctccgagcgcgccggcgagttggttgtcaccgtcgtcgccgaccagcaccagcgcctctgtttcgagcaccgtgtcttgacgatagtcgaggttctggatgcgctcgtcgtgcgcccggtcggtgtcggcgacgtcgtagggcgtgtcggagtagttcgccgccatgtattcggcgaaggcatcctgctcggtgccctcggtggcgaagttcgcctcctgccccgcatctggaactaggtctggcgacagattgacgacgttggcaaaggtgggattggccgtgatgaagctcgcgaacggatagccgtcgccgccggtgagcaggaagctcaaggtcacgacccggatcgccatcttcggatcgaccaccagttcgccgttcgcgaccaacgccagcaccgggttgccgttgtcatcgatcagcgctgccgactgcacgcggttgccggccggcaaatccttgtcgaacgagaatgcgatgccgccgacctgggcgaactggccgggcgtcgcggtcgccgtggtcgccgccactgcgtgctcgagcaccttgagcagctgatccgcggtcaccgtgaccatcgacagcgcgttgttgaagcgcagcgagttggcgatatcgagctgcgacacctcgcccgcttccttgccgacgctggtgttcgccagcggcgggctctccaccgcttcgccaccgaccgcatagacgtagccgatcgagtcgcggatgccgccgccgttcttgatcgaaaccagcacggtcgggtcgaccttctgggcgtaccacaggttcgcatcggcggagaggtcgccgaggttggtctcctcggtgcgagcctcgctgcgacggccctcgagatagacgtccgtcttgccgaaagtgttgccgtcctgcgcgtcgatgatgccgcccaccgcctgggcgatgtcgttgaccagatcgccgcggccgccgtcggcaaacggatcggcgtcgtcggtatccacgtcgccgtcatggtcgacgtcgaccgtggtgttgccgtcgtacagggaggtgaccacctcttccgtgctggcgtaggcgccattgaccgccgagttggcggtgtagatcacgttgccttcagcatcgaaatcgaccaccagtcgtccgacataggagtattcgccggaggtgttgacgataagcgtggttttgccgtcggcgttcgcggcgacgatcggataggtgtcggcagcggtctcgccgacacggagcgtgtcggtctcgtccgccagcagcgtgtgcgagccgccggcgacgatgacgtcgacgccgtgcagcaggggcgccagcgccttttcgagcgcgagctgctgcagatggctgaccaggatgatcttgttgatgccctgagccagcagaccatcgatcgtcggctgcaggattgccgccagagccgccatgtcatcgacattgtcgccgatcacttcgacgccgccggtcgaggagatgctctgcacgatctgggtggtcgcgccgatcacgccgatcttttcgccgttctcctcgatgaccgtggccggcgcgatcttcttgccgataccggccaccggcgggaagccggtgtagacgtcggcatcctggatcgtgccggggtagaccgaagcgagattggcatcggccgagaagtccagattggccgcgaggtacgggaactgcgcgccgggatatccggcggtctgcttgatgatgtcggcgaacgccttggtgccggcgtcgaattcgtgattgccgatcgccgaggcctgcacgccgatgatgttcagcatcgccatgtcggcggtgccgaagccgggcgagatgttcagcgtcccggcagcgaggccgtaataggtttccagcgcggtttcgtagacctccttcagcgagctgtcgctgccggcgctgaagaacgggctgggaatgaaattatctcccgaagacagcgtgatcgagttgtcgtaggtctcctcgagataatcgacgatcgccgcgaagttgccggcgcgatcgactgcgttcaggcccgcctcgaagtccgatgcatgcaggatttgcagcgtgtaagccggagtcggctcctgttcccccagattgaggcccacgatcaccgggtcgtggtcggacacccggatcgaggagtcgccgtcgaagatcgaggtgtcgcggccatagtcggtattgtagtcgagcgcgtcggcctcgtcggcattgatgtgccaggtggtcacaccggacacctgcccgccgaggctggcattggcgaaggcatagtcgagcgtgccggtctggccgtcgaatacataggaataagcgccgtcctcgcgatcctgcagattctcatagcccgcgctctcgatgagagcggtcgactgctccttggcgtagccgttaaaatcgccgagcagcatcacgtccggatcgcccgagccggtcggatcgctcgccgcccacgcggtcagcgctttggcggccagctcgcgctggttctgccagttgccctggccgtcgccctgatcggaatcggcgccggagccggtaccgctcttggacttgagatggttggcgatcgccgtgaaggtttccccggtcgcaagctcctcgaaggtcaccgcgagcgcgttgcggctggtgttctcgccgtcgaacaccgcgccgaccgtgctctgcccgatcaggccgccgaggccgaggccgggcaggtcggcgtcgttgagggtctcgatggtcgtaccgtcggcgatcttcactgcggtggtgtcgtagatgaagccgaccgcgatggcgtcgccgccaacgaactgccggccgggatcgacccaggcataggtaccggccccagccacggcattgagctgttcgaccagatacttgatcgcgttgccggacgatgcagcggagaaatcgttctccagctcggtcagcgccagcacgtcgacgtccatgtcgaggatggtcgcgaccagcttctcggtctgacgtgcaaactccgccgcattgtcggcgccgcgcggcgcttcgccgatcgcggtggtgccaccgttgtccagcgtggtgaagtagttcagcacgttgaagctcgcaaccttcaggcggccgccgacgtcttccggcgcatcggtgcgcggattggcgccggcttcgaaggtgttggcgccgtcctcgaccgagcggatccgccaagtcgcccccgaggcggagtttccggcccattgatagtcgagcacgccggtcaggccggtgacggtatcacccatccggaccgcgtcggcggtgccgtagttcggcgtggcggacgggttgtcgttcggatcgaagccgtcgagattgttgatcgcggcgttctggacgttgaggccatcgtcataggtgatggtgcgagcaccgagctccgccagatacgcctggtaggcggcggcgtcgggcgcgctctcctgcgtgaattgctcgggccgttcgcccgccgtcagcttgatctcgttgaaccggtcgagattgtactgctcggtgacggtcagggtctgcggaatcgtgaccagcatgccttcataggcttcaagatcgggctggtaatcgccgtcctggctcagcgtggtgcccatcgccgacaggtcgatctgcaccgccatcgtgtcgacgtcggccaccgcgccggcctggacgaccgaaatgttgctggcggtgagctcggtcaggccgaaatattcgctgatcgagccggtgacgcggacccggtcgccgatctggacgtcggtagcgccgccgtagacgaagatcgcctcggaggtcagcacgttgccgtcggaatcggtggtctcctcctggacatagaagccgttgagattgcggccggcgtcggcatcgccgttctggaagtcgccaaccacgatggcttcgacggtcacagtctgaccgaccatggcgctgctggctccgctgccctgaatcgcgctgatctttgtgatgccgacgtcgtcgttgacgatggtgccggtcgccgtcgtggcgctgccgatcgtggtggtcacgcccaccgaattggaaacgttctgcagcgtcagcgtgaagctctcgctcgcctcattgtcggtgtcgccagcaacggtgacggtcacgatcgcggaggtctctcccgccgcgatgctgccgctgaagctgaccgggttgccgccgacatagtcggccgcatcggtctgtgccgaagcgatcgttcccgagaacgcgacgtcgcccgtggtaccgccgctgcgctcgacgatgaactgatagacggtcggaccgctgttgccttcgtcatgcgacaccgtaagcgaacccggcgcgaaggaaacgtgctgcgcttcgaccgacgattcggatgaactggtgacgcggatgtcgtcgataccgacccactcgtcattgccggcggcgtttgtggtgagaatgcgaacctggatgtcgttgcggccgtcgacggcggcgggcagcagcagatcgaacggcgtcacctgggttgcggcgccaccggtggtggtgtcggcggcgtaaccgctcggaacgttggtccacgacccgctcgaaccgagccggtactgcacgttgatctgctgcgcggagtcgtccgtgccgccgtcgaggtcgcgtgcattgaagctcagccggacgtctttgcggccggtggcgtcgagatggatcacgaggccaggagcatccgcgctgttcgagccgttcagcgccagcgtcgggttggcgatctggaattcggccacaccgccgttggtgatggcggtgttggtctggttggcgatgacgtcgacgtctcccgacgacgatccggtagccgtgcgcgcgtccaccccggtggccgaaacgacatcgttgccgagatagccgacgatcgatgcgacccccgaccaatcatcgttagtcgtgatgaggccggtgttggaccagtcctgcaggaaatcgccgttcgccaggacatgaggggtcgtcgacatgtattgcactccagcgcttgagaagaagacgtcgcggatcgccgcctcacggcatgcgtgagggcgcggtccagacggccgttggttaacggatcgttaatgcgcgttgatagaatgccgacgacaacagatcggtgactgcttcttaacgggccggtgaagtcacaacatggaaagtgccgcgaagaccgcgcgcaccaaccactcctcgcggcgcgctcgacgctcggccgacggcaatcgccattgagtcatcgcgttaaagcttgatcagtccgccgcgagggacgaccacgccaggcttcggttgccgggtggtgcggccgaattccgaaccagagcggcgtttcgtcgcaggatgtcgcgcctggtcgccactggaacgcgttttcgcgcacgcgccgcattgtcatgcgcctgacgttgaacctcgctaacgaacgccggccgcatccgaccgtgactgtccgacgtcgttttgaattgagtatcatgactgcaacaacgtcctccgcgtcgtcccccccgtccggcgatctcgcgtcggccgcgctcgcctcctgcagaacggcctttctgacggtgggactgttctcggcggtgctcaatctgctgatgctcagcggctcgatctacatgcttcaggtgtacgaccgagtcattccatcgcacagcattccgaccttgatcgcactgtcgatcgcggtggcggcggcgtatgcgatgcaagggctgttcgatctgttgcgtcagcgcattctgacgcggatcggatcagcgctgcacgccgcgctgtggcaaccggtcgtctgcaacatcctgcgggggccgctgcgcggcggcggcgcaaatcgcggcctgcaattgtctcatgatctggactcggtccggtcgttcctttccgggctcggcccgacgaccctgttcgacttgccatggatgccgctgtatctcgccggctgctttctcttgcatccctatctcggctggacgttggtcgtgggcgcggtgctgctgttcgggatcgcgctgctcaccgaggtgctgacgcgggcgccgacccgggacgcgtcgcgtgccggcgcaatccgcggcgttcaacttgaagccggtcggcgcaacgccgaaatcgtggccgcgctggggatggagcagcggttgatcgaccggatcggcgccgccaatgacgatctcgtcgccgcccagcagcgcaacgccgatatcgccggatcgctcggcgcgttgtcgaaggcgctgcgcttcatgctgcaatcggcgctgctcggcctcggcgcctatttagtaatcgaggggctggccagcggcggcgtgatgatcgccgcgtcgatcatgggcagccgcgcgctcgcgccggtggagcttgcgatctccatctggcgtccgttcctcggcgcgcgacaggcgggccaacggctccgcgccgctctgcgcaacggcgacgccccgaagcccgacgtcgcccccgaacgcgccgtccatcgactcacggtcgagcaggtaacgatcgccgcccccggcggcacgaccgcgatcgtgcacaacgcctcgttcgtacttgaagccggccaggcggtcggcatcattggcccgtcagccgccggcaaatcgacgctggcgcgggcgctggtcgggatctggccgatcgcacgcggcgagatccgccttgatggcgccaccctcgaccagtggccggcagaaattcgtggcggcatgatcggctatctgccgcaggatgttgaattgttcgacggaacggtggcggagaacatcgcacgtttcgaccgggagatcgacgaggcggcggtgatcgccgcggcgaaggccgccggcgcctacgagatgatcctgaagctgccgaagggcttcgagatgcggatcggcgaagccggcgccaccctgtcgggcggccagcggcagcggatcgcgttggcgcgcgcgctctacaaggatccgttcatggtggtgctcgacgagccgaacgccagcctggacgccgaaggcgacgccgcgctgaccgacgccatccggcgtgtccgggctcgcggcggcattgccgtcatcatcgcgcatcggccggcggcgctcgcggcagtcgatctcgtgttgacgctggcggccggtcaggtgcaagcgttcggcccgaaggacgaagtgctgcgcaaatcgcttgccgctcatccggcgccgggcggggcggcgctgcaggcggtgcccgatgcgcgctcggttccggccgcagccgtcagttgaggacctccacatgaccgccctctccacgcccgaagctcgccgcaacgatccgtttcgcgatatccggcgcgccaccggactcggaatcggtaccttggcgatcgtggtgtccaccgccggagtctgggcgatgaccgcgccgctcgccagcgccgtgatcgcgccggcgcaagtggtggtcgacagcaacgtccgcagggttcagcacccgaccggcggcgtggtcgccgaaatctacgtcaacgacggggatcaggttcgggccggcgatatgctggtccgcctcgacgagacgctgtcgcgcgccaaccttgcgctgatcgaaaaccagctcaaccagcttggggtgcgtcgcgcccggctgcagtccgagcagaacggccgtgacgcggtggtgctgcccggcgagatctccgcacgccgcgccatcggtgcgatcacggagatgatcgagggggagaccacgttgttcgcccggcggcgcgaggcgatcagcggccagcagtcgcagctgcgcgaacgcaaggcgcagatcgtggacgaaatccgcggcctggaggcgcagatcgcgtcgaagcgcgaacagatccgctggatcgaaaccgagctggagggcgtccgtcagctatacgaaaagcgtctggtgccctatgcgcgcctcactgcgctcgagcgcgaggcctcccgcctgaccggcgaggaaggccagctgatcgccgagatcgcgcgcgccaagggccggatcaccgaaaccgaactgcagatcatccagctggttcaggaccagcgccgtgaggtcgcgaccgaactgcgcgacgtcgagaccaagcttgccgacctcggtgaacgccgcatcgccgcgatggaccagctcgatcgcgtggtgttgcgcgcgccgcaagacggcctgatccaccagaaatcggtcttcaccgtcggcggcgtgattactgcgggcgaacagctgatgctgatcgtgccgaaggactcgcttgtggtcgaggcccgggtcgatccacaaatgatcgaccggctcaaggtggggcaatccgccaagctccgcttcagcgcgttcgacgccgccgtgacccccgagctcgacggcacgctgacgcggatcgccgccgacttgaccaaagacccgcagtccggcgcggcttactacgtcgcccgcatcagcctcgacgcgagcgaactcgccaagctcgacggcaaggctttggtgcccggcatgccggttgaagccttcatccagaacggcgtgcggacggcgatcgcctacctgcgcaagccgctggaagatcagctcgcccgcgcgctgcggcagaaataatccaagtccctatcgtcgtcattgttcagcctgctgccacattgccgccagcacgatgtcccgactttcgaagccgctagatcctcggatcctcgccaagtgagcaggcgtggtgtgctgatgctgcctgaatctgtttctggccttggctgccctttgctcagaagccttcgaggtcagctttcgggagacgagccgaccagcgcaattcggcctggccaagcgcagcgttgaccggacaccgacgatctaccgctgtcgcgggtgcgctgctcgtcagttcgcccctttggaaaccggagcactcgcctaaggggatagtcgtgagctagcgacagctttggaggtgccggcgtcttcgtgctggaagtaggccattgcgatttagcttcggtagaaccaccgcgttgagctgacggagctaccgatggcagcgggccaatgattctaatcagcgaaacattgatttcatgatcaggtacttggcttccgaggaggataccaagcaacggatcgcaactgaagcaggagccgttgcgcgtccaggcggagctggctgccctcgaggagacccctacccccatcactgcatccggcaacgctggaccgctacatcgagaccgtcaacgctcttgccaacgtgatagcacgcgatgcaagcgcgaggacgacgggcctcttggtggccgattccaggtcgcttgtgcacagcgtcatcgttcacccgaaagagcctcgggaaggcttcgacgtcaagggaaagctggccgctctggtccggaggcccaccacaacagtgggtcatacgtggtagcgggggagggactcgaacccccgaccccaggattatgattcccgtgctctaaccagctgagctaccccgccacagggatcgcggcggcgaatagggccgatctcgcgaacgcgcggcatataaggaagggggcggcgggaagtcaagcaaagcggcggccttttccgccattgccaggctgtggcgggacgcgccgcctggtgaatacggacctcttttcaacgggttcgtcatggccggccagctagtcccggccataccccaccttcagtcgcggccaagaacccggatgcccggggcaagcccgggcatgacggtctgggaggcgaaaccggcttccgccttcgctcaagcttcggcgggacaggctatttcggcctcacattcgggtcgccgccggggctgccggggggcgggatgaccggggtgttgctgtcggtgctaggcgcggggtcgtgcatgtcgggatcgacgcccgagggctggcagagcacgccgtccgtc

SEQ ID NO: 226 - DNA, 14465 bp, Bradyrhizobium colbertium
gcaacgctcgtgaacgccgacaagacgctgacgacgcttgcagatgccgaggccaaattcgcggcccagggcgtcacgcgcgacaagagcgtgatctgctattgcggcggcggcatctcggcgacgatcgatctgttcctgctggcccaactcggcttccacgagctgacgctctacgacgcctcgatgggcgaatgggcgagagatccgacactgccgatcgagacggattaggtttgcttaccctgatccatcagggcgaaagaaaacccggaaccttttcggccagcctgcatccaatgtcgggaacgaatggagataggtagccgccatgccagggaccgcagccggcccgtccgccggcgccaggacaatggaggccgcactgatcgaccgcgcgcggcgccgggacgagaccgccttgcgggagatcatgcaggccaacaaccggaggctttatcgcctggcgcgcggaatcctgcgcagcgacagcgaagccgaagacgtggtgcaggaaacctatgttcgcgccttcacccgtctcgacggctttcttggcgagtcggcgctatcgacgtggttgtcgcgcattgcgatcaacgaggcgctcggccgcttacgcaatcgaaagccgcaggtcgaactggagtcggtgccggaggcaacgctcgaagcggaaatcatccagttccccctttcttccgccgcagccgatccggaaaagtccatggcccaacgcgagatccagcgcgtcgtcgaacaggcggtcgacgaattgcccgaggcctatcgtatggtcttcaccgcgcgaataatggagggcatgagcatggaggagacggccgagctgctcggtatcaaaccggagaccgttaagacacggttgcaccgcgcgcgcacgctgctgcgcgagaacgtcgagaagaagatcgggccggtgatcatggatgcgtttccgttcgccggccggcgctgcgagcgcctgaccgaggccgtgctcaggcgccttggcgtcggcgcgtaacttttccgggaacgttcgctcgtatttggcatccaacctgtgcaagcaccgccggaaatctccggcctcacaggagtgtcaagccatgttgatccgatggagcgcggcagccgccgcagcgatcatgttgtcgagtcccgtcctgctgcaaaaggcgagcgcagccgacaagcccaccgatccgcagattgcacatatcgcctacaccgcgggcgtcatcgatatcaatgccgccaagcaggcgcaaaagaaggccaaaagcaagaacgtgaaggcgttcgccgaagacatgctccgcgaccacgaggcggtcaacaagcaggcgctcgcactcgtcaagaagctgaacgtcacgcctgaagacaacgaggccagcaaggcgctgtccaggcaggcgagcgacaagctggccgagctcgacaagctcgacggtacagcgttcgacaaggcttatgtcgcgaacgaggttgcctaccacaaggcggtcaatggcgcgctggagacgcagctcattccctcagcgaacaacgcggagctgaagagcctgctgcagaccggcctgaagattttccggggccatcagcagcacgccgagcatgttgcggccgagctgaaatagggagcgagagatgaagccgggacgcctcgcttcgaccgcgcttgcggtcgtcttcctgtcgatggtcgtcccggcgcatgccgcgaccattcggatcacgatggaggatctcgtgatctcacctgccgatatgtcggcgaaggtcggtgacaccatcgaatggatcaacaaggatgtcttcgcccacactgctacggcgaagaacggcgatttcgatgtgatgctaccgccgcagaaatcggcgaccttcgttttgaagaaggcgggaacgatcgactattactgccgctatcatcccaacatgaaagcgaccctcaaggtcgagccataagggagcgcgttcccgatcgcagcgggaatatctcccggccatcgcgagactaatgcttgtccgctggaaacggtttccgtgcgataaatcgccgtgggcttcgcgacgactttcgcaaagtcattcatccgtcgactggccccgcccgcgtggcggggtcattttcggtgggcttactgcctggagatgccgaccgagaactcgccgttgcgaatgcggccgggaaagccctcgacgaatttcgccaccgcgtcctccccataggtgccgacgagctcggcaaaggccgcgaacaggctcgcctgcgccaggcagtcgccgtcgacgccgtcatggcgcgcctcggcccaggcctcgttcagatagctcagggctgcctgcttctgctcatggtcgggcagtggcgcgcgggcgggtgcgtaggaaatcggctggctcatgaaactcggtcagggctggggcgcgatccacggcgatgcgctgtgcaggaggtgtagcacggtcgttaacgaccgctaggccacatctttaagaacggttaacggctgtgaataaactcggtgacgaggttccagccgggcctcgagtcgatcgcctctgtcattccgggttcgcgactgcgtcgcgccccgaaatgacacgagagagctcagttcgcgtagcgcgccgtgagatcgcgcgagatcttcgagccttcctcgatgtagcggcggatcgccaccgtcgcggccggcgtgcagctccggtaggtttgctgaaaaccgttatagccgcgattgaatccggcgatcatgcgggtgcggcgctccccggagggggtctcggcatcgatgagcgcctgcatctcgttgcgccatttgttgccctcattggccccgcagatgccgcgcagatagtgcaagcccccgaggatctcggccagccgctgcaattcgccgtcgaacggggccgccccgtcctgggccttcgtgggcacggaggcgcaggcaagaatcacggcaagaacggccagaaagcgcggggtcatcggcggctgtatgccccctggagcctgtggacgcaaggcgggccgtcaggtccctatcagccggtgggcggactggatgacctcctccagccctccggtcagcttgaggtcgccaaggccgccgagagcgtccggcgcgacccagcgataatcgtcgagctcgtcgttcagggccggttcgttggcaacccagcgggcggcaaacgacatgatcagataatggccggcgccggcggcggccggcagcacctcgcgccagccggcgagaccaatgatcctgatgcgaaggccggtctcttcgtcgacctcgcggctcagggcctgatgcagcgattcgccgaattcgacccgcccgcccggcagcgaatagaaccccttggcaggcgaacgggcccgccggaccagcagcaccttgccgtcccggaagatcgccgcgctgactgcaagctgggggtgcgtgggttgggcgaccgcggccaatctttcacctatccggccgagttcgccatgatggtatcgacgtcggcttccgtgccgccattgatgatgccgccgcaggccgcgatcagcggcttgacccagagggtcgcctgctcggcgaggcggacacgggtggagtccttttcgacctcgcgcatggccgagccgacggcggtcaggatcgaggtcatggtatcggtgatgtggtcgaactgggcacgcacgttgggatcggccttctcataagcctcgattgccaaatcccgcgccttgaaattcgacgccgtgaaatgctcggcataggatagcggcgtccaggtcaggaagtcctcggcgcattccggcatgtccggaaccatctcgagcagcatcacggcttcattgaaatggttgagatagtcggtggcaagccccgtccgcggattgatattggccacgcgcagacgctcagcccaggcctcagcctcggggcccgtctgtacgtgcgtccgcgcgggttgggaggccgttgagctcatctgccgcagtgttaacgttcggggttaaaaggacctgaacgggccctatatagacacccagtcatgtgtggacgcttcgtcataacttccgcccccgcggctttgcggcaactgttcggctatgtcgagcagccgaatttcccgccccggtacaatgtcgctccgacgcaaccgattccggttgtgctggtcgagaacggcgcgcgccatttccgcctgatgcgctggggcttgctgccgggctgggtcaaggatccgcgcgggttcacgctcctgatcaacgcgcgttccgagaccgtgctggagaagcccgccttcaagaccgcgattcgccgtcggcgcggcctgatcccggccgatggctattacgagtggaagacggaagccggccgcaagcagcccttcttcatccaccgcgccgacggcgagccgcttggctttgcggcggtgttcgaaacctggctcgggctgaacggcgaggagctcgacacagtcgcgatcgtgacggccgccgcaagcgaggacctcgccgcgctgcatgaccgcgtgcccgtgaccatcagtccgcgcgatttcgagcgctggctcgacacaagcggcgacgaggtggacgcgatcctgccgctgatgaccgctccgcgcgtcggcgaattcgcctggcacgccgtctccacccgcgtcaaccgtgtcgccaatgacgacgagcagctcgtgttgccgatcagcgccgaggagatcgaggcggaagcagaggcggccaagccgaagaaggcgcggaaggtggcggctgtgtcatcggacgacgggcaggggtcgttgttctagccgcggtgccgcccctcactccgctgccccgtcgacgatgcgagtgaggcgtcaaacctcacacgatctctcttgcccgaagccccgcaatcgccgccgcatcgaatccgagctcgcccagcacggtatcggtatccgcgcccagttccggcgccatccggtccagcctgccgccgccatgcgcgagcctgaagccgctgccggcgaagcggagcgggccgtagggcgtgtccagttcttgaatggcacctcgcgcggcaatttgcggatgatcgatgacctcctcgaccttccagatgctggcgcagggcgcgccggcgtcttcgaggatcgtctcccattcacgtgccgggcgttgcgccaatgcctcctcgatgatcgcgcgaagcgccggctcgttctcgttgcgggcgaaccagtcggtaaaccgcggatcggttagcgtgtcctcgcggccgagcgcgctcatcagcgcgcggtattgcttctcgttgttgaccgcgagcaggatgtggccgtcgccgcacttgaacaagttcgccgtggtcctgcggctcaccgcctggttgcccgagagctcttgccgatggccggccacggaccagtccgcgatctgtccggacagaaacgccagcgtcgcctccagcatggagacgtcgatgagctgtccctggccggtgcggtcgcgctgatagagcgcgctcgacacgccgaaggcggcggtggcgcccgacagcacgtcgcagaccgcaaagccggcgcgcgtcggtcccgtctcgggatggcccgtgatcgccatgatgcccgacagtgcctgcatcttgccgtcatagccgggccgcaggcggtccgggccggtctggccgaagccggagaccgcgcaatagatcagcttgggattgatcgccgagagcgcctcgtagccgatgccgagcttgtccatcacgcccggacggaaattctccatgacgacgtcgacctgcgcggcaagcttcttcacgatcgcgattgcctccggcttctgcagatcgagcgtcaggctgcgcttgttgccgttgacggcctggaacgccggcgcgagcccgcgctcggcccattcgcggctgagcggcgtgcggcgcatgtcctcgccctcgcgccgctcgaccttgatgacgtcggcgccgagcagcgcgagctggtagctcgcataggggccggcaagcacttgggtaaagtccaggatcttcacgccctcgaacggtcgcgtcacgtcgctctcccttttcgtctagatcattggaggacgtcaggcggcgcggttgccgcgcgcgatctccttctgcttgtcgaattcggcgcggcggcgcgccagctcctcggggctgagctgcgcgacgttgttgtagtcgagcttccaggaggcgtcctcgctccagcgcagcggcgactgcatcgtggtttgcggaccgctcgccgtctccagcagcgtgagcgcgagctccagcgtctgcgcctgcgaggcgacatcctgcggcttgccggcggaattgccgagcgggaaatcgctgaacaagaagcgcggcacggccgcgtgctcgacgatgtccttggcgcagcccatgatcacggtcgggatgccgttgcgctcaagatgccgcgccaccagcgccgtggtctggtgacagaccgggcagttcggcaccagcaccgcgacgtccaccgcgtccgcgaggcaacgcgaaaaaatctccggcgcgtcggtgtcgagcgtgacgcggtggctgcggttcgtgggggcgccgaagaagcgcggggcgacttcgccgatgcgacccgcagcactcgccttcaacagctgcggtagcggaaaccaggtgccgctgtcggtcgccgaggtgtgcttgcggtcgtagccgatgtgcgagatgcgcaaatcgtgctctttcgacgtgtcgccgtcatagacctggtagaatttcgcgctgccgttatacgccgcgccaggcccctggtcgcccctggccggatcgaacggcgcggccgtggtgatgatggtgacgcgcgactttgccagcggcttcttcagcggctcgaacggcgcctcggtgtaatgcgcccagcgatacggcgtggtgtagccgatcgccgcataataatcgcgcgtgcgctgcatgtagggaacgggggagtcgtaatcgggtgcaaagccgaattcgtcgtcgcgcggagcggacatggacgcgtctcctggttcttggttgggcccagactagagatagtttcggggttgctcaacgggggcggaagaacgcaggacaggattgcaatcaagctggggccagcgctgcgctttccctctccccttgtggaagaggggggctcgccgcgttagcggcgagacggatgaggggtctgtctccgcgagtccgatcgcttgtagtcgcggagacagacccctcatccgggtgcttcgcgccacctcccacaaggggagaagggaacaagccagcatcacctacctgaaaacatgcagcgccgcatattgcagcagcatgatcgccttggcgtcgatgatgcggccgtcggcgatcatcgccagcgcctcgtcgatcgaaagctccagcacctcgatgtcctcgccctcgtgttcgagtccgccgccgtcgctgacgcgcatctcaggctcgtattcggcgacgaagaaatgcagcttctcggtgatggcgccggggctcatgaaggcctcgaacaccttgtggacgtcgtgcaggcgatagccggtctcctcctcggcctcggcgcggatgcgcacctcgggggcggcatcgtcgagcacgccggcggcggcctcgatcaggaggtcgtcgtagccgcggatgaaggccggcaggcggaattggcgtaccaggattaccgtgcgccgggcgagattatagggcagcaccgcggcggcattgtcgcgctcgtaggtctcgcggtgctgcgtctgccactcgccattggcgcggcggtactcgaacgtggtggtcttcagcggcgtccaattgtccgagagcacgcggacgtccttgatgcggacgcgatcggaaatggtcatggctggatctcagttgcttggcgtggtcgcgcggccgtcgagccacttctggaacatcacggacgtcgatagctcgaagcccagcgagccatagaacgcattggcctgcgcgttctcgcgccggaccaggagctggagcttggcgatgccctcacgccgcagccagtcctcggcggccgccatgatgaggcggccgaacccgcgcttctggcagttgggatcgaccgcgacgtaatagacccagccgcgatggccgtcatggccgaccatgattgtcgcgacgactgcgccattggcgcggccgaccagcacggtggaattgtcgcatcgccgcgccagcgcgatgtcggtatgcggatcgttccagggccgcgtcaggccgcagcgctgccacagcgcgacgacgccctcgacatcggcatcggtgatcgcttcgatcgcaagcgatgcgctcacagcaccttccccggattcatgatgcccttcggatcgagcatggccttgatcgagcgcatcagctcgatcgcggtcttgtccttcacctccggcaattcgtcgcgcttgagcacgccgatgccgtgctcggccgagatcgagccgcccatgcgcagcacgatctcgaacaccaccgcgttcacctcgtgccagcgcgccagataatccgcggtgtcggcaccgatcggctggctgacattgtagtgcagattgccgtcgccgagatggccgaacggcaccggccgcgcgccggggatcagcttcaccacggcggcatcggcctcggcgatgaaggcaggcacggcggcgacgggcacggagatgtcgtgcttgatcgagccgccttccggcttctgcgccgcggacatctcgtcgcgcagcttccagaacgcaccgcgctgggcgaggcttgcggcgatcaccgcgtcgtcgacgatctcctcctccatggcgcgggcgaggatcgtctccagcggcgtgcgggcgtcctcgcccggagaagacaattccatcagcacgtaccagggatgcttcgcttgaagcggatcgcgcacgtcgatgccgtggcgcaccgagaaatccaccgccatctccgacagcagctcgaagctcgtcagcgcattggcggcttcgccttgcgcgatcgtcagcagcttcaacgccgcgtccggcgacttcaggccgacgaacgcggtctcgatcgcgcgcggcttcggaaacagcttcagcgtcgccgccgtgacgatgccgagcgtgccttccgcgccgatgaagagattgtgcagattgtagccggtgttgtccttcttgagcttcgacagcgtgttgagcacgcggccgtcggccagcaccacctcaaggcccaacgccatctcgcgggcgacgccataggccagcgcggcggtgccgccggcattggtcgagagattgccgccgatggtgcaactgccttcggcgcccagcgacagcggaaacagcctgtcggcctcggccgccttctgttgcgcgatctgcagcaccacgccggcctcgcaggtcatggtgttggaggcggtatcgacctcgcggatcttgtcgaggcggcgcaacgacaccaccacctcgccgttgtgcggcgtctgtcccccgacgagcccggtgttgccgccctgcggcaccagcgcgatgttgtgcgcggaggcgagcttgcagatagccgagacctccgccgtcgagcccgggcgcagcaccagcggcgagcggccgtggaacagattgcgctcctcggtgacgtagggcgcgatgtcgttcgcgtcggtaatcgcgtggcgctcgccgacgatcttgcggaattgctcgatcagctcgggcgcaagcggcgggatggcaggcttttcgatgttcatctcgtcgtcttctttctttcgcgttctagcgcgccaccgccgcccggcgcagccggtcgttgatcgcttcgcccaggccctcctcgggaattgccattacggcgatcgctcgcggccttcgcgcatccaggctgcgaagatagccgaacaggttggcggcggcttcatcgagatcaccggtgggcgacaaattcatgacggcggcagccgcatcgacgcccggcagccgcgcggggccgaacgcgagcagcgcttcgtccggggcgacatcgcgcgcatcgagccgcacatgggcgcgcggcgcgtaatgcgaggccagcatgcccggagccagcggctggctgtcgtcgctttcggcctccacgggcggccgcgccagcggcaggccgagcaccgcctcgatccgctcccgcgacagcccgccgggccgcagcaacatcggcatgtcgaagcagccgacaatggtggattcgacgccgaccgtaacaggcccgccgtccacgatcaggtcgatccgccccgacaggtcgctctcgacatgggcggccagcgtcggcgagacgtggccggagatgttggcggacggcgccaccacggcccctccgaacgcgcgcaggatcgcctgcgcgaccgggtgggcggggatgcggatggcgacggtgtcgaggcccgcggtggcgaggtccgccaccgggcagccttccgtcttcggcaccaccagcgtcagcggccccggccagaacgcctcggcaaggctcaaggcgcgcgcgtcgaatcgcccgatccgccgcgcggcgttgagatctgcgacatgcgcgatgagcggattgaacgccggccgccccttggcggcgtaaaggtgggcgatcgcggtggcattggcggcgtcggcccccagtccatagaccgtctcggtcggaaacgcgaccagcccgccggccgccagggtccgggcggcggcctccgcgccggccgcgccggccggcaaaatcagcgtttcaagacccgttttcacagggataaaattcctcagcccggccgcttgcggtgcgccaaacccgacgctataagccgccttcttgtcggagtgtggctcagcccggtagagcactgcgttcgggacgcaggggtcgcaggttcgaatcctgccactccgaccattcttccaaaagtcgacgttttgcagaggcttggcagaccggcgccaacgcctcaggccgcctttttgcaacgatttcgggatcgggtccacggccgatttggcggggcagggccgcttgttccggcgacgaaggcgagggcgcgacacgcgccgatggccgccctcagaaccgctcggaccgcaccacctgcgcgtcactgacggagacgagacccatctgccgggcgacgatgcaccacaggacgaacatcccggcggttcgccgacctcgtcgtccgcttcccatcgcccggatcggcctcgcccgtgcgttcgaactcctcggtcaggcgaggcggatgccctaacgtcatcagggtggcggtgctgcctgccgataggccgatgagccaggcgaagcgcgccgcgagcgccgcgccgatcagcggcatcacccaggcaaagcctgcgacggcaggagagagcgatcgccatccatcgcggaggccgcgcccggcgatcaagccatatcgagcaggaagacggaccggaagccggggaatgcaccgaggagaaaaggcttgagcgaggtcatgccgtgttcgcctgtgagacagcccacgcgaatgccggcgtccccatcgcggctgcccccgcgatcatgtggccgttagacgggagcacgagctgggtgagcgcgcgcttgcaacattctgacgaaccgacgcagcgggtacttttgacagggcggtgatccaacattcgcgacgcatcgtttcgtacgggtcgatcgcaagtgatcgggcgatggatgcgccgtctcggacgcatccaccgcatcggcatgcatttgaatcacatctggagaacctgatgacacccgcaattcgttcgtttgtggccggtgcggccatgctcgctggcctggttggcccttccgtcgcgcgtgctgccgacatcgtggacaccgcggtttccgccggctcgttcacgacgctggtgacggccgtgaaggccgccggtctggtgaagaccctcaagagcaagggaccgtttacggtgtttgcgccaaacgatgccgccttcgccaagctgccgcccggaacggtcgaatcgctcttgaagaacaaggccaagcttgcggccgttctgaagtatcatgtcattccgggtcgcgtgaaggctgccgatgtcgccggcaagtcgctgaacgtcgcaaccgttcaaggtcagcccgtcagcgtcgacgggcgtttcggtgtccgcgtcaatgacgcgcacgtcattcagccggacatcgaggcgtcgaatggtgtcatccacgtcatcgatacggtgctgctgccgccggcgcgtgcaaagaagatgcatcactgagagagcgccaacgcgcgcgtacctggccgccgtagcggccgggtatcgtgctgacggcctgctgctgtggggacggatctactctgtgctcccagagcgtttaccgccgcgccaccagcacgcccaccagaaacgccaccatcagtgacggcagcggcgcctcgcgcaccatgccgcggacgaggtccggccagtggtgctcggggaccagccgcggcgatcgcacgtgaggcgccggtgtcaagccccagctcgaggcgagctcggcgatctcgctttgcgccagacgcacgccgtcgcggacgcggaagatcgcggcctcggatcgttcgcgcggcgccagcagcatcaaggtctcgacggccgtgcgcaacgtcatctcgccaaaaccttggagcctgactgattcctcagggtcggacgtcatgccaaatcctcacgcgaagagacgcgcggtggcgaaggccccgcgccaatggaaaatggcggcggcggagcttggttccttgcgcgccttgggaaggggccggcgcggattacttccttagcagctcgctcagggccgccgtcgcctcggcgcagcggatgtcgtcgatctcgcgcgacaggctgagcgcgctcgatttcagctcttcgaccttccagctgtccggatgctggctttccagctggccgagccgcttgttcagatcatccagtctcgattgaagctgcccgatgctggcagctccattcactttccaaacgcgttgtgcacgcatcgtcgttcccctgatcgtctcacggccttgtgaaagcggttcgtggccggaatgggggtttgttttgtccggcttcagatcgtggggaaccgttgcagatcggcaacgaagtcccagcgccgcaagaagtcccagcgccgcaagatgatacccgccggcacggaatttgattgtgctctcggcaccgagggccggcggcctgtgcgcgcggtgcgccgttcggtaggagaggcccggcgcactcggaaaattgggggaatgaggcgtggcgagatttgtgaccgttgcagccggccagctcgggccgatcgcgagaagcgacaccagaaccgcagtggtggcgcggctgatggcgttgatgcgccaggcgcacacaaatggctgcgacctgatcgtctatcccgagctggcgctgaccacgttctttccgcgctggtacttcgaggaccaggccgagatcgacagcttcttcgagcgcgagatgccgggttctgaaacgcaggtgctgttcgatctcgcacgcgagctcggggtcggcttctgcatcggctatgccgagctgaccgccgaagctggaattgtcaggcgctacaacacctccattctcgtcgacaagagcggtgcgatcgtcctgaagtatcgcaaggtccatctgcccggtcatgccgagcacgagccgtggcgcaaatttcagcatctggagaagcgctatttcgagccggggagccgcttcggcgtcgtcgatgccttcggtggcgtgatgggcatggcgatctgcaatgaccggcgctggagcgagacctatcgggtgatgggcctgcagggcgtcgagatggtgatgatcggctacaacacgccggtgcacaatccccccgcgcccgagcatgacgatctttcgctgtttcacaaccagctggtgatgcaggccggcgcctaccagaacggcaccttcgtggtcggcgtcgccaaggccggcgtggaggagggcgtcgaccacatcggcggcagctgcatcatcgcgccctccggcgagatcatcgcgcgatgcacgaccaagggcgacgagctcgcgctggcgcgctgcgatctcgatctctgcaattcctacaagcgcaccaccttcaatttcgacgtgcaccggcagccgcaggcctacgggatgatcgtggggcgcaagggcgtgacgacgatggcggatgggaagccggtgccgcggaaggggtgaacattctctctttcgtcattccggggcgatgctcagcatcgaactcggaatccatcacgccgccgggcgctcggtgtttcgctcccgtgtcaatcccacggcacacaaatattccgatttaccgaaattcggaaacggcgtatgtgtcgcccatcccggctcatccttgaggggcgat

SEQ ID NO: 227 - DNA, 1051 bp, Bradyrhizobium colbertium
ctagagcatgatgtgtttatacggaaacataacctgagttcttgaaatagttggtgcactcctcgttggagaagaggtcgaggagttcaccgaccttcctccaggttgcctccacatcgcgtggttccgcagctcgcatgagatgtttgagtttggcgaagacctgctcgatcggattgaggtcagggctatatggcggcaggaagatgcggtgggcgcctctggcgcggatggcttgccgagccgccttgcctttgtggctgccaagattgtcgaggatgacgatctcgcccggtgcgagggtaggtgccaagaccttctcgacgtacagcgtgaagagctcaccgttgatgggaccatcaatcacccaaggcgcgctgatccgatcgtgacgcagcgccgcgatgaaggtcatagtcttccaatggccgaaaggtgcagatgcttggaggcgctgcccacaaggcccccagccacgcagcggtgccatattggttttgatccacgtctcgtcgataaacaccaaccgcgcgacgtcgatcctgccttgatgtgctttccagcgggtccgcttacgggcgacgtcggggcgatcctgttcggctggtagaagcgttttttttgaagctgagcccttcggtgtgaacaaaagtccacaccgcccgcacgtctgtcttgatcccgcgggcagccagttcctgcgtcagcttgcgcaaggtgaatggccccgagcgaatgcgtttgcgcagccagtcggcattggcatccgacagaacccgtttcttgtggccgccgatttggccaggtgacaggcctccggtatcccgtctcagcttcttccacttcgtcacgcaggaggggctgatctgtagtgcctctgcaatcgaacgaaccgtttcgcccgcgtcagctcgcgccaaagcccgttcccggatgtcttccgaatagggtcgcgtcatccatgccggcctccgccctccagcatggaggttgaatcagaaatccctcccggtgggaatcccgattccagtcaaaaacaacatgctctagc

SEQ ID NO: 228 - DNA, 2646 bp, Bradyrhizobium colbertium
aggacaccttctcgcgcgtaacctaagccagtgccgttggaagtgaaggtgccgatgttcgccattgtctcattcccttgtttcaaggccgcgcccatcgcgacccgatggcggtcgtgagaccggaggcgatcgacccgcacccgaagggctggaacgaagtggaaggcggccggaggcggcttttttggttcgcgatgcaaagccgaaggcggcggaaaaaagtcgtcgcaggacgttgcggggacaagatcgagagcggcgtagccggtcggccttcggtcagacctagccaatcgggttcgcgttgggggtgccatcgcaaacgacttgggaatgatgacaggcgcagtcgcatcggcaacaccgttgcgtccgacgacacgatcaccgtcaccatcgcgcccgttgtctggcgtcgcgttcgccgcccataacgagatcctctcggcgcagcagggcaaagcagtcattcgtcgccggcacgtcgcgccgagcacgaccaggcgtccacgaccacggccacgcgtctctcgtatcgctcaatcgacgatccgcgctttccctccttgatgcccgttcgctgccgtgcggaaagcgggggtaatcctgcctgtcgatcctgatttcgccgactggacaatcctcccgacgaagggtcctgcggcgaggcggggtcttgccggtggcacgcgacctcactccggatggacgacgatggaccacgacaaaaaaaagggggctttacgccccctcctcttcccggaggcgacgctctgcctctgcaagcgccgcatccaaccgtgcctgcgtttctctccgctcctcggcgctgagaatgcagtacatcagctccgcgcgctgctcggcgatttcctgatagatgtcacgaatgtctttcatgggaaggtcctttccgtcttctgacggaaagaggcgacgctgtgggtctgagcgggtcagggatcgcgcagcgaccgccggaggcggcgagcggcaccgccgctcgtccttgaggcgcgatgacctggcgtagactcgcttgtcagaagaaggggtcccgcgcctctggcgcgtccgcgtccggcgaccagtcggtcccacgcacaagctcaggcatggacgtcgggagaggaggcccgcttcgcctggcgccccccgcggtgaaaatgctgacgatgggcgagggcaccgtcgatcggctagcgacttcgcaacagtctatgcgatgtgaaaagcgcaagacgataaagtcatcaaacaccaatctgcgcagtcgcaaggtcatcgtgttcttgtcacggcgattgcgcaacgagaacatcttcgcagcacgaatctcctgcgctaagattgcaattattttttcgtcgtcgttgtcaggaaaacatattgatggaagtagcgttgcttgttgcgggtctgttggcgatcgtcattgtgctctacatgtttttatcagtgccgggaaagcgtgcttcgacgaaggtgaagtgtttgatcttcagcgttctcgtcgccttgatgactgcgctctggtgcgcagtgtatggccccgatttctgggttatggttcaggccgcagtcatcatcgtggtcgcggccgctgtcggcctactttcgtcatcgaacaattgatcgctccgccttcgatcgcgagaggccgggattgaggcttaggcgcgcctccggcgcaaacgatgtggggcaatcgaccggcacgatcgtcttcagcgagaggatcgtcaccggaatcggcggagaccgcgtgcgggctccgtgagcgaagcgaatagagccgtccgccgcaggcggctcgcccaaaccccgctcttcctcaccctgaccgccgtggcctccgcagcacaagcgtaaaacgcggacaaccatcaacacgaacatgtcgccccctttcgatcatgacgcattgatatccaaccaaacgccgcgcctctcttgcagtctcaaggattgcgccgccataggagctcggttcaactgccgggacaatcatggacgttgtttagcttcatcggcttgccggcaaagcatccagttcaactggtggatggctttccgaggtgacggctcgcccgcatggacgcgatgttgagcaatcgcacatggttggtgggcgacaaattctccgtggcggacctgttgatgacggacgctctgcgggcagtggaccggttcgaaagcctcgccgactttcttactcgccgcggttatgcagagcgtcttaccggccggtcctcgcgaaagcctatcgcgatcagatggcccgctttgctgcagcggatgcggcctgaggccggcggcagcgcaatcctcattgcaatgcgaacggccccgccggatggcgaggccgtttgtgttggtgcatcagtcccgattggggcgggaccagatcagctgcaggccctcttcgccctcgacctcgaccagggtggcgtagatcgctgccgggaagctcgggtcgtcgagcttgaccgagaggtagtcgcgatccgtctgttcggagtgcttctgccaggccgcaccgagttcgacgttgccggcggagtagatccggaagtgcggacccttgtcgctgggattctcgatgcggacgaacttggccttgacgttgaggttgagggtctt

SEQ ID NO: 229 - DNA, 1254 bp, Bradyrhizobium colbertium
cctcgcgcagtttgccgccatggacgaagatatcctcgatcggcagctcgcgcatcttggccatcaccttggcggaatcgtcggtgccggccgccttgatcgccttcaggtaatgcagcaccgagccgtagacgccggtctggatcatggtcggcatcaccttggtccgttcgtagaatttcttcgaccaggcgcgggtcgcctcgtccatggcccagtaggacgccgtagtcatgtaggtgccctgcgccgccttgaggccgatcgcgtgcacgtcggtgtcgaacatcaggaggccgaccagcttctggccgccctggacgaggccgaactcgccggactgcttgatggcgttgtcggtgtcctggccggcattggcgaaagcgaccacgtcggatttcgagctctgcgcctggagtgcgaaggaggagaagtccgccgtgttggtcggatgcttgacgccgccgagcaccttgccgcccatctcgttgatgaagcgggttgcatccttctcgagctgctggccgaaggcgtagtccgccgtgatgaagtaccaggacttgccgccttccttgatcacggcggaggccgtcactttcgacagcgcgtaggtgtcgtaggtgaagtgcacggtgttcgggctgcacagctcgtcggtcagcgagctcgcaccggggccggagagcagggcgaccttgccccgctcacgcaccatgttgtgcacggcgatcgcaatgccggagttggggatatcgaccacggcgtcgactttgccgttgtcgaaccagccgcgcacgatctgcacgccgacgtcggtcttcatctggtggtcggcgctgatgatctcgatcggcttgccgagtacggtcggcccgaattcctccactgccatcttggcggcctcgaccgagcccggcccgctattgtcgcgaccccagctcgacaggtccgtcagcacgccgatccggaccacgtcgtcggagacttgcgcggtggccgccgtggtcatggcactcgaagtcatggccgcgatcatggcacaggcgagacgccccatcatggttgtttcctctctttttggccgcttcggcgcggctggcttgctgtggaggtaaattagataatagcgaatgagtttgtcaattgcgaataatggcagtcgcgagggttccgccttcgacgcgaccacgtcgtggcgatggacacgcagccgcctcaaccccgtcattgcgaggagcccttgcgacgaagcaa

SEQ ID NO: 230 - DNA, 1913 bp, Bradyrhizobium colbertium
gctcgctggcgtcatacatgccagcgagcggatggggccgaagctcggcggccccgatcaggcggccatctcaggccgctttggctttcgccacgtgagtagcgatcgcgtccatcagcgccggggacaggcagtcgtagggctcgaggccgagctccttcagccgcgagcggatgcctgccatctgctcgggcttcacgcccgactcgatcaccgaggagacgaaggcggcgaattgcggcgcctgcgaaccctgctcctggaacagttcgggatggatgaagtcgagaccatagaacgggtggcccttgttctcgatgcgtccgtacatgtgcgtgccgcaggccttgcaggcatagcgctggatcaccgcggagggatcgacgatctgcagcttgtcgccgttctcgagcacggtgacgttctggcgcgggaccacggcgacgacggagaaggtcgcgccctgcggcttccagcatttggtgcagccacaggcgtggttgtgcgcgacgtcgcccttgatgccgaccttgaccgggtgatccgtgcatttgcagaccagggtgccaccggcgaagctgccgctgccctgcttgatgccgttgtcgatcgagggatggagtgcaacagtcatgggtcgatcctccttgtgtgatggctgtgagctagaacacgacgactgaacggatggatttgccctcgtgcatgaggtcaaagcccttgttgatctcctcgagcttcagcacgtgggtgatcatcggatcgatctggatctttccgttcatgtaccagtcgacgatcttcggcacgtcggtgcgcccgcgtgcgccgccgaaggcggtgccgcgccagttgcgcccggtgacgagctggaaggggcgcgtggagatctccttgccggcttcggcgacgccgatgatgatcgaggtgccccagccgcggtggcaggcttccaaggcctgacgcatcacagtggtgttgccggtgcagtcgaaggtgtagtcggcgccgccgtcagtgaggccaacgaggtgctggacgatgtcgccggtcaccttcttcgggttgacgaagtgggtcatgccgaaccgcttgccccactcctccttcgagtcgttgatgtcgacgccgatgatcttgtcggcgccggccatcttggccccctggatgacgttgaggccgatgccgccaaggccgaacacgaccacgtttgcgcccggctcgactttcgcggtgttgacaacggccccgacgccggtggtgacgccgcagccgatgtagcagctcttgtcgaacggcgcgtcctcgcggatcttggcgaccgcgatctcgggcagcacggtgaagttcgagaacgtcgagcagcccatatagtggtagatcggcttgcccttgtaggagaaacggctggtgccgtcgggcatcacgcccttgccctgcgtcgcacggatcgcggtgcagagattggtcttctggctgaggcagcttttgcactgccggcattccggcgtgtaaagcgggatgacgtgatcgcccggcttcaccgaggtcacgcccgggccgatctcgcggatgatgcccgcaccctcatgtcccaggatcgacggaaagattccttcgctgtcgaagccgtcgagcgtgtaggcgtcggtatggcagatgccggtcgccttgatctcgaccaggacttcgccggccttcgggccctccagatcgatctcgacgatctcgagcggcttcttggcctcgaaagcgacggcggcacgtgtcttcatcgtaaagctcctcagattctcatagggcgccgagagatggtctcggcagtcccataacggtcatttgttgcccatgcaggcgtcttccgccttcttgtacgcctctgttttctcctccttcttggcgggacgctgccg

SEQ ID NO: 231 - DNA, 3724 bp, Bradyrhizobium colbertium
aggtgtccactcattcggaggaagttcacttgcttggcctgcctccagccctgaggcaagcgcggtagcgccacggctcgacaaagcttccagcccagattcctatgctggccttctccgccccgcgttgggcgtcctcgtacttgcccttggagtatttcgaccaatcgagcgcatggccgttggcgacaagccagtgtccgatatcggggccgggcgtcccaactgtgcaggtcgcgaccgtgcgcccgtaccggtctcggtcaaccggagagcaactcacgggccgcttgatggcccatagcagaccggcgagcgccgtcgccgcgacgcgcccacactggtacagcttgctgtggtcgttccgacagagctggttgctctctggagcgtcgataccccagagcctgacgcgctggccgtggatctcgatcgtatcgccgtcgatcacgctggcttgcccaactatgtcgtccgcacgcgctgggagcgcgggcagaacggaaattgccagcgcaagccccaatattcgatttatttcgattttcgagatgattttccacccttcaggaacaggagagtcgtgaattttcgagcgaaacaattccctcttttatggactgggtaagttcggccgatttatccaacccaaggaaatgcccttttgttgctcgcaagttagagggctggggccccaaaaggggtggggtacctttgaataaaaaaaatcaacgcttccgcttcttcatcctcacgccggctccgcctccgttttccgggatgaactcgacgccggccttctcgagcgcagcgcggactgcatcccgaacatcttcggacacggccgagccgtcatcactctcgcgctcaaggcgcttgatggtcggcagcgatcgtccggccgcttccgcaaggtcggtttgagaccaacccaatagcccacgcgccgctcttatctgttcgatcgaaatcatctcgattcctgcttgacactttttggatcattgatatgatccattttgtatcaagaccgcagcccaaaggcaacccagatgagcaacagcacctctccggtgaacggcggagctatgtccgcacccttcctcgccgatcagcaggtcgggcagttcatccccaccccaaccttgggccgccgcgaggctctcgccaacgccaaggcgcactcagcggccaacgcgctccgctccaagctcatgatcgaggcccacgcccgcgccaaggcggactatgccgacgaactcgcctgccgtggtcgcgcccaccacgtcaaccgaccctatagctattacctcgcgctccagatgcgcagcggcttcgctgaggctcgtgttgcgcggactggtatcgcgccagctttcgaacttctcccgcagcattgggcataaaggagcagggcatgctttcccctaccgccaacatcgaccgcgttcgcgttccagctcgcctgctgctgaagggcgatgtcaccggctccggcgagatcgtcctcggcgtcagcttcggtatcgcgacgccccgcggcaaggtcgaagtgtctctaagcaagggcgaacacggtcgtgtggggatatggaacgccggtacaatcatcgtcgtgcgccgcagcacttccaatgccaccgcacccgaggtagccgacgataccgacgaaatccccctgtctcaccggctgcctacatttaatgagctggccagcttcgatgctggcaaggcatgggaccagttatcgcccgaccagcagcgagagatcggcgtgctcgcgctcaggttcggtacggtcggccagtgtgagggctacttccacgacaccattgaaggcgtgcgcaagggcttcaactcagcccattggacgccccaggttcaggcaacggcagtttggccgcgcctgcacgtcgagctgatcgagagcgcagctcaggtcgcgtttcaggacctttgcgagcacttcgatcccctgtggccccagctattcggctggcaagctcggaaggaggtgaagcaaccctaggcttgccgtctgtcacagggcgggcacgggcggtgcccagtccatccatcaatccgcaatatagagaaacgacatgagcaacgcggtagctaatggcgccacgggcgccggactattttcatcatcttcccacaagcaggaaagcgggttggacgcatgtcagaccggatcggcgcggtcagaaccatctgtcgggcagatcattcctgagacaggggcgcagatcagcaggaggtcgttcgtgaactcgcttgtctccatatcagtggcatccgctacgccggtcgccgctcccaccatgccgcagagctcggatcgtagggcgctggaagcatacgcatcgtggctccacatggagctgcgccttctctgcttagaactttggccgcatctggggagtgaagctgagagatacgtatgggctgacaatgctggccaccactggcactttcgcggcgagggcagctggcgggatcttccccagccgtccacacgggccgccgctgtcttgaaccttgtgggagttgactggaaggatccgaggtacgggaacgtcagtccgcgtgatgacggcagccgcccatcgctacccgacggctggcccggaacagcttcgggccttcagacagccgaccagaggttgctcgacctagtggaggacttcctcgctattcaacagcgctatttcgatgcctgcctagcgctcgacaagctctcggaacgggaggggccattgccggaggtgctacgcatccagccgcgagatcttgaatttggaatgaagttattccagccttcagacgagcattggcaccgcccatgcgacatcactcaatggagagacgttgatcgatgggagatcgagaggcaggaaaccgcagacagcctcacgatcaccacgagacgtattccggcttccgatgagctgcgatcgcgagctgtggagatctgcgcagcttatgatgcttggtataaccagcctcgcaagcgcggcttcgctaaggcggccaaggccaaggaaagagcgtcccgcgcctatcatcgcgctgaagcggcggtttgctcggagcgggcgacaacgctgtctggcctccaggcaaaattgaggtgcatcgaaatcaacggccagctcgatgacctgaatacaccgatcacggaatcgttgctccttgatcttcagcagatgggcaaaacaatcagcgcctaaggcgccggcccgccgagtggaactggcgggccgatcactttgtattcgaacgcaacgccctcggaatcgttctcgtcaatccaggactgggccgcttcctccgacgcgaatactttcaagtcttcgccttggtcgtaaatccatacggtcaaagctgcccctccgagatatctatacccggccttggatgtacccgggcgtcaacgagtacctcggtgatggcgtcgcgtaagttgtcacgatcgagaatgcggatcagcgcgtcgaccgtcgcggtcgcgtcgcgctcttgcgtaaggtagtcggcgagcgccatcatggcgaggtcgtagctctgctggatctgctcggcaggagaaaggcgcgccatcacagatcctccctcagccccttgaaagtcgggtgccgcagatggccattcgcagacttggcgcggtactcgacctcggcattgaggcggggctccacccagatgccgcggttggggg

SEQ ID NO: 232 - DNA, 9884 bp, Bradyrhizobium colbertium
  misc_feature (8895)..(8904): n is a, c, g, or t
catgccgcatttagggcacttgcccggtgcatcgctgatcacctcggggtgcatcgggcaactatatgcccccgacccgcccgccttgtcgtcgtgaccggcatgatcgccatgcgcggagggcgcgtggcttgcgtgcccatgcccatgcccgtgaccgtggctttccacctcctccgccttcgccaggttcatgccgcatttggggcacttgcctgatgcgtcgctgatcacctcggggtgcatcgggcaagtgtatgcccccgacccgcccgcgtcgtgagcgtggcccgcatgtgcgtgatcggcggggtttggcctgtcctcccggggcatgtcgtggccaccgtgcccaccatgtccatcggacgctgtttcgcgcggcaccagcgtcatgccacatttggggcagtctccgggggcgtcgcggacaatctcgggatgcattgggcaggtgtattccacgcgcacctcaagagcggcggcggtaaactccccggtgtttgcgcgaaacgcgcctgccgcgacaacgcggcgcagatcggccaacccagagtgcagcccggcctgtgtcagtggtgccgagacgtccgcatcgggcaacggggcgatgtcgcccgcgcccagtgcaaggatcgtgcgcggacgcggcatctgtgcataggccacggcggccgcatcgcgcagccctacgtccaaggggcccgcaataatcagcacgttcgcatggcgcggggtgcccacaatccgcaggtgcgcattggcaaggtcgatccccatcgaccgcgcgacagacgggccgggcagcacaaaggccgtcagatcgcgcgccatggccgccgcgaccgcccgcctgatcccgtacatcgcgccctctcgcgccccggctatggtcattgccgcctcaacgcgccctggctccagccatagagcaggcccaggaacaggattgagaggaaaacgcccatgtcgagcaatgcgatcagcccttcttcgcggtagacgaccgcccacggatacatgaacgccatctccatatcaaaggccagaaacagcagcgcataaccggcatagcgcgcatgatagcggacccagaccggatcgcgcgacaaggtaccggccgtggcgggcacgtccttgcccggttccgagcgcgtgcgcccgatggcccgggcgagcccgtagaggctgagcacgaaaccgaacacaccgacactcagcccgaaaaggatcgcgtattgggaaagctcgctcatccgtgttatctccttcgggtgctcgactctctaaagtgttaagggtttaagcagaaaggcacaatcaaaccaacgccagcggccatgctgccgttatgctaagacgctgcgcgcaacggattattacagctctccgaaaattccgggcttgggacttcaagaacacaggtctccaattggtttcttccaattgggtggccggtgatttagcgttgcatgattgacgatccgaacaaacatgacagagggaagtcaaatgtgcctgtccgctcaagtcagctttgccgccagtgtttttcttgttggcggcggtgaccggcccccactgagtggtccgatcggaatgttagtttagggattgcattttgactacctcctttggtgctggccagacgatggcttcgggtgccggtggtcgatatccaagcgatgagtgtggacgcaccgtgttgtagtgacgtcgccagttttcgatcacgatctgggcctccttcaatgtgtagaagatttcgccgttgagcagttcatcgcgcagcttgccgttgaagctctcgcaatagccattctcccacggactgcccggctcgatgtaagcagtcctggctccgacggtggcgatccaatcccgcagcgcctcggcgacgaactcagggccattgtccgaacgtatgtgcgcagggatgccccgcgagacgaacagctcgcagagcgcttcgatgacgtcagttgctttgagcttccgcgcgacacggatggccaggctctcacggctgaactcgtcgatgatgcacaacatccggaacgccttgccgtcgtgggtgcggtcggcgacgaagtcataggaccagacatggttgggtcgctccggccgcagacggatgcatgagccgtcgttgaaccagagacgcccgcgtttaggttgttttagggggaccttcagcccctcgcatcgccagatccgctcaacacgcttcttgttcaccatccagccggctctgcgaagcaacgccgtaattcggcgatatccgtagcggccatattggcgggcaagctcgatgatgtcggcagtcaaagccgcctcgtcatcgggtgtcgttggagtcttgcgctgcgtcgatcggtgttgacccaaagcccggcacgcccgtctctcggagatgccaagctcggctgttacatgatcgacgcaagcacggcgtcgggaggggcttagaagtttccctttgcggcctccgccaggatcagcttgtccagcgtcagatccgacaccgctcgccggagacgattgttctcagtctccagctctttgagtcgcttcacctgatcgcccttcaggccaccgtactcgtttcgccatcgatagtacgttacttccgtcacgcctatcgctcggactgcgtctgctacctgccggccctgtgccatcagcacatcaacctgccgcagcttcgcaacgatctcttcagccgtatgcctcttccttgccattgatcttatcctccatccgaaaatcatacttcagggaggaccacttcaaagggggcagatcagtcgccgcgcgacaatcgtggcgcaggtgatcaagctcggccaaaagctcaccgacgatgcgataatgatgttcatcaagctgatgggacgcctgttctctcaggtcaacaaccggaaaaaacagcgccacatgaacgcccgcatcgaaacgtccaaggcgctgcgactgttcctcgacacgattctggccctgcaggctgccaatgatgccgatgaagatgcaatcgaggcggtaaaccgagaagtcggctggcatcggctgctgcagatcaagcccagccttgaagccatggtcgagaacggcgacgtgtcgcctttggtgatggcggccgagcaatatgggaacatccgcaagttcgcgggggccttccttcaggcattcacattccgctcgcgccgccggcacgatccgctgcttgcggcggtcgcggtcctgaaaatgctttatgtagaaggacgtcgtgtcctgccggatcgcgtgccggtcggccatttgggtgcgaccgaaaagaaactgattttcgaggatggcaagccggatcggcggctttatgaaatcgccacgttcgctcatttacgggaccggctgcattcgcgcgatgtgtgggtcgagggcagccggtcattccgaccgatagacgaagatcttatgccgacgccaacttttgtcgctctgaaggggcaagatcagctcggcctcggtgtcgcgtccgactgcgctatctggctggctgaagtcaggcaaatgatggactttaatctcaaacgactggcctggcgcgcccgtttcggcaagcttgatggcgtcaggatggaaaacgggacgttgatcgtgacgccgcataccagcgacgttcccgcggcggcggaagccctcaatgccgaaatcacggacatgtatcccctggtcgaggtgcccgatctcttgcgggaagtgcatgaatggaccggatttgccgatcagttcacccacgtccggacgggagatgcgccacaaaatatcgccgccatgctggccggcgtgcttgccgatggcacgaatctcggtccaaaacgcatggcgggggcgtcgaaggggattagcgcccaccagatcggctggatgcgcagcttccatgcccgctcagaaacctaccgggccgcgcaggcatgcgtcaccgatgcccatacgcgccatccgcattcgcaaatatggggcgacggaacgacggcctcatccgatgggcaattctttcgtgccagcgaccgggccgccaggcgcagcgacatcaacctgcattatggcagcgagccgggttcgaaattctacagcggtctttccgaccagtacggatattacagcatcctgccgatcagcccgaccgagagcgaggccgtctatgtgctcgacggcctgttcgaccacgacacgattttggagatcgaggagctatttacggataccggcggcgcgagcgatcatgtctttgcgctgttctgcctgatcggcaggcgcttcgcgccacgccttcgcaacatcaaggacagaaaattccataccttcgaaaaggccgatgcctatccgacattggcgaaccatattggcgcgccgatcaacaccgcgctcatcatggaacattgggacgagctcctgcgcctggccgcgtcgatcaccacgcgcaccgtcgcgccgtcggcgatcctgaagcggttgtccgcctcatcgaaatccagcgatctggccaaagcgttgcgcgagttcggccgcatcgagcgcacgttgttcatgatcgaatggtattccagcccggcgctgcgccggcgttgtcaggccgggctcaacaagggcgaagccgctcacaagctcaagcgcgccgtcttcttccatgagcgcggcgaaatccgtgatcgttcctttgacagtcaggcattccgggcttccggcctcaacctcgtggtcagcgccatcgttcattggaacaccgtctatctcagccgggcaacggctcatctgcgccagcggggccggaatattcccgacagattgctgaagcacgtctcgccgctgagctgggagcacatcaatctcaccggcatctattcctgggacaccgagcagcagttgtccgaaggcttcaggctcttgcggcttcccggccggatgttgcgcgccgcatgacgttcaccatccgttcggccttagcgtacgatttggcactgctcttgttccgtccccatattgccgccagcgagccgcgcgacaggcgaaacctcgctaccctgcgcgaagctctcaccctcgcccctgaagccttcgcggcgctcctgaaggacatgcaggcgtcaacggccgccggcggcctgatcgcccgcgccgcaaaccgccacctcgggggcgtttgcggaagggggcggaatcctacgctaagcgaacgcatcattttagaaaggcaaatcctgctattgacgcgacacgggcaattcatactatcgaatttcgataacgattctcgataaagtggatgccttgggatcatgtggacatatggaacatcaagatctgctgagcggactcattcgccttcacgttctgcatcatgcagccgaaggcgaggtttatggtcagtggatgatcgaggaactggcccatcatggctacaagttgagtgccgggacgctctatccgatgctgcgatcgatggagaagaagggctatctagtttccgagaagcaacgtgcgggtcgctccgtccggcacatctatcgagccacgccgctcggccgcgaggcactggagatggctcggggcaaggtccgcgaactgatcggcgagatgatagagcaccgctgaatcagcttacctgcgcttaccgtatagagaacctgagtgtcgtcgggaggttgggatgacagcgcatgataattccgtgcgcctcgcgcaacctatcgcaggctcgccttttgaagtctttcgcgtgttcctcaaactcgggctgacgtccttcggcgggccaattgcgcatcttggatacttccgcgatgagctggtggtgcgccgcaagtggatcgacgaggaagggtatgcggatctcgtcgccctctgtcagttcctgcccggacccgcttcgagtcaggtcggattctcgctcggtgtcctgcgcggcaatgggttgctcggcgggttggccgcttggctcgccttcacgattccgtcggccgcaatcctgtttgccttcgcgctcggcgcagcggcatttacgggagcgatagcggaaggtgtgttgcatggcttgaagctggtcgccgtcgccgtggtcgcgcaggcgatctggggcatggcgaagaacctcacacccgatcgggaacgcgccgcaattgccttggtggggatcgcgattgtggttttcatcggcggctcgttcggccagatcggggcgatcgcgctgggagccgttgccggactctggctctgccgtggcgagctttccaagccaacaggccatctccgctttccggtttcgcgtcgcggcggagcagtcgccctcattgtgtttctggcgcttttcgtgatcccgccgctgctggtcatgacgactggccatcaggcggtggcgctgttcgatgctttctaccgctccggcgctttggtgttcggtggcggacatgtcgtgctccccttgttgcaagcacaggtggtggcgccgggttgggtcacgaacgaatccttcctgaccggctacggtctcgcgcaggccgtcccagggccgctgttcacctttgctgcctacctcggcacggtcatgggccccacgcccgatggactcgtgggcgcgtccatcgcgctcgttgcgatcttcctgccgggtgtcctgctggtctacggaatgctcccctattgggatgcgctgcggttgcggccgaccgctcaggccgccatgcgtggtgcaaacgccgccgtcgtcggcatcctcggcgcagccctctacgacccggtttggacaagcgcggttctatcaccaccggatttcgcattggcgttggccgggtttctcctgctcaccgtctggaagacgcagccgtggatcgtcgtcgtgctcttggccgcaggcgggacattgcttcatgtgatttaagaatgtcgcaacggagcggttaggagaagcgacagcatagcggcgctatgccttcggccacctatattcgccggtgaggttgatgtgctcccatcccagcggcgagacatgggccagcagatcgggcgatagcacctttccatcgcgcttctggttggcgacgacttcgcccagtttcatggtgttccagaagatgatgatggcagcgaggaggttcatgccggcgatccggtaatgctggccttcggcggatcggtcgcggatttcgcctcgccggtggaagctgatggcacgtttcagcgcatgatgggcctcgcccttgttgagcccgatctgggcgcggcgttgcagttcggcatccagaatccagtcgatcatgaacaaggtccgctcgacgcggccgacctcgcgcaaggccgtggccagttcgttctgtcgcggataggaggcgagcttgcgcaggatctggctgggcgcgatgcttccggcggcaatggtagcggcgatgcgcaggatatcaggccagttgcgctcgatcatggcctggttgatttttccgccgatcattgcccgcaagtgggccggggcggccgatgggttgaacgcatagagccgcttggacggcagatcgcggatgcggggcgcgaaccggtagccgagaatggcgcatgcggcaaagacgtgatcggtgaagccacccgtgtcggcgaactgttcacggacatggcggccggcatcgttcatgagcaggccgtcgaggatgtaaggagcttcgctcgccgttgcagggatcacctggattgcgaacggcgcatattggtccgagacgtgactataagctttcaggcccggagtattgccgtatttcgcgttgaccagattcatggcctcaccatgctctgtggcggcgaagaattgcccgtcgctcgaagccgaggtgcccatgccccagaaccgggccatgggtaacgccgcctgcgcctcgacgacgatcgccagcgcccggtcgtaggcttcgccctcgacatgccaccgtccaatgcggatcaattcccagaaggtgtgggtgttcgtcgcgtcagccattttgcgcaggccgaggttgaccccttccgcaagaatgacgttcatcagaccgatccggtcggcgcagggcgctcccgtgcgcagatgggtgaacgcttcggtaaagccgctcgctgcatccacttccaataagagatcggtgatgcgcgtgggcgggatctgcttatagagatcaagcaccagatcttcggcgccgatcggcgcggcggcttcgagcttctcgatatgcagaacgccgttttcgatcgacccgccgggaatcgttcccgagcgtgccgcacgccccagctcgcgcagccggatatcgaggcgggcttgccgatctgctagccattcctccggccgtaatggcacagcgagacggccgtcttccgcgacagcttgcgccggaacgagtgcctgtttcagatcgccatagcgccgggatctggccagccagatatctccggagcggaacgcatcgcgcagatggaacagaaccgcaatcttccagaggcgagtatcaccggccgcctgggcacgaagatggcgatgccacttcgagctcggccgcaggaaggcggtttgcgcggcatcgttcgaaccggtgcgcagtgccgtcactgcttccagaagcggctgcgcaacaggggcggcccggaggtcgagcaggcgtagcatgcggggagcgtatcggcggaaacggtgatagccgtcgagcacatgattgagcggatcgtccgccatggtggcggtgagcctcgttgccatcacgacaagggttttgaagccgtcccaaccagatccgctcgcgatgacgtcgcccagcggctggccatcatcctgcgcatcgaccagggctccgccgatttcggcgaaggatttcagggtgtcgcgcaccgcgttcgctnnnnnnnnnngcgagcatcgcttgccattccgacgcgcaaacggccagaatcgcaagccgcctgtcttccggaagatcgcgcatgccgtcggcatagtaccgttcgccttgcctgcgcagacgtgtcacgcgatgagcgggaactccggccagcagatcctcggggagatcgatacgttgcaggtattcgagccggtcaagcagccggttggccgatgaagagttcgaccccggctcgaattggcgcaaccacacgaagcgggtcacccggtcgtcggccgtgtcctcgagcaatgccagcaactgttcccggctgggcacggacacccgactggcgatcctcgtctcgatccgccgctcggcatcgaccagggccgtggcgcaaagccgctcgatcgtcgatgttgcaggaagaaccgtgcgggtgcgtcggcattccgccacgaagcgacgggcgatatcttcgttcgacaccgccatctcggcttcccggaacagccattcctgcagctcacgcgcgccacgtccggagaaggtgcggaatccgtagatcgcccgcaactcggcaaggtgctcgtgccgcgtctcctcacgggaggcatagtcaaccagatcgtcggcacgcagaccgagttgcgctccgataaattcgacgacctccgccgggatcagttcgccaggcgccagcacccggccgggatagcgcaggacgcacaattgcagggcgaagccgaacctgttgtgagcacgtcggcgctgcctgatatggtcgaggtcttcatcgctcagcgtgtagtgccgcaacaaatccgtctgggaggtcggcaggcgcagcagcgcatccttctgccgatcggttagagtgacgcgacgcggcattcatgttcctttttcaaaatccaacgatgttcaagacgctttgtttatgatgctggttgagatacatttccagcgaacaaatgtaaccggtatgagctcccacgtccgggg

SEQ ID NO: 233 - DNA, 3199 bp, Bradyrhizobium colbertium
cggcagcgtcccgatgtagttctgcgtcgagtgcgagtcgcggaacttgttggtgatcagcacgtcgggcgtcacctggaattcggcattgagtgtcccgatgtcctggcccgtccgggagaaatcgcggttaacaaagccgtaccaattcctgcggttcgagccgaagtccgggaacgggccgccggccgtagtcgccgtgctcggccggtaatagggaacgccgaaatccgggaagccggtcagctcggtgtggatgtagttggcgtagatcttgacagcatcggtcggcgtccacgtcgttgccagaaagccgccgttgcgattgtcggtgacatagtcccggccggccacgccggcatcctggaacagtccgccggcgcgcaccccccaggtcgggttgatgacctggttgacgtcgagcacgacgcgcttggtcctgtcggtgccgaacgtcgtgtccatgttgtagaaattgccatcggtcgtggcctgcttggttacgatgttgatcgcgccgccggtggtgccgcggcctgcaaatgacgagcccggaccgcgcaagatctcgacctgctcggtgaagaagttctcgcgcacgctgacgccggaatcgcgcacgccgtcgatgaagatgtcattgcgcgcgtcaaaaccgcggatgaagaagcggtcgccaaaggcatttccgccttcgccggtgccgagcgtgacgccggccgtgctcagaatcgcctgcttcagcgatgtcgcgttcttgtccgcgagcacctccttgctgagaacggtcaccgtcttcggcgtattgagcagcggctctggaaatttgccgcctgcctgtagatggtcgaccttgtagggagcggacggatcggcatacgggttgcgatcgggagcccggcttccggcggccggaggcggagcctgcgtcgtttgccgggtcggtgcgcgccggagcgcatcgcgagcccggatctggtcgggtgacggcttcgatgccttgggccgcggccgctgaatcggcgcgtcgaccgtcacgggagggagatcggattgctgggcttttgcgccggagaacgatgcgacagcaatcagcccagccaccgcagacacctttccggattggcattcttcagcggtcgacttgatcccgttcttaccaacgcgaagcgttcttggtattttcacgcaaaacatatagcccccaattcaatctcttctcgcgcgatttcgtcgcttgatgaaatggatcattggaaccggaagtccgcaatggattcctggcaacacccttttcgaatcggcctgacttgtaggttttctaaaatctgccgcggagtagctgtcaaattggaatgcttctaacaaccgacctatgagaatgcgtgacgagacttgcccttagcgaactttggaagcgcgtcttagccgtaagcagatttccgtatggcgcgaactgtaacccgcacgccactgtccttggcgtatgggagtgagacaatcccccgagaatcgttttgaagaccttgtgctaacagtttaagaagagccggtcggtaggtcggagctgtcgcgcttgttcgacggtcgatacaacgcttggcgcgctcaggcgaaaactcacgcttgccgcgcagttcgattgcgagggcgcgggtacctgacgttcttgagtgagctatgcggaatatttgggtgacgacaaggtgatcaggcgacccggttcgccggcttttggatgacctcgatgcggtcgttgaatctgacacctgcaatgagtttcgacaaatgatttgtgcctttgagctgccgccagatctttaatgcggcgaggatgagcttgaacaccatcagcataacagcttggcaaacctcctctcaagcgcggcgtcgcccgcaatcttgcggctgatgtcgcgcatcacacggccgagaaaggtgcgcaacgtcttcagcgcccgcccggcacgcttgaacagcttggcatgggcgtagcgctgatgcttgatcagggcgaagtgcccaccctcgcataagactggcgcaactcgacgctcaccttaccatcggcgagcgagtcagccggctgttggcgatggcgacgcgatgcgtatagcggcccgagacaagccgctccggacccgggggcggatggcccaaaacgatcattggctgcttgaaattagataactatttcaataatatacaagttcgtagttttgttctgaatggcgcaccacgcttcgcccttcggatttcgcgtggcgcggccatgccaaaccgaccggcaaagcatgtccctccggcgaagcctcttggcgcagccggactgtctgcgcaaaactcaaatagcgagacacgccgttacagtctcacgacgcatgccgcccaaggctttgcttctcctgaccagaagtcgcccgcatgcgcacgggatggtcggcatgaatgcttcccctcgcgactattttgccgagtaggtcactgcctcgatcttgtgaccatccggatctcggacaaacgccccataatagttcgggtcgtaattcggccgcagcccgggagcgccatcgtcgctgccaccgtgcttcaatgctgttgcgtaaaagcgatcgaccatcgagcggttctcgacggcaaaggcgatatgagtgccgttgcccacggtcgcgggtcgtccatcgatcggaacctgcacgctgaagtgaaacgtgccgctcccatagcccagcccaccctgatcctccgccatcggcatgatgccaacgatgggcaatacggcatcgtagaagcgcttggcgcgctgaacatcgttcgtccctactgagacatggtggatcataaggacctccgttcgatgctgcttcgtaacagtaggtctccagtcgttgttccgtcagggcctcccttcgccttgccgcttccgggcgatgcagatcgcccggaacctcgccgcggaagtcgctttatctgcgaaggaagcaatgcatggatacacgcgtcagacattgcagggttcaggtcggaccagtggacaccttctaccgggaagccggaccggaacgctcgccggtcgttctgctgccgcacggctatccctgttcatcccatgaattccgcaatctgatgccgcggctggcggataaattgcggctgattgctcccgactatcgtaagcggcatgaggcacccacctagc

SEQ ID NO: 234 - DNA, 1395 bp, Bradyrhizobium colbertium
gagctatgcctgaatctgggtgacggagccgatcaggcggcgtggctttgctggggcggaatgacctcgatgccgtcggcgaatctggcaccggcgatgatcttcggcaactgatttgtgcctttcaatcgacgccaggttttcgaggctgcatcgatcagcttgaacaccatcagcctggccgtctgtggcgacaacgatcccttggtccgaaccgtcctgtgtcgcactgtggcgaacacgctttcgatcggattggtggttcgcaggtggacccagtgctcggcagggaagtcatagaatgccagcagatcctcgcgattcttgatgaggcaatcgaccgcgcgcgcatattttgctccgtatttctcggcgaaggcttcgagtgcaagctccgcggcagccccgtgtggggccatggagatgtcctgcagggctttcttcatgccgctctgcacggagctcggaaccttgttgagcacgttgacggtcttgtgctgccagcagcgctgccgccgcgtgccggggaagacttcgtccatcgccttccagaagccgagggcgccatcgccgaccgccagttcaggcgcagcctgcagtccgcgccggcgaatgtcgatcagaagctcgcgccagctctgggcgctctcgcgcacgccgacctgaaagccgatcagctccttcttgcccttgggcgtcgcgccgatcaaaaccagcatgcattcgctgtggtcctccatccgggcctgcaggaagacgccatcagcccagacgtagacatagcgccgcgtcgacagatcgcgcttctgccagcgctcgtactcgccctgccattgcgccttcaggcctgagatcaccgatggcgacaggttcggcgcatcctggccgagcagcgccgagagcgcttcctggaaatcgccggtcgagatgccgcgcaaatagaggatcggcagcagggcatccaggctcttcgtccgccgcgcccacagcggcaggatcgccgaggtgaagcggatccgatcagctccgctcgcaccgcggtctctgaccttgggccgggcgacctcgatcgcgccgatccccgtggcaatcttacgcgcaggcccaaagccgtgccgcaccaccctggcacggccatccggcagcttcagctccgccgtcgtctccagaaatgcctgcaactcgatctcgacggcccgggcgagcagctcacgggctccgttccgcagaatttctgtcagtggatcgtcaaccgcagacggctgacggaagggcaggatgttggtagtctcgttcatggcgtatcgctctccttgagaggttctggcaggctcgacacccgcctcgatacgccgcctctctcaacccgtcatcacccactttcccgcatagctc

SEQ ID NO: 235 - DNA, 1316 bp, Bradyrhizobium colbertium
gtggggcgtgatcgggatcgtcgtcctctacgccatctggatcctgcatctgctgctatttcggggtgacggctttgccgaatggatcgggctcctggtcgtggtgcagaacatcttcacttcactgttcaactcgcatctgttcgacttccacgagggctggatgtacgtcatcggcgtcggcgtcgcagggggcatggtgatccgggcacaacaggccgaggcgaaggtgggggaagtcggttcctgagcggtcgcgcttctggcaagttttgtccggatgggctatcagcgcggtcaggttgcatctaactgggttttcatcggtcgtcggatgacgcgtctttcgcatctcaccttgcgcaatttcctgatcgcgctccacgacctgctggcgaccacggcgtcgctttttgccgccatctatttgcgattcgaggggggcgacggcttcttcgaccgcttgccgctgctgttccagatcctgccctattttctcgccttcggcgtcgtcgtgttcttcgtcttcaatctgaccacgacgaaatggcgcttcatctcgctgcctgacgcgctgaacatcatccgcgtcgcgaccgtgctgacggtcgccctgctcgtgctcgactatatcttcgtcgctcccaacgtccgcggcgccttcttcctcggcaaggtgacgatcgtcctctactggtttctcgagattttctttctcagtgcgctgcgcatggcctatcgatacttccgctatacgcgggtgcgccgtcatgcgcgcagcgacgaagccgccccgacgctgctgatcggccgcgccgcggatgccgaggtgctgctgcgcggcatcgagagcggggcgatcaagcgcatctggccggttggcgtgctatcgccgtcgagctccgatcgcggccagtttatccgcaacgtgccagtcctgggcggcgtcgacgacgtcgaggacgtcatcgccgacttcgccaagcgcaacaagccgatcgcgcggctcgtcatgacgccgtcggcattcgagccggacgcgcatccggaatcgatcctgatgcgggcgcgcaaattgggtgtgatcgtcaatcggatgccctcgctcgagagcggcgacacgccgcggcttacggcggtcgccgtcgaggacctcctgctgcggcctagcgagaagatcgattatgcgcgcctggaagcgctcatcaacggcaaggcggtaattgtcaccggcggcggcggctcgatcggttcggagatctgcgagcgcgtcgtggcgttcggcgccgcgcggctcctgatcgtggagaactcgg

SEQ ID NO: 236 - DNA, 59651 bp, Bradyrhizobium colbertium
  misc_feature (21362)..(21371): n is a, c, g, or t
  misc_feature (45417)..(45426): n is a, c, g, or t
  misc_feature (57209)..(57218): n is a, c, g, or t
cggcgccctggtgctggtcgacgctgccgaaggcccgctgccgcagaccaaattcgtggtctccaaggcgctcaaggtcggcctcaagccgatcgtcgtcatcaacaaggtcgaccgccccgacgcgcggccgaccgaagtcatcaacgaggtgttcgacctgttcgcggcgctcgacgccagcgaggagcagctcgacttcccgatcctctacgggtcggccaagcagggctggatggccgagagccccgagggcccgaaagacaagggcatggagccgctgttcgacctgatcctgcgccacgtcgcgcctccgaaggtcgaagaggggccgttccggatgatcgggaccatcctcgaagccaacccctatctcggccgcatcatcaccggccggatctcgtccggcgtgctcaagccgaaccagcaggtcaaggtgctcaacgccgacggcaagctggtcgaacagggccgtatcaccaagatcctggccttccgcggcctcgagcgcacgccgctcgatgaggctgaggccggcgacattgtcgcgatcgcgggtctcaccaagggcaccgtcgccgacaccttctgcgatccgaccgtcgaggtgccgctgccggcgcagccgatcgatccgccgaccgtctcgatgtcgttcatcgtcaacaactcgccgctcgccggcaccgaaggcgacaaggtgacgagccgcatgatccgcgaccgcctgctccgcgaggccgagggcaatgtcgcgctgcgcgtggtcgaatccgccgacaaggatgcgatggaagtgtcgggccgcggcgaattgcagctcgcgatcctgatcgaaaccatgcggcgcgaaggcttcgagctctcggtgtcgcgcccgcgcgtcgtgttccagaaggacgaggcgaccggcgccaccatggagccgatcgaggaagtcgtgatcgacgtcgacgaggagcattccggcgtcgtcgtgcagaagatgagcgagcgcaaggccgagttgatcgagatgcgcccctccggcggcaaccgccagcgcctagtgttctacgcgcccccccgcggcctgatcggctaccaaggcgaactgctcaccgacacccgcggcaccgcgatcatgaaccgcctgttccacggctatgcgccgtacaagggcgaaatccagggccgccgcaacggcgtgctgatctccaatgaccagggcgaagcggtggcctacgccatgttcaagctggaggaccgcggcccgatgatgatcgagccgggctggaaggtctatcgcggcatgatcgtcggcgagcatacccgcgacaacgatctcgagatcaacgtgctcaagggcaagcagctcaccaacatccgcacgacctcgaaggacgaagccgtccgcctgaccccgccgatccgcatgacgctggaaaaggcgctggcctatatcgaggacgacgagctcgtcgaagtcacgccgaagtcgatccgcctgcgcaagaagcacctcgacccgaacgagcgcaagcgcgcggaaaaggccaaggaagcggtggcgtaagccgccgctctccgcgggactgcggtggtgggcaaaggcgctcttgccaaccactttcgtggacgggagaggcgcacgctccgcttttcccgccctgcgcactgcgtcctggaccggataggaacacgattgcgtggacggctttagcacccgcggggaacgtgttagagccggaccatgagctcccttccctccttcgtcgacatcgcggtcatcggagccggcgcggccgggcttggtgcggcgcatgcgctgaaggactcaggactttccgccatcgtgctcgaagcgcgcgaccggctcggcggccgtgcatggacggtacaggcctcgcccgaggtgacgttcgatgtcggctgcggctggctgcattcggccgacaagaactccttcgttacgatcgccaagcagctcaatttcgagatcaacactgaccttccgccctggggcgaccgcgcctttggcgatgcgtttccggaatccgaacgcaaggaattcgtgcgtgcgatcgacgaattctacgagcggatatgggaagcggcggagcaaggcgaggatgcgcccgccgccggctatctcgagccgggcaatcgctggaatccgatgatcgacgcgatctcgacctacgtgaacgggtgcgagctcgaccaggtctcgctcctcgacatggaggcctacgaggacacctacttcaattggcgcgtgcgcgccggttacgggacgctgatcgccgcctatggcgcgccttgcccggtcgcactgaactgcaacgtcacgctggtcgaccattccggaaagcgcattcggctggagacgtcgcgcggcacgctcgaggccggagctgtgatcatcaccgttccgaccaatctgatcgcggacgaggccatccgcttttccccggccctgcccgtcaagctcgatgccgcgcgcggcctgccactcggcgtcgacgacaaggtgacgctggcgctcgatggcgccgaagcctttccaatcgagggaaacctgcgtggcgccaccatgcgcaccgcgatgggcacgtaccatatccgtcccttcggccagccctgcatcgacggctttttcggcggccggttcgcgcgcgagctggaagatgcaggcgacggcgccttcgccgcccagagcatcgacgaaatcgccgccttcctcggcaacgacatcaggcgcaagctgaggccgctgcgcgagtcgcgctgggcgcacgatccgttcgcccgcggttcctattcgcacgcgctgcccggacatgccggtgaccgcgccgtgctggccgcgccggtcgatggccggttgttctttgccggcgaggccacatcaccgaacttcttctcgacagcccatggcgcgagggacagcggcgagcgggcggcgaaggaggtgctggcggctttgggtgagctacgctcgcaatgacgggctactcaatcacccttgcccgcaaatccgagtctggcacaaagcaggcctcgtacctgccgaagatgcgatagcggttgcgcgcgacgaggccgtagacggcgtcccgcaacggcttcggtatcgcgaacagcgcgcgcacccaatcccatccgggcaagagcgacagcacggtcagcgccgcgtcggacttcaacaagacctcaccgccatggaccaccgcgttggtatcgggatcatgggggtcgatgccgaacgtgcgcgccagccgggctccataatccgactggatcggcgtgaaccggaacctcttggctatgtcgcggttcgcaacaaaccggacccagcgcgagcagaagatgcagacgccgtcgaacaggatcacgtcatcgtcgggccaacttggcatcagcggttatccagcatcatgagcgcgacgaacatcagcacgatggccggtcccgtcttcaccagcgcgccgagcggctcgatccagaggtcgggcgtcaggatcgccgcccccaccatatagccgaacgaggcgacgatgcccgcaaccaacccaacagcagcagtgcgacgaaatgcgatcaggatgccgatgctcatgtccatcaggctggtgccgatcgtgatgggatcgaccagcgcgggcgggaagttgtgcgcgctcagaatgccggcggcggccggataggacacgaacagtgcgatgaagccggagacgagccagaaggcgaccaagctggcaaagattagtgccttgatcagaaacaggcgcgcaaaccatttgtcctggatggtggcggggtggcgcccgactgcatcggccagcctcttcggcgcgatgcccgtcgcagcgatccatgcggaggggtcgcccgtcaccccgcgacggagttcggcgatggccgtcgagcgcatcggcggcatccagccgagataattggcgagatcgccgagtttggcgcccaggtcgaggatgaaagtcggcatcgcgatgcgaggccatccttcggtgccaaaagcaacacggaagggcttgatgacaccggacatggaaaccggttcggcctgcatcaggtcccagctcaccgccttcagtgacgcattgtcgatgtcgcgtgctgcgagccaggcgatggtcgcggaaatatcctcgatcgcgaccggttggaatggcgttgccatttccctcgccggcaaatcgatcgggaaggcagcaagcgcgcggagcatggcgctgccgccgtaggctgagggcgcaaccacgaagccgggtcgcaggatggcatggggaatgccgctgcttgcgatcaggtgctcggcctcgcgcttggtcgtggcgaaggcggtgcgatccgcctccgcagagccggggatggatatgtgcaccagccggattagacggccactattgccgaccgccttcagcagctgcgcgacgaagtcgcgatgcaccgtgctcgtgttgctgccagggccatcctgtagcacgccgaggcagttcacgacgacgctcaccgcatgctcgttgaggagacgcgtcagcgaggcagtatccagcgagagtatcggaagctcgacgtccagcgcgctcatcctctgcgccgaggacaggcggcgtgccacgccgacaacgcgaaaaccacgtgagcgcagatcgtcggtgacgaagcggccgatcaggccggaggcgccgagcaccaggatggttcgcccactcatcaattctctcagaacggttttgcgatcatcagccagaggatcaacattgttgccccaaagccggggaagccgaacgcaaaccaccggcggaacaggacgaaatagcgctccgggagtgcactgcgctgagcggcggccctgccggcgagatcgcgcatctcgatctgcatgaagacaaccgggatccagaacagacccgcaaaggcatagagcgcgagcgatgcgagcagccagcgttcggtcaccgacgttgccgagagcatcatcaacaggccccccgtcagcggctgcaggatcacggccgacagcgtaaagatcgcatccgcgatcacgaccaccgaggcggtgcgggcgatgaacgccacgtcggccgtgcgatgtgccatcgcatgaagaaggcgatgccggttcctgtgccgaggatgacgatggcgcccagcacatggaaaaacttgagcaggaaatacggcgtcatcgcttcttggtcgccacaggcttgggtgggttcagtgcccgtgcgagttcgctgcttgcggctttgaccccggcttcggtttcgatcatccagtggccctcgctgccgacggccggcaggacgcgcaggtcggccttgccgccacgtgcgcgaaacgcatcggcgagcttctgcgagaatggcggcgcgaaatagctgtcattgcttgcgacgagccatgtaaccggaatgcgcgccgccgtgccgaactccgccgcggcgccgagaagcgtatccggcgcgcagacccggttcggctcatcattggcatggccgccacgccccggcgcaaacaccgtaatcgcggatatcaccttcggatcggccttggcgagcgccagcgcaccccagccgccggcggaatggccgattacgatcgcggcgtccttgccgatgaaatcctgcgttcgcaaatagtccacagcgagcgaaattgcctcggccgttgcacggcccgagcgcgcatagtcggcctcgtcacagccgccctgatcctcgacatagcgacctccggtggcaccatggccgggccgctccggcaccagcacagcaaagccgcgcgcgacgagataggcggcgagcgcgcggtattccggcggcggcatttgcgcacgacgcagtgcgttctgcgtcgaggcgtgtgcgatcaccgcgagccggaacgggcccgcccccggcggacgaaacaggagggctttcgcggcaaggcccggatccggcgagggcacaagccaatgttgccggcgaaacggtccgtcctcctcgcccgatggaccgaacgtggcctgggcgcacaggggtgccgcagtcagcaaagccagcagaggcaggagcgcgatggtgttatggagtcgcatgacttgttgggaacgcacgcgaacagcggctgccggaccaataggaacgaatcattatcggcggactttctgcgttgccattgccaatcattcgctgccgtaaagtagttttgcaccggtccacgcccggcggttgccgtttgaaatggcggcttgtcctctttcggtacaacatggccacaatactgatgcagaaagtccacaggttaaccgataattaacgataggtcttgccgccggcgcggcgacttggtttgatcgcgtccatgagcacaaccctgatcgaggtccggcccgcgaaagctgcagatgcaactgcggtggcatcgacccatgacgaagcctggcgttcggcctatcagggcatcatccccggtgccgaactggagaagctgatcaaccgccgcggtccgcagtggtgggacagcgcaatccgcaagggcagccgcgtcagcgtgctcgtgttcggcgacaagatcgcgggttatgccaattacggccgcaaccgtgcccgcagcctgcatttcgacggcgagatctacgagctgtatctgcgtcccgaattccagggcctcggcttcggccgccggctgttcgccgccgctcgccgcgacctcatgcagagcgggctgaagagcatggtggtgtgggcactctcggacaacgatccggcgacagagttctaccgggcactgggcggccgtatggtggcgcgctcgtcggagcggttcgggcccagggcgctcgacaaggttgccttcgcttggaccaattgagctgctgaagttcttcccggcagcgtttcccgtccgtcgataccgttgcctttcgcgccggtgatcgccggattcattatttcaccagaacgcgatggatcagcgggccaagcccgcgtatgacagcgccaaaatcgctgccgggcgcgatttcacctcggcaacaacggagccttgaatgcgtatcgatgcggtctcgatcgggaaaaacgtcccccatgacgtcaatgtcatcatcgaagtccccgtgggcggcgaaccgatcaagtacgagatggacaaggaggccggcacgctggtggtcgatcgcttcctctacacgccgatgcgttaccccggtaactacggcttcatcccgcacacgctgtcagacgacggcgacccctgcgacgtgctgatcatcaacacccgcgccatcatccccggcgccgtcatgagcgtgcgcccggtcggcgtgctgttcatggaagacgaggccggtggcgacgagaagattctggcggtgccgtcgtcgaagctgacgcagcgctacgacaaggtgaagagctattccgacctgccggacatcacgctgcagcagatccagcacttcttcgagcactacaaggatctcgaaaagggcaagtgggtgaagatcctgcgctggggcggcccggaagatgcgcacaagctgattctcgaaggcatggatcgcgagaagaagaagaagggctgaagccctaccgtcagccctgccgccatgccgggcacgcgtcaacgcgtacccgggtcccgagataccgggttcggctcttcgagccgcccggaatgacgctcaattacaccgccggcttcggcagccctgcgatcgcgcaggccgcgcgcagcgtattcaccagcaagcacgccaccgtcatctggccgacgccgcccggcaccggcgtgatggcaccggcaacgccaagcgcttcctgataggcgacgtcgccgacaagacgtgtcttgccgtcgtccctggggatgcggttgatgccgacgtcgatcacggtcgcaccgggcttcagccagtcgccgcgcaccatctcgggccgaccgaccgcggcatagacgaggtcggccttcctcacgagccccggcaggtcgcgcgagcgcgaatgcgcgatcgtcaccgtggcgttctcgttcaacagcaattgcaccagcggtcggccgaccaggttggagcggccgatgacgatggcattcatgccctcaagcgaagcgtgcacgcttctggtcaggatgatgcagccgagcggcgtgcagggtgacagcgcctcgaagcccccggcgagtcggccggcattgttcggatgcagcccgtcgacatccttggcgggatcgatggcattgatgacggcttcggtattcagccccttcggcagcggcaactgcaccagaatcccgtgcacggacggatcgcgattgagcttttcgaccagcgccagcagatctgcttgcgagacatcggccggcagcttgtgctcgaacgaggccatgcccgctgcctgcgtctgggtgtgtttcgagcggacatagacctcactggccgggtcgttgccgaccaggaccaccgcaaggccgggaatcagattgtgctcgcgcctgacgcgggcgacctcgtcagcgacccgtgcacgcaattccgcggcaatgatttttccatcgatgatcttggcggtcatgtcagttcctcagtcgttcgatttggccgaggcgagctgacgcagggcttctccgagccgcaccggatcgccgtcgaccgcgatctgcttcagccgcgaggtggcccctgacagcagcttcacactggccttgggcacgccaagcgatttcgccagcagcaccagaacggccttgttggcctcgccaccgtcggcgatggcgcgtacccgcaccttgagcacactgcggccgtccgcgagctgctcgatcccgtcgatgtcgtcgcggccgccacgcggtgtcacccggagcgcgatgctgattccagcggcggagtagcgccagggttccctaggggcttctctcgcaaccaaggcgctccagcctgctcagatcacgttgggatagacgtagtacaggatcacccgctcgataaacatgatgatcaggatcaggatgatcggcgagatgtcgaggccgccgaggctcggcaggaaattgcgaatcggcgcgagcagcggctcggtaatgcggtagaggaactccgccaccgccgagacgaactggttgcgggtgttgacgacgttgaaagcgatcagccaggacaggatcgccgaggcgatcagcagccagacgtagagatcgagcacgatgatgacgatgtcgagaacggcacgcatggcttttgaagactctggctttgaaaactctggctgcggtcgggattgacgcctgttgctagatatcggttccccccggcccaaacaagggaagttcgggcaccgggatggctaaaaccgggttacgcccgtccttgacttgaccttggcggcgacttaaatggcgcccggttgtcggccgcattcaccagagcggccagcaaaggggccatagctcagctgggagagcgcgtcgttcgcaatgacgaggtcggcggttcgatcccgcctggctccaccacgcttggcccttcgggcttgcgcgtggcgcagccgcgcaagagcccgaacggtggagcgcggtgtccggcgaagcccatggggcggcgaagacggacttagatttccccctctacttccccgtaaaccgcggcgggcgcttctccatgaagcttgctacgccctcccggaaatcactaccgcccagagccaccatcatctccctgttggcctcgatcgtcgcctccgccagcgtctggaacggcacctcgtagagctgccgcttgatcacggccatggcgctcggcgagaccatatcggcgagatcgcgcgcataggcgtaagtctcctcacgcagcttctcgggcggacagagccggttgaccagcccgatccgcaacgcctcctcgctcgacacgcgcctcgccgagagcagcaggtccagcgcattggcatggccgacgatacgcggcagcatccagctaatgccgtgctcggcaatcaggccgcgccgcgcgaaggccgtcgtgaacacggtgttgtcggcagcaaagcgcaggtcgcaatagagtgcatgcaccagtccgatgccggccgtcgcgccgttgagcatggcgatcacaggcttcttgatcgaagggtaatagccgtagcgggtctgccaatccggccggcggttcatgtcgaagggcggcagactagaggcgcgcctgacgtcgtcggggtcgagacctttcagcgcgtccatgtcggcaccggcgcagaaggcgcggcccgcgccggtgatcacgatgacgcggacgttgtcatccgcatttgacgcttccatcgcgtgacgcacgtcccgctccatgaccggcgtccacgcattcatgcggtccgggcggttgagcgtgatggtcgcgatcttgtcgctcacttcatagagaatgtgttcgtaggccacggcgctctcccttgcttgccggcacgcattggtgcgcgctcgtttgcagcgagcctagcatatccagggcagaggcaaggacttgcgtgaaggcgcgatcactcggcggcttgcgccagcaccggccggcgcgccagccagccgtcgatgaagtgatcgagccaggcgcgttcagcggcatcgtagacggcgcgatccgcgaagtggtggtggcgctgccgcgcacctggcgcgctgaagccgtcatagccgcgcgtggtccagcgacacatcatcgcgtaagtcacgtcggggtgaaactgcacgccgaaagcatggccggcgcggaacgcctgcaccgggaaatcatcgccttccgcgagcagctcagcgccgaccggcagctcaaatccctcccgatgccagtgatagacctgatccggccaatgcgggcagagcgcatggcccgcggcggtcggcctgatcgggtaatagccgatctggctcagcgcatccgcatgcggcgcgacgcgcgccccgagctgcatcgccagcatctgcgcacccaggcagatgcccaggaacggccgctgctcgcggagcggaatttcgatccagtcgatctcacgacgaatgtagtcgtcggaatcattggcgctcataggaccgccgaagatcactgcgccggcatgctgctccagcgtttcgggcaggacatcgccgaagcgggggcggcggatgtcgaggccatggccgagcgcgcgcagcgcgttgccgactcggcccggtgtcgagcattcctgatgcaggacgatcaggaccggaagccggctttcagaggcggcggcgctcggcgctctccgtgggaaagcgaccacctctgcgccaacaaacctgtccgtccggaacgacatggcctttgcgagtgctatcggttcagaccatcagcatagctaagcgatggttaagatcgtgtgagttcgcgcacacagatccgataagcaaaccccgggccaacacgggagctttgccatcctctatcgcctgcgcctctggaaccggctggtggcagccaggatgaagccgcgcgggaagaaacgcagtgcgagcggcacaatcttgatgccgaggcccggcagcactgcccgcttgttggtcatgaggccacgatacgcctcctgcgcgacatcggcggccgaaaccttgaggagggcggtatcgtgttgggagccgacgccggcgcgggcctggaattcggtggggaccgggcccgggcaaagcacggtgacgcggacgccgtggggggcgagctccgcccgcagcgcctcggtgaaggagatcacgtaagctttggatgcatagtagacggccatgccggggccgggcaggaagccggcgaccgagccgacattgagaaggccgcccttgttcctgatgagctggtcggcaaagcgcagcgacagatccgtgagcgcccggacattgacatcgacgatgccgagctgttccgcgcgatcctgctcgatggcatcgccgaagacaccgaacccggcattgttgacgagatggtcgagctctacgccttcggcagcaagcgctgacgcgatcgtctcgccggcatttcgttcctcgagatcgcaggcgatcacgatcggcttcttgccgcccttggcagcgatctcgcccgccagggcctcgagccgatccgcgcgtctggcggtcaaggcgaggcgatgtccattggcggcaaacacacgcgccaactccgtcccgatgcccgccgaggcaccagtaatcagcgtcacccgctcaaccacgatcgaagtctcttgaattcaagttcctggccccgcaatgccggaacgagagcataggccgtgcgcaacaggcaagcggcactgtcaacatggctggctgagcagaacgaaaggcagcgccgaaaaccgttgatttgcaggaaaatgcggcgtgggcggcgaacagattaaagtttcgtcatgtatccgcgcaggccgcgattggtcgcgcccaaagccgtcaaccgccgacggcgccattcttgacctggccgccggcacgctccgcgaccgcgtgcttcagctcgatccggtcccgctgggaaatcccgagcaggtcggaagcacgccagaccacattgtcctcgaactcggaaacctgaccgtcggcatagaccagctcccacatcatctgcacgatgcgcttgcgaccctcttcgtcgagcgagcgcatgatgacgctggtgaagcgatagaggtccaccgcatcgccctcgacctccgtcgcatccgcgatcagccgatcagccgtgccgcggtccagcccgaaatggttttcgatcaggccgtgcagcttgcgctgctcggctgctgttggccggccgtccagcgagaccacgtgaatcagcagtgcggtggctgccagccgataatcgctgtcgccgaatgcgcgggcatggtcctggggaccgacgatatcggcgatgaattggcgcaagccgtcgagcatgagaccctaccgagatggatgccgccgcgaggagcgcggcgtgtgaccagcattatatgagcgggaaactcaaccggcgcaacgtgcgtcagttccgcgcgctgcattacgtttcggcaatctgggcactgtcgttccggggcgccaaagcccgaaccccgaatggcgattcgatcctcacgggatctcatagaccaccatcttgtcggcgatgccgcgcagcgcagcctgcttttggatcggcttgatctcgcgctgctcgagcacctcggcaaccgccggcgcatcgagcaccggaccggtgatgtgaatctcctgcgcggtcgacaggctctgcacacgggccgcgatgttgacggtctgaccgaaatagtcctgccgctcgttgagcatcaccgcaaggcaaggaccttcatggataccaatcttcacgatgaggtcagtggtgccgcgcttcctgttgagctcgtccatggccgcgcgcatccgaaggcccgcgacgatcgcatgctcgggacggacgaaggtcgccatcacggcatcgccgatcgtcttcaccaccgcacccttctcggaggagatgatctcgagcagcgcatggaaatgcgcacgcacgagatcgaaggcggcgagatcgccgacgcgctcgtagagcgcggtcgagcccttgagatcggtgaacaggaaggtcagggaggtgatctggagcctctggtcgagactgagattgtcggccttgaagacatcccgaaaagtctggttcgacagcatgcgcttggcggtgaggaacggcttgcgcttgccgatcagatgatgaagcgcctcggctgcgatgaacaccgacggcagcacgcgcacgcccgcctggttctccagcgacagacgcaacgggcccggccgcatggtcgtcgtgcccgtcggggcctggaccttgttgtacatgatagcgagctgctggcgatccctggtcggctcgccctgaacgtcgatgaaatgagcggcgtgcgtcaccggctcgaagatgatgacgaagtcgttcggaagctgcagcgacatggtcgccttctcgcccgccggcagctccatcgtgtcgagcgtcacctcgttcgccagcgtcgcaaaggagtccttgttgaagtcgacgccggagctccagaacacctgcttgaaatattctcagaccggaagcgtgtcagggtcatgcgccgcgatacgccggacgcgcgggttcacggtgaaggagacctcgacctggtcgtcgacggaggccttgtagccgcaggcgcagagcgcgcagtgataatcgtccggcttgagcgccttcagcgtcgagtgcgcgcccagcacgccgccgcagcccgggcacagcacgttccagccgaggtcgaagaggccgagccgcgccgagtgcaggaacgccgagatcacgcgttcctcgtcaaggccgtgctgtctggaaaaatcgaggacgttgacgcggttgagctcgtgatcctccccatcctcgatgagatgcgcgatcgcatcggcgaccttcgcgtcggcggtctgcttcagaacggaaaattgggcctggatgtcgctcatggcgaggctctatctcgggtggatcacgccaacggccagacgagcgcctgtcaccgccgcgtgatgcggaacatgggtgaatgatctggctgggtcgtcacgacgcccagcggcatcacgggactggccgtgtccgcaagctcgacacggaatgcgccgatcagccgcgccagcgccagcacggattcggcctgggcaaacggcgcaccgatgcagacgcgcggacccgcgccgaacgggagataagcgaaacggtcgggggcctccttcgacatgaagcgtttcggaatgaacgcgttgggctggtcccacagcttctcgtgccggtgcagcagccagggcgcgatcatgatgatgtcgcccttgccgatctcgacgccggccgcattgtccttgtcgcgcgcagcacgcgcgacaaggaaagccgggggatagagccgcatcgtctcgtcgatcacggcccgggtgaatttctgccgatcgatgtcggccatgctgtcgaggtgttcaccgcgggtctcggacgccacctcctcctgcgtgtcaggatccagtgcgagcagatagagagcccagaacagtgccgtcgccgtggtctcgtgaccggcgaggatcatggtcgcgacctcgtccacgagctgctcgtccgagaagcccttgccggtttcgggatcgcgcgcctcgtccatgagatcgaacaggtcgcgcggcggcgcgccttccttcttgccggttgcacgccgctccgcaatcagcatcgcgacgaattccgtccagcgcttgcggaaacgggcgcgggcaaaatccatcgggctcggccaggagaccggcagcagcatgtcgagaaaatacggccgtcccaaccgcgcggcatattccatgatgaagttgcgcaacgtcgcgccatgccggtccatgccgaacgagaacatcgtgcgcccggcgatctcgagcgtcatgcgctgcatgacctcccgcaaatcgatgtcttcacccgttcgggcatccagttttgcgatggtctcgtcgagcaccgccgtcatgtgcggaacgagattcgcggtggcgcgcggcgtgaaagccggcgcgagggtgcggcgctgaaaggtccaggaatgaccttccgcgatcaggaggccatcgccgagcacgggacgcagcatgcgaatgccggccggcgtgcgcgtgtagttctcgtagttgctgagcaggacatgacggatcgcatccggctggttcaggatgaagctgttccggaagaagaagcggcccgggatgacgtcctcctcataggctcgctgtccccaggtcgcgatcatgttctgcctgacgacggcgagacgcgcgaagaacgacatgtcgtcgggtgcccgcggcggggccggagggatgatgggccgacgcatgcttgcgatattcatggctctctcccgcggatctgacgcaccccaacagctaataggtcatttcggcaatcgcaatcctgttctcggcggcaggccaggcgcgggccacgacccgttcttcgccgaattgggccacgatgttacgcccgatctcgccggccggaagccgcagggttgctgtcgcatcggtgggtacgcccggcttgacgtcggccggctccttgccgtcgaacagcaccacgtctcgcggcaggccgaaatagccgcgcggccgcgacatgatgaccaccgcccctgcgtccttgtccgccgcgccgagcgggcgcgcaggccgcagatgcacgacttcggacgagcgcggaaacggcgagcggtagatgtgcgtcgtcgtcgcgccaggcgacatcaggacgaattcgagcgaccaggttggatcgacctgcgccggtccccagcgcccgtcggcacctgtttttgagctgtgcaccgccccacccttgcgctccccggtatcagcatcgacacggaagatgtcgacggtcgcgcccgcaaggggacggttggtcggcacgccgccgggcgtgccagagacgaggccactcagcttcacgctggcctccggcacaatcgcgatgcgcgtgggttcgcggccggcgatgaacttgtagatttcccggaacgcgcgcgggtgaaaagccacctcgcgatggtcgagcgcgccgagcacgagattggtggcgccattcagctccggtccctcggcggtgacattggtcggggtgccgggcttgccaatgaagcggccgtcaggctgcgcatatttgtccaggccgtcgctgcgcaaggtgaggaaggcaacgccgggcgtcacctcgctcgcgccctcgttcaggcttcgcaggaacgtgccgcggccgttgaattcgttgttgggctggtcgtcggtcgcgaacacgccgtgattgggcgtgccgcacagcacggcgtggctgacctcgccggcaccgccattcttgacgacgttacggatggcatagccgccgcgcgagctgccgaccagcgccacgcgagacgcgctcgtcctgcgcttcagttcagtgatggcagcggcgagctcgcggcgctggtcctcggtcgaggagcggttcgcctgctcgaccttgtcgtcactacgcgcaagcggatcgctgaaattgattgccatcatgcgctcgcgcgcgataccgttcgattccatccgccaaagcgtcgttatccagagcgcgtcgtaatcgccgttgccatggacgaacaggatcggcggcacctccgcgtccggcgtcgccgcgggtgcggtctgggccagcacaccagtccgcaagctcgcaaccgcaaaaggcaagctgccaacgccctgcaggatcgtccgtcgcgacagcttcatctgttcctccccggcaacccgctctttgcaccgcttatagcggcctaaccactggacagcgaaggactttcacgggcatcactgaacttgccggaatcgcccgggaccttttctgccataccgtttggaaggggatatgaccgagcagacgaaccgccagaaaatcgccgcagacggcatcactgcgcccctgcggtacacggtgttccggcgcatctggctcgccagcctgctctccaatctcggcctcctgatccagggcgtgggcgcggcctgggcgatgacgcagatggccgcatcggccgaccaggtggcgctggtgcagaccgcattgatgctcccgatcatgctgatttcgatgccggccggcgccatcgccgacatgtatgaccgccgcatcgtcagcataatctcgctatcgatcgcgctgatcggcgcaacggcgctgacgattttggcctggctcgagctcatcactccggaagccctgctcgccttctgcttcgtggtcggcagcggcaatgcgctgttcggaccggcctggcagtcctcggtcagcgaacaggttccgcccgaggcattggcatccgcggtagcgctgaacggcatcagctacaacattgcccgcagcttcggacccgcggtgggcggcgtcatcgtcgctgcgctcggagcggtggccgcgttcgcctgcaacgcaatcctatatctgccactgctggtggtgctgctgctctggcggcgcagcaccgagccctcgcgcctgccgcgggagaagctcaaccgcgccatggtctcgggcttccgctacatcaccaattcgccaccgatcaagatcgtgctgttgcgcacgctggtgatgggcctgatcggcggtgcggtgatggcgctgatgccgctggtcgcgcgcgaccttctgcgcggcggcgcgcaaatgtatggcatcatgctcggcgccttcggcatgggcgcggtgatcggggcgctcaacattcacgaattgcgcaagcgcatgagcggcgaggccgcgatccgcgcctgcaccatctcgatggctttcgcgatggcggccctcgccctgagcacggagccggtgctgacggcggcagcgctggtgctgggcggcgcggtctggatggccgcgatcgcgctgttcaacatcggcgtgcagctctcggcgccgcgctgggtcgcgggccgctcgctcgcggcgttccaggccgcgatcgccggcggcatcgcgatcggcgcctggggctggggtcatctcaccgactatgccggcgtcgagatcgcgttgctgaccgcggccggcctgatgctgatctcgccgttgctcggcatctggctcacgatgccgcgcgtcggcgcccgcaacgaggatgcggacatgctggccgatccggaagtgaagctgtcgctgacggggcgcagcgggccgcttgtggtcgagatcgaatatcgcgtggcgcaggagaacgcgcgtgccttccacaacgtgatgcaggacgtgcagctgtcgcgccagcgcaacggcgcctatggctggtcgatcgcccgcgacatcgccgatcccgagctgtggaccgagcgctatcattgtccgacctggttcgattacctgcgtcagcgcaatcgctccacccagtccgagcgcgcgctgcatcagcaggcgatcggtttccacatcggtcccgagcctgtccggatccggcgcatgctggagcgccctttcggttcggtgcgatggaaggacgacacgccggaccgcgcgagcgcggaggtgctgccggtggtcgcaaccgctgcggggagcagtacgtaaggactgtcagtccgggtcgcgcgacttgtccgccctagctcggagtgcgaaggcggaagcaagagcccggaatccatcgagcgggatacatttggagaaatggattccgggctcgcgcctgacgccgcgccccggaatgacgatcactgcccgtgatccgtcagcaccttgtcgcagcctttgctcagccgggtgcggtgctgcttcaggcaggcgagcacggcgccatcaccattgttcatgacggcgcggcagaagcgcgtgacgtcacgcgcgcaagcgtcatggccgggctgctgcgctgacgcgcccgatgcgcacatgagcaaggaaacaacgaaaagaaatctcgacatcgcgtaatgcctcttacccggaacaatgcgtgggcgaagctagtgcgatgatcccgggcccgcaacggctttgttgactggctgcagcgtccgaccgcgcggccccggatcgacgccggggcacattgcggaagcagcttgccgatgcggcgatatcggtttacgcgctcttactgcttgtcctgggcgtcagcgaccttgcgcgaggcgcccttggcgagagtcttgtccatgaccgcgcggcagccggcgctcagatccgagcgatgcttgatcatgcacgccgtgatcttcgggatgttggggatctccgccgagcagaggcggaaggcatcgccggtgcacatctgctgcgcctcggccgagaaggcgaagctcgcgctcgtcgaaacgatggagacgatggcggcaaagcccagagccaggctggtgtcacgaatcttgctgatgaacgacttggtcatttgaagctcccattggcaccgcgcaaagcgggctcgttatcgatgggagtcaccatgctccggaaaaaccgtttgcactgtgatgacgctcacggggggcccaccctctgtgacgtcagtcacttttgcgcacgccgctgaaattactccgcaaccccgatcgtgttggtgtcacgttaactcttagttcgcattaatggctggtcgcgcggggaattccgcaggtttggttgcgtaattggaaagagtagcgatgcgtaatgcgttgggcctgatgctggccagtgtagttgcggcggtcgtgatcgccgccggcggctgggtttattattccgcgcgcgccgatcagggcgctcccaagacagttgccgcccgtgccgccgatccattgccggcacaggcgaagctcgccgccagggacgacgtcgaaaccactgcggccgtcgcggccaggccggcggcagccgctccggcgcccgcgcccgccccggccatgccgatgcagccgaagcaggcctgcgccaatccgaacgcgctgggcgtgtcccgcgtcgtcgagatagacacgacaggcggacccggcttcggtttcgagcatttcaagcagttcgacttcctcaccgacaaggaggtcgtgctgaccttcgacgacggtccgtggccggtcaacacgcccgcagtgctgaaggcgctcgcggatgaatgcaccaggggcctgttcttctcggtcggcaagcacgcgacttatcacccggagatcctgaagcaggtgctggcccagggccacacggtcggcacgcacacctggtcgcatgtcaatctgaacagcaagaagttgacggagcaacaggtcaaggacgaggtcgagaaaggcttcagcgcggtgaagttcgcgctcggcaccaatccggcaccgttcttccgcttcccgcagcttcagcacaatccggcgatggtggcctatttcggcacgcgcaacgtcgcgatgttctcgaccgaaatcgactccttcgacttccggaagggcgcgacgccggagaagatcgtcgaaaccgtgatgaccaggctcgacaagctcggcaagggcatcatcctgatgcacgatttccagaagaacaccggcatagccatgccgacgctgctcgcgcggctgaaggcgggcggctacaaggtcgtgcagatgaaggccaaggcgcagcttcagacgctgccggaatacgacgaggcgctgatgaaggacatgaaggtgccgacagcaggcacgaactcccgtccgatcgcgagcgtcgtgcagacgatctcgcagtaaccgcaccaaatccagaactcttgcgtcatggccgggcttgtcccggccatccnnnnnnnnnngcatcagacgcgaagacgtggatgccggggtcaagaccgggcatgaccgcaggatcggggtacaggtccgcggcttaccaatagatgccgtgacgatgcagttcgctgatgatgcggcgctcggtccagctgcgcttgtgtttcggcttgtgcgctcttgccgcactcttggtagcgggcttggtcgtcgcgaccggcacggaggccggcgcggctgtggtcgccgccggtgcggccgcagcgggcggcgcggagagcgacactgccggtggacgatcggaatatttcgaagcctcggtggccggcgcggcttcgctgacccgcgtcgtcgcactggccgttgacgaggtcgtggtctgcggtgcggagctctgttcgcccgcagcggccaaggacagaccgcgggagccgcctgcctgggcagacgcagaagccagcagcatggcggcaaccagaatgatcttgcgcatgtgaagtctccccgtgtttcgtgacgggatgttaggggagtcatgtccgaggttatgtgatcgcgatcacccagccaaacgggccttcatgcaggctgatgcgctcagcattggccgcgccactgagcagatgacctggaagccgcgcaacaccgctcggcgcgaggttgtcacccatgtctcaggtgcgatctgttgcctatgtgttcgggcaggacaatcggggcgctggtgccgcaagagggattcgaacccccgaccccgtcattacgaatgacgtgctctaccgactgagctattgcggcgacccctgccgggcccaggcaatgccggtcccgatacgcgcgctcctgatatcgggcatggcctgaattggcaaggacaagcgggaggcgaaatgcggctcacgcgccccagcgcgaccagaatccacgccagccgcccgcctgggccttcggcgtgccgatttgttccgtaaattcatcggtcggggcgtcgtcgtcgattccggggtcatccggcgcacggacgatcggaatgacggcctggatcggcgccgctgccggcttcccgaggtcggcccgggttcggaagaccggtgttggtgctggcggcgacgattcggcgggcgccggagcgggatcggccggctcggcgggcgcggtcgccggctcctccttcgcaggttccttggcaacctcttgggcctgagggggcgaattgtcctgagcggctggagccgccactggggccaccgacgccgccggttccaccgaggcttcgctgggagccgcggtcacccgctttggcggcggggcagccagcatggcttcctcgaaagccgaggactcgatcgtggtccccctgtccgagggcaagctcgcgaccggcgtctgccattggaacgcatcgaggcggccggtgaccggggagaccgggcgccagcgctcactgacatagccgtctgccgtccaggccggatcgagccgggcgcgcaccgcgcgcagggtccaggcgcgggcgcggccgccgtcgccatgctcggtgcgctcgagctcggccatcagcagcgcaacgcgctgggtgggatcgctgagataaggtgcgagcgcctcacgcgcgcgtgcgaactccgaggcgtcgatcgcagcgcgtgcgatcgcgagctggccttcgatatggccgggcctgtcggcgggcgtcttggcggcgagcgtctccacccgctgcaagcggtgccaagcggtatcgccgagcttcacatgggcataggcgtccgcgagatcgggatgcggattggcgagccaggcggcttcgatccgcttcatggcacggcgcacctgatgcgcctcgctctcgaattttgccgcgagcacggccgccggcaccagggtcggcgcgagcttgaccgcctccatcgcgctctcgcgcgcgacgtcccggtccatcgtctccagctccagcgcgcgtgcggtgagcagcacgccgcgctgtcggcggtaggtctgcttgtcgatcaggcctgcggacagattcgaatcgaggatcgcgagtgcgccggcccagtcgccccgcgcgcagcggaagccgagcaccgcatgcgaagcccaggtcgaagacggcgacagcttgattgcttcttccgcgatcatcaccgctccgacggcgtcatccgcgcgctgcgcctcgatgaacaggccgcgcaggcccagcagccgcgtgtcctcgcgttcggccatgactcggaaaacgcgctgcgcctcctcgcgattgccttcgagctgcgccgactgcgcgtgcagcagcagggcgagcggatcgttcggcgcgtgccgccgcgccgcctcggtgtgacggcgggcgagcgcaggatcgccctggccgaccgcgagcaggccgtgggtgatggcatggcggccgcgggcctggcgcttgtcctggcggcggcggcgcaaacgccccggcgtgcgccagatcatcgtgagaatgctccagaccagcacgacggccgcggcaaaaagcccgagcaggaacacgaacctgggaagtgtcgtcgagatgcggaaaccacccgcggtcaggacgagatcgccaggctggtcggcaacccaggccgcgccggccgctgccagcgcgatcaggacgagaaagaggacgatgcgaagcatgacgatccctatacgcgccgattgttgcgcgaagctttactgaagaggcttgacgagatccgacatggcaccgtcggcgaatttgcgggacgcagcgagcgcagcgtcgcgggcatcggccttgtcgagccacgcctgcgctggcgcacgatccgcctctggcagagtcttcagctcgcgccgcgcttccgcgaaatcgttgcggagcgcagccgccgtcacgcgcgcaacgatggcgccgcgatcgttgccgacggcgtcggtgcgctcgatgcggacgagttttgacgcgccggcctgcagacgctcgacgatgccggcgttgctggccggagcttccgccggcggcgacagcttcggcacgatattgaggagctcccggctcagcgccgccggcgtcgggatgccggaagacgcaaatgcctcaagcggcttcagcatgtcgggcttggccgccagcgaccgtgccgcggccaactgcgactgatagggatcgccgtggcgaacggcaacgtcgagcagggacgccgccaccacatggcggagcggcttgtcgtccatcgccttgacctcggcgatcctctcgctctgctgcgcaagttcggcgcgctcggtcttgctggcgtgctcgagctgagcgatgcggtcgttgagcgcggcaagatcaggcgctgcagcaggcgacgctgtcctcgcctcgctcagggcgctcgcggtcttttccgactgcgcacgaagattgccaatgtcgctgcgcaagctgcttgcggatttctccagcgcgtcgattcgcgctgccatggccggatcgcctccgggcttgccggccttgacctcaaccgcagcaacacgcgcgctcagcgcatcgatcgtcgcactgctcacctgcggcgcggccgaaggcgcctgcactgcgggccagcccagcatccagccaaccgcgatcacgaccgccgctgcggcagctccggagaacggcgcaatgacccagggcgaaatcggtggcggcgcggcagcaggcgcgacggccgcttccgcctcatcgcgcttcggctctgtgtcaacgtgctcgggctcgggctcggcctgcacgggctcactctcctcgaatttggcctgcccggattgtgccggttcgctcgcggcgtgttccggtgtgggctgagcctcaggctcgcccgcaacctgctgcggctgggtcgagacttccgtcgcctggaggtcgatggtgggcggggtgcgcttggcacgacccgtgtcgggcgccagtccagcgtcttcaggcttgtcgtcggccatcgtgacggttcctcacacttccatacgttgcataggcccttgagcggaccagactgcgtcggattcggcccgacctcttacgccaaacgggtgcgcaacgcacgctccaaggtgtcgaacaaggcactttcgtccggcgtcgccgccaccagaacctgtgatgcgccggcgtcgcgcagcacgctcgcaacggtctcggacaggcagcaatgggggatcgccagcgccgagatctcgacgccttcctccctcgccgcatccaggaacgcgcgcgcgctgcgccgggagtagtgcagcaccgcctcgacgccatgcgtcgcaaagccctcgcagacctcgcgcggaagatgcttgacaggggccatgcggtaggtcgtctgcgtcaccacgcggaacccctccgcaccgagctcgccgccgaggtcgcgcgacagatcagcgccggcgagatacagcagcgtgctctttttcttcagcaccttctcgcgcgcgctctgcatcaccttgtcgcgcaaggaagcggcatcgccatcggcgacgatcacctcggcgaaaccggcctcgcgcgccaccgcagctgtatgctcgccaaccgcaaacaacggcagctgcaggaggccgagctccggcaattgcggcgcaacggcgcggatcgcattggcggacgtgacgagaacggcaccgtagggagcctcacgcgcgtcgtggaaggcgacgggctcgaacttgagcaccggcgcaagcagcaccgcgtgccctcgcgagcgcagactttccgctgtcgcctcattgtcgggatgtggccgtgtgacaagaatggacatcgctggtgttcccgaaccacgtggcggtcacgcattgatcagaaacggccgcgcgtgacgattgcgcaatccggccccggaatgctaccggacgtaccagaactctgctttacggatgagcgcaagggcgcaaattggataacaattcgccaatgctggtgctggggatcgaaaccacctgcgacgagaccgccgcggccgtgatcgagcgcgcgggcgatggcagcggcaagatcctgtccaacatcgtgcggtcgcagatcgaggaacatgcccgcttcggcggcgtggtgccggagatcgcggcgcgcgcgcatgtcgatctgctcgacggcatcatcgatcgcgccatgcgcgaggccggcatcggattcgcccagctcaatggcgtcgcggccgccgcgggcccgggcctgatcggcggcgtcatcgtcgggctcaccaccgcgaaggcgatcgcgatggtgcacgatacaccattggtcgcggtgaaccatctcgaagcgcacgcgctgacgccgcgcctcactgaccgcatcgaatttccctattgtctgtttctcgcctccggcgggcatacccagatcgtcgcagttgccggcgtcggccaatatgtgcggctcggcaccacggtcgacgacgcgatcggcgaggctttcgacaaggtcgccaagatgctgggcctgccatatcccggcggcccgcaggtcgaacgggccgccgcaggcggcgacgccgcgcgctttgcatttccgcgaccgatgcagggacgccccgatgccaatttctcgctttcgggattgaagacggcggtccgcaccgaagcgagccggctggcagagatcacatcgcaggacatcagcgatctctgcgcgagcttccaggccgccgtgctcgactcgaccgccgaccggctgagcgtcggcctcaggattttccgcgagaagttcggtgccccgcgtgcgcttgtcgccgccggcggcgtcgccgccaatcaggcgattcgcggcgcactccatgacgtcgcgcagcaggctcagacgcaactgatcattccgccgcccgcgctctgcaccgacaacggtgcgatgatcgcctgggccggcgccgaacgcctcgcgctcggcttgtccgacacgatggacgcgcaaccgcgcgcacggtggttgctcgacgccaacgcgacggctcccgcaggctacggcaacacgcgggcgggatactagcgatgacggcgctgcaatccgtcggggtcatcggcgcgggcgcgtggggtacggcgcttgcgacggtcgcggcgcgagccggacgaagcgtcatattgtgggcgcgcaacgccgagcatgccacgcggatggcttcaatgcgcgacaatccgcggctgccgggcgtcccgcttgcgcctgatatcgtggtgacgaacgatctggcgctcgccgcacgtgcggacatgctgctgattgcaacaccggcgcagcatttgcgcggcgccgtcaacatgctggcgtcgcatctggcaaagccggtcccgatcgtcgcctgcgccaagggtatcgagcacggcacccacaaattcatgaccgacgtgatcgccgaggccgcgccgcacgcgcagccggcgatcctgtcgggcccgagctttgccgacgacgttgcgcgcggactgccgacggcagtcaccctggccgcaagcgaggagaggctctcgagtgcactggtacaggcgctgggctcgccgaccttccgcccctaccactccacggacatccggggcgtcgagatcggcggtgcggccaagaacgtgctggcgatcgcggtcggcatcgcggtcgggcgcaagctcggcgcctccgcccaggccgccctaacgacccgcggctttgccgagctggcgcgtcttggccgcgcgctcggcgcgcgccgcgaaacgctctccggattgtccggcctcggcgatctgatcctgacctgctccagtccgcaatcgcgcaacttcgcgctcggactttcgctcggacgcggggagcagcctccggccggcaagctggccgaaggcgaattcacggcgccggtgctgatcgagctcgcagcttcgcaacgcgtcgagatgccggtatcggaagcggtcgcatcgatcctgagcggcaagagcacgatcgatgccgcaatctcggcgctgatgacgcgccccttcaagtcagaggaatgagcatggcgtactggctggtgaaatccgaaccgtcggtgtggtcgtgggaccagcaggtggcgaagggcgccaagggcgaggcctggaccggcgtacgcaattacaccgcgcgccagaacctcgtcgccatgaagaagggcgacaaggcgttcttctatcattccaacgagggcaaggagatcgtcggcatcgccgagatcatcaaggaagcctatcccgacccgaccgacaagaccggcaagttcgtctgcgtcgacatcaaggccgacaagcccttgaagacaccggtgacgatggcggcgatcaaggccgagaagaagctcgcggacatggcgctggtgaagtattcgcgcctgtcggtgcagccggtgacggcagatgagtggaagctcgtctgcaagatgggcgggatgtagatcaccccgtgcgcagtccggatgagcgacttgtcctgcgtcgctcgcaccgtgaagacggaagcgacatccaggatcgcttcccgcagatcgctacgctcatgcgggctgcgacacgcgaacgtccgtcagaccgccgcagtcgccaccacctgggccagaagctgctcgcgccttgcctgggagcgctggcccttcatggtcgcggcgaagcgctcgaggatgccgtcctcgaacgcggtgacgatggtgtcgtgcacgtagctcctgcggcagatcgccggcgtgttggaaagctggtcggccgcggcacggatcccgtccagcacctgcttcttgcggccgcgctggctggtggccggcgtgattcgcgacagcgattccacgacgacggcagaggccatcagcgtgcggaaatccttcagcgagatcttgatgccggcgatctcgcgcaagaacgcattcacctgcgtcgtgttgacggcgcgcacgatgccgtaggcgtcgcgatactggaacatgcgcttgccgggaacgccctgcagaatgccgatggcgcgcaccagcttggccgcatcgcactccttgcgcaccgccttgccgcccttggccttgaaggtcagcacgaagcaatcgtcttccagtgtgacgttggacttgagcagcgtggtggcgccgcgggtgccattgaggcgggcataggattcattgccgggacggatcgcggtgcgcgcgatcagctcgatcacggccgagagcgcgaattcgcgcgtcggctcgtcaccagacaggaacgccgagaccttgcgccggattttcggcagcgcgccgaccagcttggctaggcgatgcgccttgcgttgctcgcggaccttctcccagtcggcgtgatagcgatattgcagccggcccgcggcatcgcggccgacggcctgcaggtgcgagttgggatcggccgagtagcgtacctcgcggtaggccggcggcactgccatggagtgcagtcggcggatggtgcgggcatcgcggatatgcgcgccattcggacgcacgaaggagtagcccttgccgcgcttgatacggcggatggtcagctcgttctggtcgccgagccgcagaccgagctccttggcgagcgcttcgaccgtcacgggggccgtgtcgaaggtctttttggggctggggcgcctgaagccagtcggtttcggccattgtcccagggctttggcgagggcgactgccgcaggatcggctgaagcgggccgcatcgtcccgagattctgctgatccatcatagtgttatgccttgaccctgtctgttaccgttcaatgccgctgttctgagttttgttccttggggcctcgttggacccggattggccatttagggtgttccgaaccctattgcgagtcccgaatcagtgacagacggttcccagataccatcgacgtcgcatgggcgccccgcattggcctgttctgaaggtcggggttaagaggccgaaagcccgtcctcgcctgtttcagatttgcgacagccggcccgcgcagcttgatcctccgcatggccggcgacccgccgaaggtccagcttgtgctccttgtcgggtccggttagcccgacgcataatcagtcaattaccggtcggcccgccgttcgctggcgttcggcctgccgcatgtggagggaagcatgtccgagaagatctacgacgtccccgcggagtgggcgaagcgcgcctgggtcgaccaggccaagtacaaggagatgtacgctcgctcgatctcggacccgaacggtttctgggcggagcaggccgagcgcatcgactggatgaaggcgccgacgaaaatcgagaacgtctcgttcgcgcccggcaacatctcgatcaaatggttcgaggacggcgtcctcaatgtcgctcacaattgcatcgaccgccatcttcgcacgcgcggcaatcagaccgcgatcatctgggaaggcgacgatccctcgcagtccaggcacatcacctatcaggagctgcacgacgaggtctgccggatggccaacatcctgcgcacccgcaacgtcgggaagggcgaccgcgtcaccatctacctgccgatgattccggaagccgcctatgcgatgctcgcctgcgcacgcattggcgcgatccattccgtggtgttcgcgggcttctcgccggacagtcttgcccagcgcatcaacgactgccagtccaaggtgatcatcaccgcggacgaaggcctgcgcggcggaaagaaagtgccgctgaaggccaatgtcgacgcggcgctcgccaaggccgatggcgtcgactgggtcgttgtcgtcaagcgcaccggcggcaaggtcgacatgaacccgacgcgcgacctctggtaccacgaagccgcggcgatggtgacgaccgaatgcccggtcgagcacatgcacgccgaggatccgctgttcatcctctacacctcgggctcgaccggtcagcccaagggcgtgctgcacacctcgggcggctatctcgtgttcgcctcgatgacgcatcaatacgtcttcgattatcacgacggcgacatctactggtgcacagccgacgtcggctgggtcaccggccacagctatatcctgtacgggccgctggcgaacggcgcgaccacgctgatgttcgagggcgtgccgaactatccggacaactcgcggttctggaacgtcatcgacaagcacaaggtcaacatcttctacaccgcgccgaccgcgatccgcgcgctgatgcaaggcggcgatgagccggtgaagaagacctcgcgcgcgagcctgcgtctgctcggctcggtcggcgagcccatcaatccggaagcctgggaatggtatcaccgcgtcgtcggcgacggtcgctgcccgatcgtcgatacctggtggcagaccgagaccggcggcattttgatcacgccgctgccgggcgcgaccaagctgaagccgggctcggcgacacagccattcttcggcgtggtgccggagatcgtcgatgccgacggcaaggtgctggaaggcgagaccaccggcaatctctgcctggcgcggtcgtggccgggccagatgcgcacggtctatggcgaccacgcccgcttcgagcagacctatttctcgacctacaagggcaagtacttcaccggcgacggctgccgccgcgatgcggacgggtattattggatcaccggccgcgtcgacgacgtcatcaacgtctccggccatcgcatgggcaccgcagaggtcgagagcgcgctggtggcacacgagaaggtgtcggaagcggccgtggtcggcttcccccacgacatcaagggccagggcatctacgcctatgtcaccctgatggccggcgtccagccgacggaggatctgcgcaaggagctcgtgacctgggtgcgcaaggagatcggcccgatcgcttcgcccgaccagatccagttcgcgccgggcctgcccaagacccgctccggcaagatcatgcgccgcatcctgcgcaagattgctgaagacgagccgggcagccttggcgacacgtcgacgctcgcagatcccaccgtggtcgacgatctcgtcaagaaccggcagaatcggaagtcggcgtaggctccaggacatcgtcattccgggtcggtccgcaggaccgacccggaagtcgcgagttccggcccacgctgtcagccgcccggaacaacgcccgttcacagctctcgcgctcgcgtcagtgcgccccgcatctttcccgtcgagtgttgttttcaggtcatttactttatttcgaacatttcctttgttcccgatgctggctggctttcggcggccgcgcgtggaaactctctagttaatgggcgcggttaagaatgacctcaccgagggctgggcgctgcaattgccaggttctgcgtcattctggacgatccgtttcagggcgaggggaagcatcgatgtcgatgaggattgcggtggcgctggccgccaccatcggggttggagtcatgatgtcgacggcggccgaggcaaggccggagctggtgggtgcacacctgcccgactattcgcccggcacgatcgtggtcaggaccagcgagcggcggctgtatctcatcctcgataacggccacgccgtccgctatccggtcggcgtcggcaaggccggcaagcaatgggccggcacgacgaagatcgacggcaagtatcgcaaccccgcctgggcgccacccgccgaggtgaagcgcgacaagccgaacatccccgacgtcattccgggcggctcgccgcgcaacccgatgggcgttgcggcgatgacgctcgccggcggcgaatatgcgatccacggcacgaacgtgccgggctcgatcggcggcttcgtctcttatggctgcatccgcatgctcaacgacgacatcacggatctctatggtcgcgtttccgtcggcacgacggtggtcgtgacgcgctgaccgcctgcatccgccgagacaagcagccgcgtcttgggacgcggcttttttattgccagaagcgccagcggcgagcgcaccagccgtcgcgatggcctccattgtagctgcgcacaaagccgccggagagcaacgccgccgcaacactcgcagtctgtcgggtcgccacgtcggccagaacccggccgtatttgtccgggccgagattggcaatggtcacgtcgccctggccgagcagatcgcgcaatgcgcgggccgcagcttcggccttgtccagctcctgctggcaggacgccttgagttcaggtgcatcgatgccccgcagccgaatgcgaacgacggggtcgcgcccctcgcgctgacgaatacgagctagaaaggtgtcgccgtcaatggtccggatgacgtcgaccgggcggaggagatccggattgccgatctgctgcaggatgatctcggcgtcctgggcccggtcgtctgccgcatgcggcaggagccagcctgttccgtgacgaaaggtgagcacgatcgccgccaccacgccgaccacgaacatccacggtatgaggcccgagaagcggcggccgaacggggagccgccgaacgacgattgacgagcattgatccgggcgcgagaacgcattgtttcacgctagagctgagtcggccaatcccgcaagcgtgtctcatccaaactgcaactccgattacgtcactcaagacggcgttccaagcgctctccggcagatactccctgtagttgtacgggtcgagatcgtcacgtgacattcgtgatccggccgtacttctacggtcaccattgaatgttttccaaatctcaatctttggttgcgaagacccttgaggtgtggtcacagtccaaggaggcggcggtgggatcattcaggtttcgcattggaaccaagctcggcatcgtgacgggtataagcgtcgtgctcgtcggcggtatgctgacgaaccagatgctcggcaaccgatcgattgccgaatccaatcgtctggtcacgatcaactatctcaacaagggtaatgcccaggcggcccagacggcgatggcgcgggcacagatcgcagctctcgaaatcggcgcggcgccctcaggcggagaggtcgacaggctcctcgagattctccgcgcccgggccggtgaagccggcacggaaatcgatgccgcgacggagcgggcaacgcggaaagtcacccaagacgcctaccgtgagacaaggaagttcgtcgatgcatatctggccagcggcatcgaactggcggcagcgcaaaaggccatcatcggcgccgctgccggaggcgccaggattgctgcggaatcggccaaggccagcatccttgcagagcgcatgcgtccagcagccctggaggtcagcaagcgcatcgacgacctggtcggcgttgccaacgaattcgccgcgcgccgcaagggcgagatgttggccgaactggatcgcgtcgccaatttcgcattgatcgtcggcatgttcgtcgtcctgacgttgatcggctccgcggtcttttccgtgttgagcatcgcccggccgatccggcgcatcggcgacgtgctcctggatctcgcccgcggcaacaaggcggtcgagattccctacacgggccgcggcgacgaagtcggcgacaacgcccgcgcagctcagaccttcaaggagaatctgatccgcatcgagcagatggaagcggagcagaaggaacagcaaaccgctgcggccgctcagcgcaaggaagagatgacccggctcgccggcgcgttcgaggctgcagtcggcggcatcatcgcctctgtatccgcagcttcgcaacaactcgaggccgcggccggcacattgtccgagacggcggaacagacccagcagctctcgggaatggtcgcggctgcctcagaggaagcatctaccaacgtcggagccgtggcgtccgccgccgaggagatgagcacatcggtcgtcgagatcggccgccaggtgcatgattccagccgtatcgccagcgatgcagtcaagcaggccgagcgaaccgacatgcggatcaacgaattgctcaaggcggcaggccgaattggcgacgtcgtcaaattgatcaccgcgatagccgagcagaccaacctcctagcgctgaacgcaacgatcgaggcggcgcgcgccggcgaatcgggccgcggctttgccgttgttgcgagcgaagtcaaagcgctggccgcgcagaccgcgcgagcgaccgaggagatcagcgcccagatcgcggggatgcaatcggcgacggaggactccgtcggcgcgatcaaggagatcggcgcgaccatcgcccgcatctcggacatctcgacgaccatcgcagccaccatcgaacagcagggtgcggcgacggccgagattgcgcgcaacgtcagcgaggccgccaagggtaccgtggaagtcgcggacaagatctcgcatgtcagtcaaggtgcgagcgccaccggcgcggcgtcgggacaagtcctcgcatcggcgcggtcgctatcgagcgagagcagcctcctgaaggtggaggtcgagaagttcctcaacacggtgcgcgcggcttgatcccacgaccacgtcggcgagtgctcgcggcgctcgctgatgtgcccggtaccccggagtttcccgggtttgaccgccccgattggcaactctaagctgcatatagtcgagcaagcaactttgcttgctgaagatgctgcagtgagctccccacatgaatattgacgggacttcccccgattcgtgcgaacgaatcgccgatctgcttcgacaacagcccagcgccctcgacagcttgccgctttcgcccgtaggcgagttccagaccaggaccgtcacgctcgagaccttgacgcgtgaggtcaccgaatgccttgcgcagaacttccgggatcgcccggcggaagactttccgatgctttactttgcatgcggcaaggctcgggtcggctcgacggctctgagcaatctgttcggcatgacggggatgccctcatattatcaaccgctgaaggcgatcttgcgcaacgcgctcgtcgaccgcccgctgacgccctggatcgtgccctcggcgaaggacgagccgcacatcttcagcaaggaaacgatcgggccctacgtgcttgccgagagcctgttcaatccactgcagctcctggtcgaggccggctatccgcgtcaccggctgcatctcatcatgctcgatcgcgagccggcgagctcgctggcgtcgtggctcgacaagctgatctcgcgcgcgcctgcagataccttgctgcggcactatgtcgtcgccgctctcggcgcgtcccgtgtcgcgatctacgcccagcgacagggcattcccgtcactcattatgtctacgaggtcagcaaggaagcgctggcgtcgatccgggtcttgttcgaccgcctcggcctttcgagcagcttcacggagagtgccgtgacgtcatggcgggagccgggagacgcgtcagcaagcaatgcacgcgtcatcttcccgagcgaggcgaccatctacaaggtgcccaatctgcacacctccgatagcgcctatcgataccagcgccggaccacggcctcgctgggcgaagcccagctcgcggttctggagcgttgcggggtcaacgatgcctaccgcgcctcggttgcggcctgcgttcgcgatctcggcctgagcgccgcaacgtcggcacgcctgttcggcgactggtttgctgcggccgcgtgatcagcatgctggacattcccaggaccgccgaatccgccctccctggacgcgccggcggcaaacagcttcacgccgccagccatcttcgacgcctggaggctgaaagcatccacatcctgcgggagacggcagccgagttccgcaaacccgtcatgctgtattccgtcgggaaagactcttcggtgctgctgcatctggcgatgaaggcgtttcatcctggaaagccgccgtttccgctgctgcacgtcgataccacctggaagtttcgcgagatgatcgcgtttcgcgaccgccgcgcacgcgaactcggcctcgacctcatcatccacaccaacaacgacggattgagccagggcatcgaccccttcacccacggctcggcccgctacaccgacgtgatgaagacgcaggctctgcgacaggcgctggacctccacggcttcgacgcggcgatcggaggggcgcggcgcgacgaggagaagtcgcgcgccaaggagcgcgtgttctcgcaccggagcgcggcacatcgctgggatccgaagaaccagcgtccggagctctggggcctgtacaacaccgtgctcgcgcccggcgagagcatgcgggtgtttccgctatcgaactggaccgagctcgacgtctgggactacatcctgctcgaggacatcccgatcgttccgctctatctcgccgattcgcggcccgtagtcgagcgcgacggcgcgctgatcatggtggacgatgcccggatgccgatgcggcccggcgaagaaccgcaatggcgatccgtcaggttccgcaccctgggttgctatcctctcaccggcgcgacgagttcgacggcggcaaccctgccagagatcgtgcgggaaatgatggcgtcgcgcagctccgaacgacaggggcgcgtgatcgaccgggacagtcctgcatcgatggagcgcaagaaggcggaaggctatttctgatgtcctatcacgaggcaccgacgatcgctgtgaccgatgcgccgcggctcgggcaggacgatcggccgacgctgcgcttcgtcacctgcggcagtgtcgacgacggcaagagcacgctggtcggtcgcctgctctacgattcgaagacgctgctcgaggaccagctcgacgcgctcgcctccgagagcaagaccgccggcaccaccgggggcgatctcgatttcgcgctgctggtcgacggattgcaggccgagcgcgagcagggcatcaccatcgacgtcgcgtaccggttcttcgccacgcggctacgccgcttcatcgtcgctgatacgccggggcatgcgcaatacacgcgcaacatggcgaccggcgcctctaacgccgatctagccgtggtgctggtcgacgcgcgcaggggcgtgatcacgcagacgcggcgccatagccacatcctgtcgctactgggcatccgtcgcgtcgtgctcgccgtgaacaagatggacctgatcggattcgacggcgaccgcttctcggccatcgccgccgaatacctgacgctcgccgggcagctcgggatctccgaggtccagtgcatcccggtcgtggcacccgatggcgacaacatcgttgccgcgagcgcgcggatgccctggtacacggggccgaccgttaccgcctatctggaagccgtggacgtggccggcgacgtctcgcagcggccgttccggttgccggtgcaatgggtcaaccggccgaacgctgagtttcgcggcttctgcggacgcatcgcgagcggaacgatcgcagtcggagacgcggtacgcgcgcagccatcgggacaccagacccacgtcgcacgcattctaacgcccgccggcgaatgcaattgcgcaggggcaggcgaatccatcacgcttacgctggtcgacgagatcgacgtcagccgcggcgacgtgctgaccggcggatctgccgcgccggtctcggatcagctcgcggcgcatctcgtctggttcgacgaggaacccatggtggcgggccggcgctattcgctaaaatgcggcaccgcctcgaccggcgccgtgatcacgacgctgaagcaccggatcgccatcgacaccatggcgaaggaaggcgccaccaggctcgatgtcaacgagataggctacgttcatatcgatctcgatcgtcccctggtgttcgagtcctatcgcgatgaccgtgacatcggcagcttcattctgatcgatcctatcagccatcgcacggccgcggcaggaatgatcgacgtttcgcttcgccgcgccaccaacattcattggcagcagcgtgccgtcgacaaatcggtgagggcgcggctgaagcagcaacggccctgcgtgctgtggttcacggggctgagcggtgccggcaaatcgacgatcgccgatctcgtcgaccgacggcttgccgagctcggacgccatgcagcactgctcgacggcgacaatctccgccacggcatcaaccgcgacctcggtttttcgaacgcagaaaggattgaaaacgtccggcgcgtggccgagatcgcggcgctgttcgtcgatgccggcttgatcgcgctggtcgcgctgatctcgccgttccgcagcgagcgagagctggcacgccagcggctcgaggccggggagttcatcgagatccatgtcgcgactccgcttgccgaatgcgagcgccgcgatccgaaaggactttatcgcaaggcacgagcgggcgacttgccggcattcaccggcatcgcgcagccctacgaggcgccgccggcaccggagatcaccatcgatacgtcggaactgtcgagcgaggcggcgtgcgagcgcatcatcagctacctgcgagagcacaattacctgtagcgaccggaacgagcctgccaacgctgccctgcctcttcggcagatgttcagaagtcggaagcgatgcccttgcgctcccagtcgccatagcgtgtgggctcgggccctttcggcccctgcaactcctttgccctggcctcatccttggccagcgcagccgcagcctgccgacgagcctcggcttccgccagcgcgcgctgggcggctggggatagtggcttgcgatcgggaacgggaggctggtcactcatcgcccagctttctagcgcaggatcaggtgcaatgcgatccccaataacgcattcctgaaatcgggcccaagggctgaaaaaacccgcaagcgattcttacatttggcatattcgcgtgtcagagatcgggctctccaggcatgcgcccattgcggcggaactgccgctcgctcagaaccttgcttccgcatgccatctcaacgtttcgctcctccatccgaagtgcctggtcttgcggcacggcggatcgccgccgacatcgtcgacggcgtgctgcacaagcaccgtacgctcgacgatcagctcgacggcagcggcgcccatcccggattgaagacgctgcccgatcgcgatcgcgcgctgatgcgccgcctcgttgcgactgtgctgcgccggctcggcacgctcggccatgtgctgtcacgcctgctcgacaagggcattccctccgatgcgccgcgcgcgcagagcgcgcttctgatcggcgccgcgcagatcctctggatggacgtgccggaccacgccgcggtcgatctctccgttcgcctcgtgcagtccgaccgccgcgccgcgcgctatgccggcctcgtcaacgccgtgctgcgccgctgcgcgcgcgagggcaaggcgctgatcgatgaagtcgcgacgcaatcgcaggacctgccgccgtggctgctcgcgcgctggagcgcgcattacggcgagacgaccgcgcgagagatggcactcgcgctcggccacgagccctcgctcgatctgacgatgaagtccgaccccgcacaatgggcgagccgcctgcatggcgagacactgccgacgggaaccgtgcgcatgctgctgcacgggtcggtgaccatgctgcctggcttcgccgaaggacaatggtgggtgcaggacgccgccgcctcgctgccggcccggctgttcggcgacgtgaaaggcaagtccattgccgatctctgcgcagcgccgggcggcaagaccgcgcagctggcacatgccggcgcgcatgtcacggccgtcgaccgctcgccggcgcgagtggcacgcttgcgcgagaaccttgcgcgactgtcgctccaggccgagactgtcgtcgctgacgccgtggaatgggccgggccggccgaggccttcgacggcattctgatcgatgcgccctgcacctcgaccggtacgatccgccgtcatcccgacgtggcatggctgcggcaggaatccgatatcgccgccctggccgcgctccagcagcggctgctcagaaaatcgttgtcgctgctcaagcccggcgggacgctggtctattgcacctgctcgttggagcccgaggagggcgagcaggccgtggcggctctgctcgccgcggagcccgcgcttcggcgcgtcccgattgaggcggcgggggttgcgggcctcgacgaaatcctcagccgggacggcgatcttcgcaccctgccctgccatctgccgaacgccgatcccaagctcggcggcctcgacggatttttcgcggcccggctcgttaaatcctgattttgcactggattttgcgaccacgaccctgattcgcgccaatcaaggtggtgtcgggcgtccgattttgggattaataaggattcgttgctgatcctctccccatcaaggcaaggcgtgtcggtcgctcaacgcagacatatctcggcgctggtcatgaaccgcttcgcgcggaacgtgctcgcgcgcgcgagcggcggttccgttgcggtgtcgcgagtctggccgggccgcaccgatcgcctcatcatcgcgccacacgatctacgcaccgcggacgcgacccgggccgccgaaatctacgccggccgcttcgttttcgccggcaagatcgtcaattgccacggccgttcgatcttcgatctcgagcccccatcggaggattgggaggttgcgctgctcggcttcggctggttgcgccatcttcgcgccgccgacacggcgctgacgcgggcgaatgcgcgcgcgttgatcgaggactggatcgccaaccccgccaacaagcgccgtcccgtcgcgcgccgtgccgacgtgctggcccgacgcgtgatctcgctgctgtcgcaggcgcccttggtgcttagcgagaccgacaacaagttctatcgccgctatctgcgtgccctggcacgcgagatccgcttcctgcgctataccatggtcgacattccggacggggtgccgaagctccaggtgctgatcgcgctgtgctacgcatccctgtgtctcgccaaccagacgcgtcacatccgcagcgcatcgaagaagctgtcagacgaattgcagcggcagatcctgcccgacggcggacacatttcccgcaacccgggcgcgctgatcgaactcttgatcgacctgctgccgctgcggcagacctttgccgcgcgcaacatcgcgccgccgccggcgctgctcaatgcgatcgaccgcatgatgccgatgctgcggttctttcggcacggcgatggcaatttcgcgctgttcaacggcatgagcgcgacatcttcggatctgctcgccacgctgctcgcctatgacgacacccacggcgtgccgatggcgaacatgccgcataccggcttccagcgcctcgacgccggccagaccacggtgatcatcgacactgggccgccgccgcccgcgggcgtcagccacgacgcccatgccggctgcctctcatttgaactgtcttccggcaccagccggatcgtcaccaattgcggcatgccgaccacgggccgcgacaattggcggcctttcgcacgcagcacggcggcgcattcgacgctgacctaccacgacacctcatcatgtcagttcgtggagatgtcggcgatgaagcggctgctccacggcgcgcccgtcaccagcggcccggtcgaggtggagagctatcgcgaggtcgtgcagaacggcacgctgctcacgacctcacacgacggctatctcgccaggttcggagcgatccatcgccgcgtgctgatgatcgccgatgacggcgcgcgcatcgacggcgaggacacgctgtcgccgccgcagggcggacgcttcaagggcgcggacgccgatttcgcgctgcgcttccatctgcatccggcggtcaaggcgagccggttgtcggacgcgcgcggcgtcatgctggtgctgccgaaccgcgacgtctggaccttcgaagcattggacgacaaggtcgatcttgaggacagcgtattcctggccggcaacgatgggccgcggcggaccgcccagatcgtgatccgtcagaatgcccgccaggccccctcgatccgctggagttttgtccgttccaccgcctcgccggccgtgaccaatgcccgccgcaacgctcgccgcgagccggaacttccgctgtaacgcgagaattctgcgcatctcgtcgttgtgaaaacgggcgaaagctgctaacgaacgcgcgctcgcgcgactggcgaccttggatggagcaccatcgggaagcgcgggacatagaagccgcgcgcctgggcatagacactcgctcaacagaggatcttgctcatgactgaccatccccgccgcgtcacccgcgccctgctctccgtttccgacaagaccggcctgatcgagttcgccaaggcgcttgccgcgcaaggtgtcgagctggtctcgaccggcggcactgcaaaagcgattgccgcggccggcctcaaggtgaaggacgtctccgacctcaccggctttcccgagatgatggacggccgcgtcaagacgctgcatcccaaggtccacggcggcctgctcgccatccgcgacaacaaggagcatgcggaggcgatgaaggcgcacggcatcgcgccgatcgaccttctggtcgtcaatctctatccgttcgaagcgacggtcgagaagggcgccggcttcgaagattgcatcgagaacatcgacatcggcggtcccgcgatgatccgcgcggccgccaagaaccatgacgacgttgccgtggtggtcgaagcgcaggactatcagtccgtgctcgacgagctcgccgccaacaagggcgcgaccacgctgaaactgcgccggcgccttgccgcgaaggcctatgcccgcaccgcggcgtatgatgccgcaatctcgaactggttcagccgccagctcgagatcgacgcacccgacttccgcgccttcggcggccggctgatccagtcgttgcgctatggcgagaacccgcaccagaccgcggcgttctacacgacgcccgacaagcgtccgggcgtctccacagcacggcaggtccagggcaaggagctttcctacaacaacatcaacgacacggatgcggcctatgaatgcatcggcgagttcgacgccaagcgcaccgcggcctgcgtcatcgtcaagcatgccaacccctgcggcgtcgccgaaggatcgaacctcgtcgaggcctatcgccgggcgctggcctgcgattccacatccgcgttcggcggcatcatcgcgatgaaccgtccgctcgacgccgacaccgcgcgcgagatcaccaagatcttcaccgaagtcatcatcgcgcccgatgccagcgaggaggcgatcgccatcatcggcggcaagaagaacctccgcctgttgctcgccggcagcctgcccgatccgcgtgcgccgggcctcaccgccaagacggtggctggcggtctcctcgtgcagagccgcgacaacgccgtggtcgacgacatgaccttcaaggtcgtgacgaagcgtgcgccgacggaggccgagatgcgcgacctgaaattcgcattccgggtggccaagcacgtcaaatccaataccatcatctatgccaaggatctcgccaccgtcggcatcggcgcgggccagatgagccgggtggattcggcgcggatcgccgcgcgcaaggcgcaggatgcggccaacaagctgaagctcgccgagccgctcaccaagggatcggtcgtggcctcggacgcattcttcccgttcgccgacggcatgctcgcctgcatcgaagccggcgccaccgccgtggtgcagcccggcggctcgatgcgcgacgacgaggtgatcaaggccgccgacgagcacggcatcgccatggtgttcacgggtacgcggcacttcaggcattgagctaggacgaactcaccgacttcgtcattgagcgcgcagcgaagcaatccggaattttcccgcagaggaagtctggattgcttcgtcgctgcgctcctcnnnnnnnnnntggagagagttgatagcgacccgcagctacttccgcacccgcatcagcagccccagtcccgcaacgaagaacaccaccagcacggccatgccggccttctggctggcggtcaccgccgtgatcgtgccgatcaacagcgggccgatgaaggacgtcaccttcccggtcagcgcgaacaggccgaaatactgcgcgatgcgatccttcggtgcgaggtggatcagcagcgtgcgcgaggcagcctggagcgggccgccggccgcaccgatgaggcagcccagcaagagataggcgcgctcggccgcgctcgagaacagaggagcgcctgcttgcggcggcgcgaccttgacgaacaggacactttccttgtcgaccagaaggatcgcggccaccgccagcagcaggacgagcagactgccggcaatgacgcgcttcggcccgagacgatcatccaacttgccgccgagccatgcgccgaacgcgccggcgatcgcgagcatgatgccgaaggtgccgatctggatcgtgtgccatccgaacgtacccgcggcatagatgcccccgaacgcgaacagcgacaccagaccatcggtgtagatcatgttggcgagcaggaacgctgcgagcgacttctgcttcggcagccgcttgatcgattgcttcagctcggacagaccttcgcgcagcgcttcgcccagcggtcgtttcgccggataatccggcgtgaacaggaacatcggcgtgacgaagatgatgaaccacaggccggtcaacggcccggcggcacggtcaccctggcgcatgacgggatcgagcccgaacaatggcgagagtccgagcagcgtgcgaccggtctcgggattggccgcgaaaaggccgagcacgatgatcagactgacgatgccaccgatgtagcccgtggcccagccggtgccggagagccggcccatccgttccggaggcaccagggtcggcatcatcgcattgttgaagaccgtggcgaactccgctccgacgctggcgagcgcgaccgcggtgagcagcaacggaatgatggcgtgatcgccgggtctgccgatccatagcgtgcaggacgccaccaccaataccgcgccgaaacctgcgatccatggcttcctgcggccagatgcatccgcgatagccccgagcaccggcgacagcagcgcgatcgaaaggcctgccgcggccattgcaaaggcccacagcgattggccggtggccggatttggcgcgacgctggtggcgaaatagggagcgaacacgaaggtcgtgatcagcgtgaaatagggctgcgccgcccaatcgaagaagatccagctgacgacggcggcacgcggcggataggtcggcgctgcgccggccatgcgcacgtcgggaacgatcgtcgtggtcacgcaatcctcatcacgaacagttttgcctctgttggagcaaaccgtatagcattgcagcgaggcgtgtgaactggcccgaggccgcggcggaagtttgatatgtcatcgtattcgacacggcggacatttttcgccttcattgccactctggcgtttggtttcgctcccgcggccgcacaggatgcgcggcagggctatgtcccgcccgcgcgcgacatggtgcgcgccgtcgccgccgagcacggcatggtggtggcgcaggagaagctgtccgcgcagatcggcgccgacatcctgcggcgcggcggcaatgcggtcgacgctgcggtcgcgaccggctttgccatggcggtgacctacccgcgcgcgggcaatatcggcggcggcggcttcatggtgatccattccgccgatcgcaacgaggacatcacgatcgactatcgcgagacggcgccggccgccgccacgccgcagatcttcctcggcgctgacggcacacccgatgctgcaaaatcacgcgattccgcgctcggcatcggcatacccggcacggtcgcgggcctcgcgctggcactggacaagtacggctcgggccggttcacgctggcacaattgctcgcgcccgccatcgcgctcgcccgcgacggcatcatcgtcaacgacgacatcgccgatacgctgccgagctggcaccggcggctggcgcgctggccttcctcggccaggatcttctcgcggccggacggcacgccgctgggcgaaggcgaccgactggtgcaagccgatctcgccgaaacactgtcggccgtcgccgcacagggaccacgcggcttctacgagggaccagtcgcggagaaactcgccaaggcggtgactgacgccggcggcatcatgacgccggccgacctcaaggcctatcagccggtgatccgcgcaccggtgcgcggcagctatcggggctatgacatcgtctcgatgcagctgccgtcgtccggcggcgtggtgctcgtcgagacgctcaatatcctcgaaggctatcagcttgccgatctgaagcagggatcggcggcatccctgcatctcttgatcgaggccatgaagcgtgcctatgccgaccgcgcgcgctatctcggcgatcccgccttcgtcaacgcaccgatcgagacgctgatcgcgaaagattatgcgtccaagctgcgcgcaggcatctcttccgaacgcgccacgccgtcgaaggaactcgtgtccgcttctgctgggccgcgcgagggcagcaacaccacacatttctccgtcgtcgatgcccgcggcaacgccgtcagcaacacctacacgctgaacttcagctacggcgtcggcctcgtcgccgatggcaccggcgtactgctcaacaacgaactcgacgatttcaccgcggcagtcggcgcctccaatgcctatggcctcatcggcttcgaggccaacctgccagggccgggaaaacggccgctctcctcgatgtctccgacgatcgtgctgaaggagggcaagccggtgctggtgacgggctcgcccggcggcagccgcatcatctcgaccgtgctccaggtgatcgtgaacgtcctcgactacaaaatggatgtcgcggccgcagtcgcagcaccacggctgcatcaccaatggctcccggacgaggtgcgcgtcgagcgcgggttccccagcgatgttctgggcgaactgaaggcgatgggtcaccacatcgtcgaaccgatggggcagacatcggccaattcgatttgcgtgacagcggagggaccgctcggcgcggccgatccgcggacgcgcggcgcggaagcggcggggcagtagccgcgtcattgcatggcacgggagcgcaggcccgctagctctcgctgccatgcgtgctaccaatgcgcagccttcgagaaactgccgggaaacgcacatgaccacctcggatccgaaccagcgcatcgaacgtgctgagatcgaggacaccagcctgctcgccttctatcgcgacatgaacatgccggagcggcggacgttctgggcctgcgccgcgggctgggcactcgacggcatggacttcatgatctatccgctggtgatcggcaccatcatcgccctgtggaaggtcgatgcggcctcggccggccttgccggcacggtcacgctgctcgcctccgccatcggaggctggctcggcggttatctgtccgatcatatagggcgggtcaggacgctccagatcacgatcatctggttctcgttcttctcgctgatctgcgcgttcgtgcagagtttcgaccagctgctgattgcccgcgccttgctcggtctcggcttcggcggcgagtgggccgccggtgcggtgctgatgggcgaggcgatccggccgcaatatcgcggacgcgccgtcggctcggtgcaatcgggatgggcggtcggctggggcctcgccgtgctgtcgcaggcgatcctgttctcactgatgccggcggagacggcgtggcgctggatgttcgtgatcggcgcgctgccggcgctgctcgtgttctacatccgccggtcggtcactgagccccagatctcggcagagacccgcgcaagacaggctgcgagcggcgatcggccggcactctgggaaatcttctccggcccgatcctcaagaccacgatcctggcgtctctgatggccacgggctgccagggcggctactacgccgtcaccttctgggtaccgcagttcctgaccaaggagcggcatctctcgatcgtcggctcgactgggtatctggcgacgctgatcatcggctcctttatcggttatctcgtcggtgcgtggctcgccgaccggatcggacgacgcaatctgtttctgatcttctcgatcggcgcgatggcggtcgtgctgctttatacgcaactgccgctgacgaacgagattctctgggtgctcggtttcccgctcggcttcttcgcttcgggctatttctcagggatcggcgcgttcctgaccgagctctacccgacacggctgcgtggctccggccagggtttttgctataatttcggtcgtggcatcggcgcgctgtttccgttcctggtcggcgcgctatcggcgacgacgtcgctggcaaatgcgatcgcgatttttgcggtggtggcttacgccgtgttcttcatcgccgcgttcgcgctgccggagacgcgcggacgcgtgctgtacgcggattgatcgagaggcgccgttccggggcgctcgaacgcgaaccatggtgcgcgactgcgcacctgagaacctcggaattccgggttcggtgctcggcaccgccccgagatgacgatggaaacaatcaccgcccgacctgatacggtccgcccttctccagcgcgcgcttgtaggctggccgcgcatggattcgctccaggaatgccatcgccttgggatggccctgctcgagcccaccacgcgcttgggctgcttccagcggaaagctcatctggatgtcggccgcggtgaattcgctgccggcgaaccactcggctttgccaagctcgccttcccaatagtccatgtgctgcttgagctgcggattgaccagcgcggtcagcgcctggttgcagaccttgcgcaccagcggacgcagcagtgccggcgcgcgcttcggcatcagcgtgaataggagcttgagcagcagcggctgcatcgcggatccttccgcatagtgcagccaataggtgtagcgcagccgctccggcgtgttcggtggggggatcagccggccattgccgtaggtggcgatgatgtattcgataatcgcgcccgactcggcaatggtgttgccgttgtcggtgatgacaggcgacttgccgagcggatggatggcgcgcagctccttcggcgcgcgcatgtccggctggcgctgatagcgcacgatctcgtaaggaacgcccagctcctcgagcagccacagcacgcgctgcgagcgggaattgttgaggtggtgaacggtcagcatcgtggatcctcaaggcttggacgtggtcgatcggccgcgccgttcgtgccagcccgggaacacattgtcgagccaccgctgcgggtattttcacccgggtatattgacctcgctaatttacccgggtattaaagctggtaatacgatcaatagggtcatgattccaatgcacgggacctacacagcttttgccggccagcgccggctggcctccggtacggcgggcgatgtcgcgctcgcggtcaagcgggcgacacagccgctggaccagccgatcatcatcttcgacgacggcacgggccggtcgatcgacttcgacctgcgcggcgacgatcgtgaggtgctggcgcggctggcgcagctcatgccgccggccgagacggctgaagcacccagcgagccacgcggccgcggccggccgaaactcggcgtggtcgcgcgggaggtgacgttgctgccgcggcactgggagtggctcaacgcccgacccggcggcgcctcggtcgcgctgcgcaagcttgtcgaagaggcgcggcgcgccagcggcgacaaggatcgcgagcgtcaggcgcgtgatgcggcttatcgcttcatgtcggccatggccggcgatctgccgcagttcgaggaggcctcgcgcgcgctgttcgcggacgaccggcggcgcttcaccggactgatagccgactggccggctgatatccgcgaccacatcgtcaagctcgcctacagcgaccgcgcttaaggcaccgttctcataaccccatcgacggccgggccacgcgtgcttcgcgtcgcaacggcttcgcacgtcctgatgaaaggccgatccatgtccgccccgaagccgctctggaccacgttcgtccgcttcctcgcacccctgatgctgagcaacgcgctgcaatcgctgttcggcaccgtcagcaacgtctatctcggccagatgatcggcgtcgacgcgctcgccgcggtctcggccttctttccggtgatgttctttctcttcgccttcgtcatgggcctcagcaccggcgccaccgtgttgatcggccaggcctttggcgcaggcgagcacggccggatcaagatcatcgcgggcacgacgctcgcagtcggcctgctgctgtcgattccgatcgcactgattggcgggctctgcagccgtgaactgatgatggtgctcgccacgccgccggacattctcgatcaggccagcgcctatgcgaaggtcatgctgctgaccatgccgctcggcttcgtcttcctgctgatgacggcgatgattcgcggcgtcggcgatgtgctgacgccgctgctggcgctggcattgtcgactgcgatcggcctgatcctgacgccattgctgatccgcggcacgtcaggactgccggcggccggaatcatcagtccggcatgggcatcggcgatcgccaacgcggcgacgctgatcgtgctcgcgatccatctgctgcgaaggaagcacgcgctcgcaccggacgctgtcatgatgcgccatcttcggcttaacggcgccgtactgcgaaacatactcggcatcgggttgccgagcgccatcggcatgatggccatggcaatcgccgagctggtgctgctggggctcgtcaacagcttcggctcgaacgccacggccgcgtacggtgccgtcaaccaggtgatgggctacacgcagttcacggcgatgtcgatttcgatcgcggtttcgatcctcggtgcgcaggcgattggcggcggtgacagagcgcgcctcgacggcatcgtgcgcgccggtcttgcgttcaacctcgtgctgaccggcgggctggtggcgctgatctatctcgcgccgcgcgcggtgcttggcatcttcatcacggacggcgccgtcctcgatctggcaaaagggctgttgtacatcgccttgtggagctcggtgccgttcggcctggcgaccgtgttttcgggtgcgatgcgtgctggcggcgtcgccttcacgccgatgttgctgtcgatcttcgcgatcgtcgtgatcgagctgccagccgcggtcatcctgagccgcacgatcggcatcgacggcgtatgggctgcctatccgatcgtgttctgcgccatgttcgttttgcagatgggctattaccttctggtgtggcgcaagcgggcgatccgccgtctgatctgaccgtcaaagtattatgaccatcattaaacggtggacctgtggcacgccctgcgccacaatggacaaaagcgacctcagggagaatgatcttgacccgtaccgccccgcaattcctgttcgatttcggcagtcccaacgcctatctcagtcatctggcgattccggcgatcgagcagcggatcggggtcaagttcgactatgtgccgatcctgctcggcgggatcttcaaatcgaccaataacaagtcgccggccgagacgctcgccggcatcaagaacaagcgcgagttccatcgggtcgagaccgagcgcttcatcaagcgcttccatgtccagccctatgtctggaatccgcacttcccggtcaacacgctgaacctgatgcgcacggcgatcgcggccgagctcgagggcgtgttcgagcaatacgtcgaggccgccttccatcacatgtggcgcgagcccaagaagatggacgatcctgagatcgccgcgaaggcgctggcgtcctccgggctcgacgcgcaaaagctgttcgcccgggcccaggaacccgacgtgaagggcagactgatcaagaacaccgaggaagcggtggcgcgcggcgcgttcggctcgccgaccttcttcgtcggtgacgagatgttcttcggcaaggagcagctgcgcgaggtcgaggagatggtgtcgggaaagtgaagcgcgcgaatggcgcgtagcgaatagcgggtggaaatcgcgcctgctattcgctactccctgttcaccactcgccaggaatggaacggagcatttccatgcgtatcctcgtcgtcggcgccggcgccatcggtggctattttggcggcaggctgttgcaggccggccgcgatgtcaccttcctggtccgaccacggcgcgccaacgagcttgcgagcgcaggcctcgtcatcaaaagcccgaatggcgatgtgaccctgaaaaacccaccgaccgtgcaggcggacgcgctcaaggacaagttcgacgtggtgctcttgagctgcaaggcgttcgacctcgacgacgccatcaagtcgttcgccgcggcggtcgggccgaacaccgcgatcatccccatgctcaacggcatgaggcatctcgatacgctggacgcgaggttcggttcggagcgcgtgctcggcggcctctgcgccatcgccgcaaccttgaacgagaagcgcgaggtggtgcagctgcagccgatgcagtcgatcaattacggcgagcgcgacggcaagatgtcggaccgggtgaaggcgatcgacgaggccttcaagagcggcatcactggcgccaccgcgagcgagaacatcatgcaggacatgtgggagaagtgggtgttcctctcctcgctcgcggcatccaccagcctcatgcgcgcctcggtcggcgacatccttgccgctcccggtggccgggatttcctgctcggcatgctggacgagaccagcgcggtcgccaccgcgtcgggttatccgccgggtggccctttcttcgaacgcgtgaaaggcaacctcaccgccgagggctcgccgatgacggcctcgatgttccgcgacatcaaggcaggcctgccggtcgaggccgaccacgtgatcggcgatctcattgcgcgcgccgatgccgccaaggtgcccgtgccgaagctgcgcatcgcctatacgcatctgaaggcgtatgagaggcagcgggggagctgatttcattctccaatgtcgtccggatcggcgcctcgcctgtccgggacaacaatggagtttgcggcagcagctcagctgctatttcagatgagcgagataatgcgagacggcagtgatctcctcgtcgctcatgcgataggccacatcgaccatcgcagcgacgccgttgccgatgcgctggccggccttgtagtcgtgcaatgccttgacgagatattcctggcgctggccggcgagccgggcgacgcccttggtgccggcatagctgtccgtgtggcatgaggcgcagcggcgaccggcagccacctgcgcgccctttttcgacaggtccggatccttgtcctccggacctttcggcggcgtgagctgcgagaagtaagcgccgaaattgcggatatcctcgttggtcatctgctcgacgatcggctgcatctgctcgttcttgcgcgcaccggcgcggaagaacaccagctgccactgcaggaattgatcgggctggccggcgagcgagggaatgttctccgtctgcgagatgccgttcgcgccgtggcagccggcgcaggcggaggctttctccttgatcgcggcattgtcggcgccgctcgcagagaatgcgccgagcgccaggagcgcaaccgcgcccattgcgtgcgagaggacttgtcggcgcatgagggaagattccgatctagcgatgtcgtcattccgggggcgcgcccttggcgctggccgggactccataaccgcggatcgcggctatgggttccggacttgcgcgcaagtggcgcaatccggaacgacaatgaatcagacggaaggggctgcagcgccttgcggccaccgcagccccatgtcgtacgcgctacttcttggtgtagctgatgcgatagatcgcgccggcccaatcgtcggcgaccaggatcgagccgtccttggcgatgatgatgtcgttgggccggccgagatagccctggtcaccctcgagccaaccggaggcgaagatctcccgcttgggattcttgccgtcgggcccgacgatcacgcgcacgatgcgcgcgccctggtacttgtgacgattccaggagccgtgctcggcgatgaggatattgttcttgtactcggcggggaattgatcgccggtgtagaacttcatgccgagcggagcgacgtgcgcgccgagattcagcacggggggcgtgaactccgagcacttgtggcccatcgcaaacttgtcgtcgggcaaattgccctggtggcaatagggatagccgaaatgctcgccgatccggttgatcatgttcagcttgtccgagggcagatcgtcgctgatccagtcgcgggcattctcggtgaaccagagcttgccggtgcgcggatcgacgtcgccgccgaccgagttgcggacgccaagcgcccagatttcggcgttgccggtcttgggatcgacgcggcggatctgcgacacgctggtcggcggaatgccgatgttgaacggcggtccgaacggcaggaagaaccagccttccttgtcgaccgcaatgtatttccagccatgcgcggcataggagggcatgtcgtcatagacgaccttgccttgcccgagattgtcgagattggcttcggcgttgtcgtagcggatcagcttgtcgacggcgatgacgtagagcgcgccgtccctgaaggcgagaccggtgggcatgttgaggcccttgaggacggtcttgacctccttctttccgttgttgtccttgatggcatagacgttgccgaggccgaacgagccgacgaacagcgtgcccttgtcaccccaagccatctgtcgcgccgccagcacgcccgaggcgtagacctcgatcttgaagccggacggcagcttgatcttcttgacgatgttggcgagctcggcgtcggaggcgccggtcggcgggcccgagggcggagcgaggcccttctgcgcctcggtctcgtcgccgagaaaccaatcgtccggcggatgggtccagaattccttggtgccggattcgtatttcttcagcgcccggttcttgtcctgctgttgcgcattgccggcgctggtcccggcgagaatggccacggccgcaagcgccaacacggatcgatggaacatcgatgtcatcgcgtcactcccctaaggcagccggcaaggctgcgatttatcttgttttgctagtcgagaggcgaggttcggagtctgctggaggcagacgcaaaaaggctagcacatctgcgagcgctgagaagagcatcgcgtgtgctgcagttgcgctcgttcaaaattgagacggagtgtcgatgaggcacgagcaccgcgtcggcagcgctctcgctgcaacgcggaatccgacggacaggagctcgccttcggacagcgcaagagaggggccaacacccaaactgcgaaaacaaccccatgcacagtnnnnnnnnnncgcaggccgctccgcgcgcggcgacgccggacagacacttgatgcaccgagagaaatgacgagcgcgggctcacggggcgacggggtagggcccgccgtcaaacagcctgtcgtgatagcctttcgatccgacctcgcgcgccagtgcgctgcggaaatcgcggtcatcccgcaggctgcgcagcacatgcgcgaagtcgaattcaggccgccagccgagctcgcgccgcgcgcggtcgttgacatagacgcggtcgatcgcggggaagaggcgccagccacgcgccgcgtagagccgcgcgcactccggatggagctcgcgcacgacgctcgccgcatcgcgcgccagcgccgccagatgacgttgctcgaacgggctcgtcgccgagacgatgtagcggccaaagccgatcttcggtgcgcgctcgacggcgagcagatgcgcgctcaccgcatccgcgatatcgagccggcgatagagcagctcgttggcctgcgcgttatcgagcgcgtaggccgaccgcatcaaaggatcgtcgtcctcctcggggaagaagcgcgaggtccgcaacacgacgacgggcaagcggcgttcgcgaaagaacagctcgcagagagtctcggccatcagcttggtcgtgccgtagatgttcttcggcaccggcgccaggtcctcggtaccccacacggccgcctctcccgcctcgggacgaagctgcgaaccgaacgcgctggtggtgctggtgaagacgaagctcctcacgcccgccgccgcggccgcctcaagcaggttgagcgtgcccgtgacgttggtgtcgacaaagtcctgcttggagtgcgtcgccacatgcggcttgtgcagcgtcgcggtgtggatgacggcggtgacgccgtccatctggcgccgcatgaaggcgggatcgacgatggagccgacagcatcagtgaagggggagggctttagatcgatcccgcgggcaggcgacccgcgctcacggagcgtccgcaggatggcctccccgaggtggccggcgctgccggtgatcaaaatggtcatgtcgaacccaacaattcagccgtcagcggcgtggaaaccacggcccgaccctggcttagctggacgcttgggaaaaactggagcgggcgaaggggctcgaaccctcgaccccgaccttggcaaggtcgtaggggacgggaaatgtgggcttatgtggcactcataataggctcctttaacattgttttcgcttaggaattgctattgccggccgcgcgtggtccacgtacgcccacacttcgaaaacggggaattctttaccccgctttaccccgaggccgaaatgcccgccaaaaagctgacccgcgatcgggtcgaaagtgagaagcccggcaccgctcgacgcgaggtcccggacgcggcctgcccgggcctttatttaatcgtgcagccctccggggcgaagtcgtgggctttccgctatgttattgcgggggccacccggaagctcacgctggggcagtatccggcccttacgctcgaagctgcccgcgccgaggccgcgacggctaggggcgaggttgccaacggacgcgaccctgccggggtcaaggcggaaacccgcaaagccgcacctgcgaacaccgtcttggctgccttcaaggactatgaccgcggacacctgtcatggggccgcccatataccgatcacgaaactaaggaagttgcccccgccgagaccgacgccaagggcaacccggttgatcctaaaatcggcgtcgagacggctgctgcaacgcggtcgttctttgtgcgccgcgtcctacccgcgtggggccgcagggcggtcgggtccatcactcgccaagactgcgttagcctgctcgacgggctcgccaagttcaaggacgctcggcgcaaaggcaaaacccgcctgtcgcacttcttcggctgggtgatggaccgcaatgcaacggtgaaggccaatccggccgcggggattcaaacggagacagccgattcgcgcgagcgcattctgaccgacgacgaaattcgaattgtgtggaacgcctgcgcagaccccagccttggcaacttcggcgcccttgttcgaacgctgatgctcacaatggcgcgacgcaacgaagccgccttgatggaccgcgccgagttatcgccgtcgctatggtcctgcgagggacacagaacgaagaacgggctgcctatggattggcaccggacgccgcagttaaacgctatcatcgaaccgctgctgaagaaatcgaactcgccgttcgtattcgaaggccgtcaccacgatcgacccatgggcggcttctccgattggaaggcaaagctcgatgagctcacgggcgacgccgtcgcgcactgggttttgcacgacctccccgcgggtcacttcaaattcctccggg
